United States Patent Application Publication US 2014/0325702 A1 - sequence listing, part 4

SEQ ID NO: 2366 - DNA, 3456 bp, Heterodera glycines
aacttttatttttagcccgaatctcacagaatctccattaaaaactggtttgattatttaaaatagcacaatttaattctttgtttttcttaaggattgaatttcgggagaaaattcattgtccgttgtgcaataaagaagctgaactgagcaatgtaagcacaggcaatttgtttggtggacttgtaaatttatttattaatgaataaattgtttatttttaattatgccgctggcaaataaatgccactttaggctgacacacattcacacaaactaaaaaaaaattcattcgttaaatttttgcccagttcggccaacttttacccattttctccgctctttcggatgcgcctttggcaatgtacaaaaatcccttggccgagttgtaccgtcgtgcgcaaagtgccgacaacgctttcgtcaaggcccaatcgcaatttgtgttgtcttcgattgttcggcaaatcagccaagttgagggacgagtgcgcaatttgttggccaattttcacattttgatggcacaatttcggcacgatgagtcattgtttggcgttgaccgcggcactttttcggtgaatgccaaattaatgagcttcattcaaactgtgtacaaagacccgcacattatcacaaatcagcgggacagagagcaattcttttacgcgtttgacctgatcaaatgggccgaagtttttcaaagttcggaggcaaacgatgcgttggaaagtatgcaactgatcagtgaggagatggaggaggaggacacggacaaatgaccaaaaccgatgggccagagaagagaccgttttatggattgtgatttagcctcatttcttctgttcattttgtagtcattggattacctggaaagggccatgggcatggagatgaaaagccgaggaaaagcagggccaattggtcattggcatttccatcagtcatttcattgggggaccaaactccaattaaatgcctgaattatatttatttccaagccaattctaggtgaatactgatcagttgacctcggctttatctgtctctacagcggcttctcccaatttacatttcttcaattaatttattttgtaattttttatgttttcctcttcaattacgcacaaccgattaagtaattaattaatgtttaagaaaataaaaaaaccattcaatttattggagagtgataattaaggttgaaagtttgttttgaatgatatcatttgataatcgaacggagatgctcatcaaaaatcaaacatcgatgttcagctatttgtggtagcattggctcaattctcaaattttgaattaaaaaatcaaaaaaattttggcgaaaattgtgccaatttggctgtcatgaaaatgaaatgatcggcaaattttcttattcgttctccactgattatgcatttattccttctgtccacttctgtttcatgcgattggttttgggttttgttgtttgttgaagcgttggagtttcacgaaattctgcaacattagattaatttgtcgcctcattagaatggaatgtattaattatgcaatttccctcaattagtggctgacgatgaattacggtactcttcccccacctgtggcgtcagcgttgtacggtagtaagtgccctttggcacggcaatgaggtccccgcggcgcaacaacactcgggcccacttgtcgtcgtcaaactccacgtcgtagtacatttcgccgtccagcaccagcagcacactgtcctcaacgctttcggacggttcgcacatttctttcaacttaaaaagtggcataaaatgtgcaaaaatagcgcaattttaatttaataataaattaaattttgccagatctttctgtgcccccccaccttctcctccaaatcgcagcccaaccgcttctccaccgtgaccacgtccgccccgctcactttccattcgcttttgatgcgcgtcaatcgcttcttcatcgccattgtgtcgtccaaatccacctgaaatggcccaaattcaaatctaatccatttcattcttcttggacaattccaccttgaacagatggacaccggccatgtcgagcagttgcgtgttcgggatgaatttgggtgggaatacgtggtggggcagacgcatgtcgccgcaggggtacgcctccatctcccagacttgcaacattttttgttcggagaaaatggaaatttgaaattaaattgctaaacaaagatttcaaaatttttaaaataaattaattaaatttgcgcaatttcgtgtgattttatttttgggcatcgaagaatataaatcgcgccgcgccgcaaatgcactttaatattgtgccttttattcagtcattttgtgggtcaaaaacaaaaatccgcataatcacgggcaaaagaaagtgggttattgggcgattattattattattatcacacgaaaaaataaatcgccttagggcgagtggaagggattttggattaaaaaacaaattgtttatttttaacaatttggttgttttcaacttaaaaattagacagaagagggaagaaattgagcctataagtaaatattaattaattaataattaagtatacgaatggttcacgtgaattgccactgagttttggtagggacaattacgtgctgattttttcgcgttgtttcacttatgcaacaaaaattaaaggaaaaataaaaaaattggaaaattccaaatcaaaacaaatcggaaaatgataaaaatctgaattttccatttcaatttccatttttggagtgttaaaaattaaccattcattcattcatttctgctgatcaacaagcaaattgtgaattgtttgttgtcccatcggcgagtggcaacaattgccccggggcaaacgcaaaaataaaaaactaaggacactttttgtgtttgaagggtcactttccgctgattgttctttcgttagcgtagtttttgtatgtagttttaagcctgtttcagacgagggacggtaagggatacagtgtttgatgggtggaaaaagatactgtaggtgagggagggggacggaatgcgaaaaatgcaattcagaagtgtgtaagtgttgccaaaaagtggcaaacattctccactgatcagatggagggggacagggaacaattctaatcattatactgatcggaaattagggggaatagtcctaatcactctactgatcggaaagtaggggggggggaggggattgctgaccagttgaccattttaccgatcagttgcatcagctggtcattttactgatcagtggttggggaagaaggctgctgatcatttcatgacactgatggtgccgggtcgttactcaaaaatcatcaaaataaaaaaactttgacagaaaattattcataacttcgccccaaatgaatcaaattttataatattgatattattcgatagacctaagtgttttct

SEQ ID NO: 2367 - DNA, 6312 bp, Heterodera glycines
aaaaatacaacaacaacgaactctaagggaaaggtcgccttgggatgaagtggattatcctgcctctccccacttccttttttgctacggattctcgactgatttgatttgcgtctcgcgcaattggcccattccttcgaattatcgagtttaaattctcggactcaaaattttgatatttttaaaaagattcaaataaggctataaatacttctgttagttggtaatttggtcaaaaattgccattattggccatttctgtcgcggttcgtccgccggtggcgaatttttgccgcaaattctgattgccataagcgatgtgttggttgaaggtgccaacactgaaatacattcagcataattaatcataaatatttttgttacccgtaagtgccggaggcaacgaaattgtgaccgtacccattgagtacggtagtgccggtgatggcacagtctggcggacgccaatcgtcgtcgtcggactcgcgccctaaaattccaaagctaacgccaaaatacggcacgaaaattgaataaatatttttaaagggaaaaataaattaaaatataaatttattagccaatttattaagcaaaaaaacacaaaaagacaaagcaaaagtaggcaaaatgtaagcaaatcacacaaattttgacatgaaaaatgttttaaagcaaaataaaaagaaagaaagaaaagggaacaaaagtacagtaagtgaccatacagtaagtgttgctagtaaatttacaataagcaaaatgcgtcatttatttaaaaatagcccaaaatatttgcgacacagcctgaaaaactggggaacaaaagcctttttttcatatgcaagtgatatgaaaatttcctttcagcttaataattataagccaattaattttaattgcaccaaatttttgaatggcaaagtgccaaattgtcacccaccacaagcggtgtaagtgaagttgacggggtgcgactgtttggggccacagattacggtaacagaaacgagtgcacttcggttcagctgatggtaggtgggcacagtacacacaatgtgacactgtagagaaagagggaatgacaactgaattttgtcataaaaaatgcaaaaaaaaaatattaatatttgcatttcagaatggcacatatttttgcgtgccaatgacacttttccaaaaaaatggcgcactttggcgaaattaagcactaaattgtatttaaacggatgaaatgcctgatgcacaagtcgttggtcgagctttgcttccgcactccatcccagcaatccgtctgaaaagcattaattaaatgcctaattagtaattacgtaattttgccgttaatttatttttcccctataattattcgttgaaaaattgttcacataaatttggaaattgtgcaaaatttagacatcacaataaaacccgtcgcgcaccgttgttgtactcgcgaaagagcacccgcaaatttttggggttgaaatttcggccaatgataaataattgttggcctccgctggacgaagcctcgagcagcgacattttcagcacgtccggacagccgagctgttgcactgcaattgtggggatcaaaagaatataaaatgccaatttattgcaaaaatttaaaaataaaacatcggaaatttttgtattttttagatgcctactgaacaccactcactttaaattctctaatcgactttcataaaaaccaaaaaatccactcaattcccccgactctcgtcggatttgccaattccattccaaatttcactccaattaaatggcaaaaataaataaataaatttgttggcatttctcccccccccctccgaccgcatcggatggcttccgtttgcgtccgcagcactcgcccctccggcagttgcgcctgtgccacaatgtgcacgtcgttttggcaccttcgttgctccgtccgcttttgctgctcctccctcatgggcattgtttcttcgtcgccgcctcctttcgctttttcttcgttcgtcgtccgtccctttgtgcgccgtctgtgccgaccgtttgcggcggtcgccgcgtttctcgagcagttcggcactgaattggaattggcgctgcttttgctcttgctgctgctgttgtttttgctgttggctgctgctccgtaggcgcatattttcataatgcccacacagtccaatctgacaaatgagtgggacacttctactggcagggattttccatttgttttttggatcgagaaaagacatctcgcaaaagtgatgctcaaatgaatattcgagactctcgagcatcaattacaaattagtccattccacggcccatttccaccggttgttatgaaaattactcatgcgattacaaaatcggaaaagattcctttttttaatttcaattatacatttaaaaatcaaataagaaacttggcgattcattggccgttttttggaaaagcaaccgggggaatattattacggtttttgctgtttcacttacacaacgaccattccgttctcaggtcttagcatgacttcctgcaaaatcaaaaattcattttggcatttgcccttttttcctctctctccccaccaatcgttctgtgccgtgctcagtgactacgcgacggcacggagttgtccaaaaaaaaaaaaatttaatttgtgcattttaatttggaataatttttatttgttctgttaccgtggcggacttgcccgacacgggcaccaatctgtacagattgtgctcaacaaaagtgtttccgtccgtccgttgggcggcaaaaagttcgacgtgagtgggccgaaaatggcccaacagctgaaaaaggcaggggaaagcatttgcagataaaaaacaacaacgagacgaaatccaatcatggcggagttttgaaagtcgggacttcccgacaattccctgaacgccgaagaagctgtcagggcaattaaaaacggaaagctgggattgataagatcaaaaaagggcgaatgtgcctcggtagctcaatggtagagctgctcacggatttggcggatgagtgagatcaatttccacccgtggcctcctaacattttgcccatttcttatttaaattgctatcaaaaagatatgccaatgtgtgaccgataacccggtaaaaaacgaagcgtaaaatcgagaaaaatgtttttccaaaaattttccactcccctctcgggacctgaatggtgcaaaaggaagtcccgcttcggtctttgatcgcgccgcgactgccctccgacgcgtaccgcgcacggtgttgttcctccggctaataagcgatgaaaatgaattttaaaaatttttaaatttccatcgcttttccaccccaatttctttctcacctgtctcaacaccaccaattggcattcgctcggcgactgttcgcaaatgtttccgctgttgttcattagcgacatttgtcgttgtgtttgttgtgccatcgcttcgccgcccatttccattgcaattgttccaaatgccatcggctgcgcttttcgaatttggcgccgggtctcctttagctgcggcgcgcctaggcattgtgtgtccacgagacgcccaattggcccggggcgtgccaatttcatcggaggcgaaagctgcgaaaactggggctcaaggtgttgttgttcagtgcacgaaaggccatttggtgcgattactgatcgaacatgtggcgatagtttgtcatatttaagttatttccattttaattacaaaaaataattattttataatttttataccgtaatccgtcgctgaatttttgccaatcattgactgcggcaccgccatcgtttcataactgtcattggcgggcgacagcacagtcaactcgtgctgctgttgctgaggttggttacggtaggaactaccgtaggaatgggagtcgcaatttccgtaataatcagcaaatactgtgccattgttgttgttgttgctagtgttgtggcacatcgaatgcatttctagcgttggctgttgtggcggtgcccacaaagtgtccatccatccggacgcgtactcatgctaccgtaatgtatcgtagtttaaaacggcaatttaattttgggaatataagtaacatataataatatttgagttaaaagcatgattaaattttgttaacacgtattaattctaatgaataaattgcccattaatttcacaaatattaattaattagcctcattaaacttgcacccaaatgggatttttttcttgttattacctgttgaaaactattgttattgttgtcgttgccattgttattgtacggattcagcttaaatgggctgctgatgacgctgcaatttgttgacgaggacgaagaagacataacatttaggcactaattgaacaaaaaattcaaaaagcaaaaaataaataaacaaaattaattaattaattaaaaatgaaaaacaaagagaggggagtgacaaaacaaagaaaggggattagataattagaagtaattagcaagcactaattaataaaacgcattaaataatgaatgacatggagcatcatcaacggacgaacgaatgaaaggacggcgattggcggtgataagtgataaaaaggggggggggctgtgatcggacggagagtcaaacaaagtcaatgggtgggtggagcgggcgatcagtgtttgtgacaacccaaccgaaattaatgatcgatcaggggagggcgacgaacaaaacaaacaaaacaaaattggggaaaaagaggaaaatttaaatttgaaattatgttgattttaatttaattttaatttagcactcgcaaaatcaattttaaacagtgaaagcatcatttaaaatatcatttttaaacataaacacaaaatttattggctttattgtctgttttaatgatggaattctttgacttttaaaaatttgcaaaaaatgagaaaagcattcattggttttacaattgaaataaaactaattagcgaaaattattagccaattaaaatgaatttaaaacacattttgctgtggaatttatcatcggggccaaattgctgataatgaaatgtaaaaaatgaaaaaaagcggagaaaccctatggacaaattgtggtatcatccgatgggacggcgggaagctatttttgaagcatttttccatccttaaccagtttttgtacaattaattaattacgaatattaaatttggcatttttaaaagagcaaaaataaataatgtgcaaaattatttgtattgattcatttatttcccgtcaatttatcactttttgtcggataattttcgcgtgaatgaatttgccattcgccggtcaaccaataactgttcagcctttgcgtaaatgaaggggaagaagtccttttgaacctctgaaatgggcaaatgagattcacttttacttttaattgggcaaattagagtgattaattaattatatggcaaaattatttgtttattttcggcaccagcaattgtcaattcgcttttgccttcctttgccgctcccttttcttcgtcactttgcggtgaatggcattttcgttccaaactgtcaagcagttggtcaatctaaaacgagtgactttttacaataagttttgtcatcgctaacgtcgagtttaattcgcattgttgccaaattatgattctcaaaatgcaatttttcttttaaatattctctgctcttctgctgctggtcactgaccatttcgacagccattcgatggcaactgaccacgtccaatttgcggtcgagctgtgccctgtgctccgctaatttctgctgaaattacccaagaactcagtttttttttttgaattttcgacttgtgccctggcaaatgcacaaaatgaatttgcaatagtgccctcctcgtcgctgatcacttctgccgttggcagctggttcgattgcggtgatccgtcagctttgactttgatcagtggcgattggggcaccaattcgcggcgcgaattgcagctgctaaccatcgaagtgacgccagaagcggactgaataaagaagcgagtgtaattagtgtacccccccccccctaattttcacctcatcccccgcgccgttcgcctcccctgtgttgcgctttttgctctccattttggacaaaaacagtggcggaagttgcggcgatgcaaaactgaacgcactgcgccttcgcaacaggcggccacagtcgccggtgtcgtcggcacgcgccgaaggcgacgacaaatgcacgggcgaagtcgcgcaaagtggcggcgaagacttcggcacaattag

SEQ ID NO: 2368 - DNA, 2215 bp, Heterodera glycines
gcataattagcagagcgatcaaggtccttttttaatcaattttgcttcataatgtaacatttatgccccaaaaatttcgtcccttgtgacctttttcaaaattttgaggtgtaggcccaaaaccgacaagtacctgaatttgttactatttgaaaaggcaaattaatacttcttctcttgagattagcggcaaaatcctcgttttatttttagccgacttttgacaccgctaaatgcctaaggcgggtgaaatggcggcgttcgctatttcgagaaggtgacacaaacaaatcccagcaacaggtgcaagaagcacacataaactttatgtggattaagccgttaagtgcccccaaagtgccggaatgacagtgataagagagaggattaatttgatattccaatcttacggtaatatactgtaataaattaaatattgtatctttatgtatcatatttgtgaaaaaatggtaagaattgctccgtcacgcatggaaatggagcagtaacagcagcatagccgggtgcgtgcgcggtcgttacccaaagcggaattcattgaccgcgcgtgccgcttcgcgcgccgcctcctcctgccgtcggcgtgcctcgcgcgcctccgtctcgcgtctgtgccgctcctcctccgcctgccgcttgcgctgctcctcacgcgcaaactccgcgttggccgcttcaatgttgacaatgccccgctccagcgcagccaacagtttgtgcagctgcgtgtagaagtcggccgcctgcccgctcttctgcacaatgtccgtgaacacttggtaggcggtgaccaacgtcagcgcgtgcagggcgcgcctgggcaaaaaagaattgaaaaatgaggcaaaaactgaattttaatgtgaatgcttatcgagtcttgggcacgattctggcagatttcttgtgttctcaagactcgtattgaatcttggggtcaaagcctcggcattggataattttttgatcagtttgagaggaattttgagttcactgactaggtagccaaagcgattagtggtgttgaaaatgccaaaaattgtcatggtttttcctcaagattgccaaggccatagcattccattttttctctctcttggatggcaattaaaaatgccgtttcccgccgaccctttggggcatctgttttccatggcaccgcgtccgtacttttcattggcatccaaaatttggcgccgaaagtctgcaaaatccgcgttcgcgtcagtcagcgcacgaaggatgttgtcctgcgcgcgcaggttctgctcgatgagctcgcgctgcgcgtcgtgcttgtgcatctcctgctcgaaaagcttgcgcgggtccaactcgcgctccgccagcgccttcgccgtgatgtcatccgcgtccaggtcggcgcggaacgtctccaccaacttgcagcgctgcttgcgcatctcgtccaccttgtcgatgatccgcttcagctgagcgccctcgggcgaatttcctgtgaaaaaacaacaaacgataaaaaacattggcctattaattagtgcggaaatgccaatgaatttgcctggattttgggcacagtctccgcatatctgtcgggtcagttcgggcaacggttggctgagcagcttcaaattctccgagtgcgcggcaatggcccgctggagttccgcgttgttttctctgcgggggggggaattaattaattaatgtcaattaaattttaattggatttccctccctcccccctccgtcgccttacattgcctttttgtggtgctcagtgagctcgtccaacttccgtccgatggccaaatagccctcgtcacgtgtgaagaatggatttgtgacggcgcggaggcgatgtcgcagggaagtcagccgagtgtccgtctgatgggacgtcgaagtaatgcctgggggggatttttttggattgtctaaaattctaagggttccgaaatgcttccacccccccccccccaattttgtgtattataaaattctaattcattcaaaatgcagacgttggaaattgtccagcaaatcggggaatgcgtccggctgagcgctgaacgcggcgctggcggtgagcaattcgtcggggaggcgaatttgttggtcgacgggttggtcaagcgccaattggtccaacttcagcgagaacaaatagttcctgcaaatgacaaacagttctcggatgttaaattct

SEQ ID NO: 2369 - DNA, 1198 bp, Heterodera glycines
cggctttctgtacccggcaataccctgacccggtattcgctaaaatacccaggcccgtacccctaatttaatatacgattttgaagttttttaaattaaaaataaggctacagaaaaaattgaaaaactctcgcctctcgtcctctcgcctctcgccaactctcgtgtttttggggactctcgcctctcgccaaactctcgctctcgtctttttggggactctcgcctctcgccaaactctcgctctcgtctttttggggactctcgcctctcgccaaactctcgctctcgtcttttctgagacaagtcacacccctgtcctgtacccaaaaagatttgcaactgtggtggtggtttttgtaagacagtaaaggaaaaaagggcgaaggttcaattcctttgcgcaacatgactaggtatttatttaaaatgaacaatttttgaaattttttcataataaaaaaagagttgacccatagtgtctgtctatttaatggttcatttctctttttttgactcattttttccgaggttgggaatgaacaccctgctctgtagacatgatgcaaatttctcccatgtcatatcccattttctcccacactccgtttcctttatgcatcacaattagtgaacgacaaaacgacttttttaacgagaaaacatcgttataaattctattttttaactatgtacatactacttatattattaagaaacgaccataaagtgctgtaattcaaaatttctttcctaattaaacgaattttttcaacaatgggcaaacggctctaccgataaattcagtaaatggccggagttggccaagccgtcactctatcaaatctttgtcagtctcaatttgaatacattcaaattcaaaggcaaacagacgatccatctcgaggtgacttttttctatttttaaaaaataagtatcttcttagattacgaaaccaaccaattatttgaaactccatttcgaatggttttggaggtggagaagggtttctctgaagttagaggatggcaccggtgcgtggttttttgttggctttcttaatttgcgaaatctaatttgaaattgacacagtctttccggacttaaagcgcgaaattgatgcaaaagggacactggctcaccgttcagctggctcaagagatcaaaccgcagaaagccgagttggaatttgtgtac

SEQ ID NO: 2370 - DNA, 5252 bp, Heterodera glycines
  unsure (1)..(5252): unsure at all n locations
atttaattaaaggggaagtcgaaaacaggcgccaaccttcgcatttacagtgtgccgggcaagaaagaacagggaaattacgcattggaactggtcaccaaatcaattgacttttactctgaatggttcgacttcaaaatgccgttgccaaagtgtgatgtcctcgctatgcctgactttgcaatgggtgaacagcagaaacgaattgcaaaataaaccgaattttaggtgctatggaaaattggggacttatcactgcccgcgagaactgctctctttatgacccaacaaaaagcccttcgacacacaaacagcttctgactttgttattgtcgcacgaagtctcacacttttggttcggaaatctcgtcacaatggtgtttttacatttttatttataaatagcaaaaacatttagaaatggtggtccgatctttggctcaaggagggttttgcttcattcacgcaatatttgttcaccgacaaaaactaccctgaatttaaaatttggtccgatttcgtcgacgcggaagtggtcagagcgatggctttggactctctgcgcagtacgcatccaatcgaggcaatttctgaatattgatatgatattgtaaacacaatattttttaggttcctattgataacccaaatgaacttgaagaaatttacgattcgatcacttacgcaaaatcaaattcaatcattcggatgctcttcaatcatttgggcgaagcgactttccaaaaggccattcgcgattacttgaaaaagcaccaatacgcaaatgcagagaccaacgacctgtggaagagtttgtccgacgcttctgggattgtgagtttaaacaataaattcaatgtcgaagcaaagaatttccgcacattaaatatatttgcaactttatttcaaagaaacaaaaacactaggaaaggaaaatggttttacattttggtttaggatgtcaaagcactgatgtcttcctggacccaacagatgggcttccctttggttactgtcgaggaaaaaattttggatggagaccgtattgaattgcacttaaaacaatctcgctttttggccgatggaggtcatgacgaagcgaaccccgtttggcaagtgccgttcggagtcaccaccgcggcggacctgactcatccaaaggccaaatttttactgatgaaagccgaagacaaattcatcgtggatggagtcaaatcaaatgaatgggtcaaggtgaataatcagatggaagagacaaagattacaaatacaaaccaatttttatgttgaaattactcattacaataattttaggtcaactccaacttctcttcgttttttcgcgtccaatactcaccgaacatgctgcagtctttgctggatggtgtgaaaaaccgcgaactcggagtgttggaccgttaccaactcgccagtgacctctacgccgtgagttgtggcctgttttggatttaacccatgagtatattttgtttggttccttgattcttcatttttagcttgtaaaatcttctcgcgtatccgtttcacactttctcgcgttgctcactgtttgccaggaggaggaggattactttgtgtggtctgcaattgactcgggcattggcagcatcgctcattcactgaaacatttggacgacgaacgcaagctgttggaccgtttcgagcgttttgtgtgcaaaatgattgaacccgtcgctgccaaattgggctgggaacccaaagagggagaaagtctgaattatttctttgaaactcattttgtttttttcataactttctttcctttttagctatacacgttggacgtcttcgtgccctgctcctcagccgtttgtcacattttcgccatcaaccgactattcaaatggcactttccaaattcaatgccctcatcgagaaaggcgtcgatgttgtcccggacttgcgaaagctcattttccgtgccgtaggctctacaaatgatgaaaaaatcattgctgcattgaaaaatttgatggagacatcgggctacgcacaagtggagttgtcatgtgtattaggtatgagatattaggcaaatgtgaggtggtcccttatgacaaaccttttaaggacttggccagtgttcggacttgaaaatgctcgaggacattttcaattatggtgttattcaaggcaaaatccgcgaccaggacctttatcttttgttcgcggcaacggaaatggcaccgatggcgtgctgtggacatttcgcatgggactttttcaaaaacaatttcgcacttttgatcgagaagtacggcagcgtcaacagcaacgtgttcttgcattgttttaactgcgtgacttcgggtttctgttcgaatgccatggccgaagacattatggtgggttaattcacaatcagtggcaaaagcggagattttagacccatttaaatttaggagttttttaaaaaagaattggacgaacattctctgaaaacattggagcggcctcttcgtcaagccgtcgaatccattaaagtcaaagagagtttgctgaagaataacgtgcccgatttggacaaatatttgcagaacgtgggatattaattatgtggccaggcaaacattaagaaatattnaatatgtnggcttggtaaatattacatttaccttttcgtgaggtgacattatatgcaattgttcttcctgttatataaattctgttaaccatttgttttatgtttgatttaaatttaatgacataaattttaaaaccgaaaacattgattgcattgggggggaagtcaatggtaatgatggcaaaagtgcagttttgtggttttgcgaaaaatataaacatttaaaaaccaaattttctatgagaaaagatgtacttcactaccctgagctcattgtcggatgaccattttttgatgttgcaatgatttttgactaatagctaaggtgcagaattgtggtctcaatgggaaaaaattgtaaaattttaaaaagcctttccgggttggataatgtcgtggtctataagtcggggctgaaccctactttcagcaattcccttattatttttcagatgaatgaatgaataagcaagtggttcctattctcttctttcacttttaattaaattttcctgttcgggcctttgcataacatttggggcatcagaatatcagaaaaggtcaaaatcattcattggaatttcatcttactaattgggtagttcgggtgggtaaaggatagaaggaagtggcaatagtagtctatagtaagaaaatatatgctgtatggagtggtgagggtcatagattttgcaaaatcattgattttatctatgatttttcatcaagtaattgattttttccaaaatttaaaaaaaattaaacgagcgtaaaaactcatgcacagatgttgtagagtattgcgtattattatccggttaacaattgacattgtatgtcattattaaataaatgtgcgcaaataaagcacgaacggtcattggctgtcataaaaaataatccgcagccaagcggatttgaaccccagacccgtttcatatgacccctaagggccagtaattaaatttcaaaaaatcatataaaactttaaatttgccttctccataaatttaatagttcattcgaaagctctttttaaacgctacaacatctgcgcatgagtttttacgctcgtttaattttttttaaattttggaaaaaatcaattacttgatgaaaaatcatagataaaatcaatgattttgcaaaatctgagctcagattcgtaatcagcacattttttcaccctagaaaaaactaaaaaaaaatttttaaattaatttttcgtcgggaccgcaattctgaaggattacccggaattccgtgccatccctggtctcatggtattatagttgtcctaataactaagagaaaaactattttttttttgtcaggtattcagtaaagtttttaactataaatttcgttgttaaacctaaggttatcatgacaactatacacaggcaactcgaacaatggcttattgttagactagacctaagcttaggcttttgtaaatttttttcttatattagttgaatttctgttgacatcattaagtgtgcttagagttgcttttgcacatttcgatgatcaaagtatacaaacaagaacaattagactattcggaaggtataatgtttccgattgacagttcgaaaaacattttttgacgcgtaaaatatgatgggacgcgtaaagtgttgttgggacgcgtaaaatgtgatgggacgcgtaaaatgtgatgggacgcgtaaaaccgactagaaccaaaaaatatgctgatcacgaatcttaactctgatttgaaaaatcattgattttatctatgacttttcatcaagctcttgattttttaaaaattttaattttctttttaagtattttctttccaatgagtttaaggtaaaaaataagaacccatgagtgctctatttacacaaaaaatcccattccgaaatcccagggacacatggtcatctccctttgttagcgcacccatacttttttttttgttaaaaggcataaaaaacaagtttccggggctttttggggtcgctgatcacgaatctgacatccatttcgaccatttcaaacccctaacccgaattcgaacaaaggtcgaaaattcaaaactttcacatttctcatttttagactctaaaattgataaactgctaataaaatacaacaatccataaattctacaaagttaaagacgtaatatatataaaataaagtaaagttcaacacaatcaaatacagcaaagtcccaaaatatgcaaattttttaaaattggcgtaataatcttgtgatagacaagcagatggtagtgtgtatgaatgttttctttgtgatgtgaagtttttgggctggtatcgttttggcgccgccgttttggcgccagccaaagttttcggactataacttttttatttgttaaccaaatccaataatcttggtatcattcgaaagcttaacatgattagaagatatttctaagctattgcttctggattagacaattaccaaaaaagctagaacatgaagtagtcaaacagtcgaaaattttgaggttttttcctaataacttttttagaagctaaaatttttgtttgttttttgtaaggctaatagagcttgtgaatggctttcgaatgataccaagattgttagatttagtca

SEQ ID NO: 2371 - DNA, 1445 bp, Heterodera glycines
  unsure (1)..(1445): unsure at all n locations
ggacaaattgaataaaagctatttgaggtcgactgnatcttgaagtaaatggcacgcgtttgacgatttgtgaccgtcaaagaaacggagccgatgcgtccgacgtnttcttcaacgaaagagttttttgaaaggattaaaaagaacaccttngaaaacaagcacgtttctcggggtcgactcgaacaatggcattggtgccgtcccattggaaatgccagaatttgctccattggaaatgctcgactaaatttataaacaattagaaacagacataagtaatcccattgcatttacagatgaatttctttgaagcacctgttgtacagattggcattggtgatgagcttgaatagccacgggttgatcattgttgttactgtcagactgaagaaggaaaatatgtcttaaaagtaaattaatcacaattacagtgaccccatcagtgtcaagattgtaacgagaagcaaatttaagcgccaattccgtgtttttatggtgtttcaatatgaacggaataattgctgacttatcaagaccgacactaatgacctgaatttggtaagtcattaaatataataaattcgtagtcatttttagatttaaaattgcctattatgattgtaaatgtttatatgcatttccgttttgaaatgggacggacctttcccgacccatcgatgcagagcacttcgtcagcctctttcagttctgtcgacaaaagcacggctttgtccgaaatgcgcgtgttgcaaacttttgtaccagtttcgatgtcgaacaaatgaacatacccaagtttggtgaacaaatacaaaagaccagatttggaaggctagaggaaaataatttaaatgggacaaataatttacataaatttccatttatcagatatattttagttctttacctgaattgcgacaggaaaatcgtccgtttcatcggtgtggaaatggaagttgtcagtcttcgactgatagggttgattacccttttgcgtttccgaaagttggactatgtgcaactgatttatgttcactcagcaatttaatatttgcgagttttaaatttgaaagtccaacttttccaacgccatttttgctgcgcaccgcgtaacagaaaaggctgatgggtttcgaattgttctccgctttgaattgggtaaagcacgcggtgtgcccttcaaacagttgcgattttttgctttcattgttgtacaattgtatcgagccaatgacctgttgctcctaaaacatttaatactaaaaatactaatataaaaacaattatttagtcaaccaaaagtacctttgccgaaattccaacaagaaaatggaatttgccttggaaatcagaacggtaattgacaattggctggttgctcaatgtgaaatgtctttcaaaagctttgaatgggtctttgtagccttaaataaacttgttta

SEQ ID NO: 2372 - DNA, 5003 bp, Heterodera glycines
  unsure (1)..(5003): unsure at all n locations
gggggacagggagagagagacggccctttggagagagagaggagggaacgcgggagacagagaaagagggagacagagacggggagaggaggggaaacgacgcaccaaggggggaacagaacacanccccaggcgaagccgccccccaanacacaacccacaccgaaggaaggcggcgcnccanccgcaggacacggcggacgcaagcaagagcgccgcagccccgcacggcccacggagcaaaaacacgaacacatacggcaagggccaaacacccaaagcaccgacaacacaccgaaggcgcagcacactgtaacaaatcattcactgcggcacaaacgcgcggacccgcgtccgttcccagcaaatcgacaagatgaaaactgctgagacacgggcggatcgaggcggactccgtgacattgagcagacacgtgccgaaacggcgctggtctctgctggtgatctgtgaagaaaaaagatggataagaaagaaaatgggagagggagagagagaaacagagagagagagagagagagagagagtgaagcgaagaaaaatcgattcattggcttaaaaagggagcagatcaagggtaatctgagtcattgatcagcaggacagaaagggagcccccaatgatcttgctgacctcacgctcgcagaccgtgtcgtacagagttagtgcggcccctgcggccggctcgggtcggcatttcagtgcctgaatgatgaatcagttgagtgaggcactctacggatcacctccatgcatggcttaaacatcttttggacactgtgacagaatccgtcccattccgattggttgctgatcagtgccaacggacgcggacggaaatgatcgacgtgcgactcgcactccaaataagcgaccaattcctgctcggcacagccggtggagtgttcgatggccaaagagggcatttccaattggcacccgttgccgggaatgatctgagagaattgcaggcagtgagaaaagcgtccaaaaaagcatggcacaccctgggccaaatattcgttgctggcactgaacataaattcaagcgaatcggtgccgcactcggaaaaaacggccggggcaaggcactgaagcgagtaatgttggtactttacaatgaattgtcatttattatttgcctgggtggtgtcgttggccatggcacaaagtgtgccggcgtcgtgctcccccagcgcgtccttttcgagcagttcgtcgacgaccgttccgttttttccactgcttttgttctgcgcttcgcattttcttcccgccacaccctccgtcaccgcctcaacgcaacgcgagagctgtgaaaattccgcgcgtgccgaacaaatggccgtgccgagggcgcggagtgcacgcgcgcggccgtacggttcgtccgcgtcgcagggcgccgtgcgacgcatacactgcgacaaagcagcgaaatcagcggcacagaaggcatccgatgaagggatggacgaagaagcattggacgaattggagatgaggcgcagcagcgaaacggggcggaaagtgtacttggccaaaaggaagtcgcgttgacagccgaggcgaatttgcctggagagggaaatcattggctaattaatggccaattaatggaagagggaaatcatcggctaattaatggaagagggaaatcatcggctaattatggccaattaatggaagagggaaatcatcggctaattatggccaattaatggaagagtgaaattaaatcatcggccaattatggccaattaatggcacttggaaatattgcaaaatggctatgtattcaatcattaaatttctccaagaaccgacttcatctccgctgtgcatgtcgttggcgcaaggagtgccggagatgccattttcccttcctttaaccaatgattttccattgccattctcttccgccctttttcctccgcccaccgattgttccgtcgcttttggcccattcactgggcaaatattgtcctttgaggccaacacgtgcaacacattcaacggaatgggtccgcacgtgcgctggacaatttcgtggacacaatcgacgaattggggcagtgcttggcgaagggaggccaagctgaactgcttgatgggcacgagagtggtgcgcaggcatttgccgaactcaggatcagacacctgaacagacagacagtgctttgctgcttcgtcttttctgctcacttgtttgaacacgcagcccaagtgcgtgtcgatggcttgcgttgcgtccggctgatcgcaaatgccggcgccggctgccacgagacaacttgagacaacgcaacgattggattcattgtcagcagcggaggaggacgacaacaaagacagacactgacggaactcggcaccaagcatacaccctgaggagaagggggaggaggaaatgatcaaaaagggagggattgagtgggagggaaggaaagggaagagggatggataccaacggacgggaagggaagaaaaagggaaaataaggaagacgggggacgcaccttgagcaaaaagaggtgccaatccgttcagattcttcagcacattttggagaccgccctcgaacagttcgcccaactgcgcgtgcagcgcttcgagcggcgcagcacagtgacggaccaactgcttctgctcatcggagcagttcaaagcggcaatagctgaacaattatttttggcattccgtctgccctttcgcttttacttacgtccctttcttccgctctccatccccacttcgatgttttgctcctctttatcgctctgtcctgcgttttctctcatttctaccttttctctcatttcccctttgtctctctgtccaccgttatctctctcttcttctcgtcgtccccccatcagtgcgcaatttgggtccaccgcttttgcaaataccgccacatattcgtgcacaaattgcactgctttctcgccacatcgttcactgagttctggcacggcacagctcaaaagagtgcgcgcggatggacacgcgtctttgggggcgccgtgggaaaaggcgacgacgcattcctaaaaagtgccgggggataaaagcaaatggaaattcgggggggggggggatatcagtggaaaatagcaaaagaatttctaagggaaaagacagtgaatggaaatgaaaatgaccttcatattcggtcgcgcgatgttgcgacggatgcattggcgtaccttaaaaacaaagtgaacaatggcaattcgcatcgtttggccattaattgccaaatttgccacatttgtcagcttttgatccggcaaaagtgttttttacttccgagtaaagcgcgctgccccgtgggccacaggcgaagtcgaacatggcggacattccgcgagcccacaggggaaagcattgggcacgaagacggcactcggagaagttgcgaaatgcttggcaagcttggtcgatcagcttcggctgtttaatgacggccaaagggtgctgagggggggggggggggaaatgccatgccaatccacggggaattggccaatcaatgcttacgggctgaaaggcggtcaacggctgcacgcactcgttgaacagttgctgctgttgctcgtcgcattggttgtccttcggcgtcagtgcgtccgccgttggcaaaggacgcgcttggggcgcggttggcccgcggagtgtcagaagaggcgccgcccccactggcggacggccggcggggaggacgcggcgggagagaagctcttccaaattggacggctcctcggcgggacagccctcctcacggcccagggattccaactgagaaacggcacaaaacgatggcacaaaagggggagggaggagaagcagaaaaggagagcccggcaaaatgtaaacgcatggagggaaaagggtgtggagtgggggacattgccaatgtaaaatcccggaagggcggtgcatccaaattcatttacgcctaattaactcaattagctatccccttcctcgcctataaaactcaccgtccattgcatttcagtcaaatgttcgtccattttttttgccgtttccgtctcttttgcgcatcgttcgcgcattgtctgctgtccgcaacggaatgcagaacgaagagaataaaacgctttgcacatgtgcgcttggccatgtacgccctgaagcattgcgctgaaattgggggaaatgacctcggcgcaatggaatattcccatcatttggcggcgatagtccgccaataattcatcaaaaaatattcacccgactgcgcggccgaccgcttccattggcgcgtgacagtgcgccaacggagagttgagacaggcggaggagcggtcgagcagaaggcgggagcgagacgagcacagcggcgagagtccaattctgttcgggaatgaggcgttagaaggcgacgcgcattaagcggggagtacctggcgagtgcgttgagcggagagttcagcgagcagcgagcgccccgcggccctttcccggcgctgaacactctctcagccaaacactgctcgtaacgggagaacacttcgcaaacggatgcctaagtgattagcaattgcaaaaaacattcattcgaaggcatttaccagcgttgcgttgtccgcgattagcaactgcaacgacccgagtctctggaggcgtccgttcagttcggccaactccaccagacagaccagcgacgactcctcctgaaagcggcacatttgacaccaatttgacattttgtcggcacctgttccgaggagcacttcggatgcacggggttaagcggaaattcgtcgtgcgtttcctccgtcaggacattcgctggcgccgcttcctgcgactgtcgctgggcgaagcattgccgcgcgatggcctcgtcgttcagctgttcctgcaataccaatggtcagtccctccccgcctcttctgctgctctcgccctttttcacctgaatgcccaccaccgcttcttccacttccgc

SEQ ID NO: 2373 - DNA, 1632 bp, Heterodera glycines
  unsure (1)..(1632): unsure at all n locations
tttttgttttaaaagtcgcgaaaaatgttttctggggctttttgggtcgctgattatgttccttgaactccccagggggctgaaccccaaaaaattaattgttaagctacttttcgagttattagagcctatcttctaggttttttatttttggagcctaaaaaacttaaaattttgaaaaaaatatttttgactatttttggcgtttgncccanaattattaacaaaaatgcaataaaaatgaaaaataaattttgtcattttacactccgaaatttagattttttagagcctattttccatttttagtgcccatttttggggttttttagcgcctaagcctagcggttttagagcctaaaattggatccctaattatggccattttggccaattcggaatcatcggacccgaactcgaacaagaagtataaattaaattttcgaatttcgccttttgttctaaaaaataactttaaacttggctgggctgtacatactaatttaatttttaaaaatttattaaggtatataatatttatgtaaatgccgatctgaaattgaggctataacactaaaatggattcatacgaagttgagagaacaacgacatcaccagtcgagctaagacatcattttcacattccttctgcattgactgcaaacggcggcgataaatctgaggttaataatcagagcattagaaatttattcggaagttttcaaggctgttcgtttttcactaacacagaaaaaacacaaaagtcggctgaatgagcacacgaatttgacatcattcattccatcgcccggcacttatgtcaatgctgcgtttgaactcgacttggcagaaattccgcatcaaaccaataattcaagagagaactcgtggcaagaagatgacggactcgtttacgcaaatttgtcagaaattacacgacggaaggtctcggcgaaacgattgtaaaatttaattgttatttctctttccaggaaatcgaggagatcgatcgtcagccctttccaccttatcccgatgcatctgcacagcctatgtgagttttggaaaagcaaaattaaaaaaccaatgaaaatttagacggataagtaccaatggttggcgcgaatacagaacattgggaggaaggtgaatttttgaaggatgaatttaaaaaagaccttccttcaggacatattactttcatccggaacaaggcatttgccagtggaaagtttgttcctctctttcgcttttcattgtttatttgttgggtttagccaccaagaagtacggacaattacaaacttggcagaagcagtgcaactaacaaccaacaccacgattgtgtgccttccacttccactgacattgcatcgaccgcattcttcgcggaaattccattgcaccaggaaatgagaaaatccgacaatgaagccacactgaacgaggtcgaaattgaggcgaatgaacagcacaaaaaggcaaataaggttgtcctttanattanagcgttaattgtaagtaanataatactatttatctgttaacaaccctctccatanatatgtaaatgaactgtttctgaaattcagagcataatgtcgcacagtcttgacagcgggatcaaccata

SEQ ID NO: 2374 - DNA, 3470 bp, Heterodera glycines
acagtgccactaacaacaccatttccctggtgcatgagcagcaccaacaaacggcagcaccacagccaccattggacagcgacggagcacattacgacaccccagcgaacatcgcagccgcgcaacagcacagggagacggcgattcgccacggccttttggagaagtgcaaattggcggagaacggagtgcgagtgaaacggagggattgggcaaattcttacgcttatttgttcgttggccatcttctcttttacaaagaccaaaaatcggcagaggtactgaattttcgctgttgatttgtttgaacatccattttttattgatttattttcagaggaccggcaaacactacccacctccaacaggtagttttgatggtgattccactttatttttagttcaaatttttagatgtatgcgatctccgaaatgcctcagtttgctacacggacaacgaaaagcaaaaggacaagcggagaaaacatgtcatttcggtgtgtcataataccattctttttatcctttcatatccctcataatccgtcttatttttccacttaagctcatccttctcactaagactgagtaccttttttgctgtgccggggaggaaattggcgcgtggtttcaggcgattcgtcaggcgatcacttcgacggtccgtcccttgccactgtcttgtccattgtttttcgttgctttagcccatccacaaatttccgcccagtacagtaatcagcgattactgtgggagtctgtcacgtgcttcgctgcgcaacaaacgcgactcgggtccattcgcttccaaaaccaattttcacaactctatcaaatttcgactcaaatcatcttcgacaagcaaaggtatttaaactttttttgtttttttcaagaaacagaattcgcatttgatagctctgtccgaagaccgttcttccgtcattgagggcagtaccgtggagagcaatccgccgacgaaggagtccataattgagaagcttctccgcttcttccgctctcgtccttccatggaatccctgcgagagcgtggaatttacaaacgtaaagtttattattgcgttttttaatttctgccattttctttttgtttagcggagcccgtctttggcagcactctcgcggatatttgcacacgggagaaagcatttgttcccaaattcatctgcgaagtgactcggcttattgaacagaaagggcttgagtccgatgggctttaccgcgtcaacggaaatttgtcggccgtccaaagaatccgatgccaaattgaccaaggtggtgattacaattagtcgtgattttgacttttaatagattcctatgactctttgtatcacgaagaggacattcacgtgctcaccggggctcttaaattatttcttcgtgagctgtccgaaccaacttttcccgtttcaatgcacaaagattttatgtccgccatgagtgagcatttctaataaaaatgcaatattagggccgtgtctttaactaaacaggggaaacgggcattaaaaggctgcgtataatcgacgatttgctcatccgtttgccgcatatcaatcgcgaaactctcagagtgctcatccaacacttgaacaagtttgtttcctttttaaaaactttcattacccatttgttttaagcgttgcgactcattcgggcaaaaatcggatgcaaattcacaatttggccataatttttggaccatccttgttttgttccgaggaaaggccgaaccatcaacgcaaggccagccaagacaaagggaagagcgggcgacgcaaatcatccgacaaacggtcacagaacgaagaccaagtgcagacagagccaacacagaacttggcctaccgaatgattgtctatggacagattgttgaattcattcttaacgagacggacaggtaattcaaatggaaatggtgccgaaaatccgaaatttgtttcgaactttcgccttttagacttgctatcttcaggccctctctgtagctgccgtctccaacttcggcttggcatttgcttatcacaggcattcaatcaatgtgattacagtaaatagttgctttttgcacactttcgttctttcatcgttcgcattcattttcctattcgttcattcatttgtcatcgtttttactgaacccatttccggctcaacaaattactgatccgtttttctcattaattatgtgagttcatccattttcctgcttcactataattatctctaccgctttccacggccaaactccaaatgttttgcatctctttgtgtgtagtatttcatgtgtattttttctattgttaatgaagattttttaaataatattagtaaaaacagacggggaatttcatttacggtttaattgaatatcaacatgtcctattccattttatattatttaatgatggggaataattgctttttgagaatgttcctccgatggatgaatttctgactttcggccggtcaattgctgacccatggaggagagtgggctgcctggcggagcccgtccttttggtcgtcgaattctgtcaagttcaagggcccaggtgtgttgacaagggtatttcgttttcatgtgaaaaaatgcttttcctacatttatgtcccaacaggccgctttactggttccccgatgatgggactgtccctatgcatttgcttgaagaaattgccggttggttaaacccattttactgccttaaaccgtactccagtttggcttatgagttcggagaacgtgcatgcgaatttgtgctgcatgttcaaccagcaactcgccgtccatctgcttgttcagtacagcacaatgttggacatcaccgccagggcttttcaggtcgacccttttaaggccttggcccttcgcacggattgcatttcattttattttagcgtcctttcgccattgcttttctgatgccttctcaacccactgcaaaaaatgtcgaagcgttccaacaagcggcggctgaactgcttatgccaatcatcgcctgcaacaaacgttacgtccattcgattttgcgtcaagcgatgctaatgctttcggaacgggaccagcagaatgtgcagtcatactattccacttcagggaacgcacagcaaattgtgatcgtgtcgaacaaactcaagtccgtggttcaaaaggtaatcaaccgacaattcattcgcaaaaatcttggttcaatatttcatttgcagacaaatgcgtggtttgagcgtgtttcagaccaattgtgtgaaagtgacgggtcggcggatgaatgcttttgcgaatgcgctggccccgaagagtttcgccggttcgttgttttgcttgcgcagaaacactcgtcctgtgcgcttctgaatctcatggaattggcgccttgcgtgggttggcctgggaaaagccttgtttcatggatgagtggtttatattcctttattcactctc

SEQ ID NO: 2375 - DNA, 1703 bp, Heterodera glycines
  unsure (1)..(1703): unsure at all n locations
cccattttaactttttaatgtctgttgtttttaaggagcacttttggggcaaattctgaacttccaaggcatgcaaatgaggagctcaacagaacagaggaagaatatattcctattgtcgtggccagagaaagcactcttaaaacactttcatatcgtctattacgggtacaatttatttttccagagtgattctgaggaaattgaaccctgaaatcttaaaaatacgcagaaaaaaacccttattaatattaagtgtgtctatcctttgctgactggtgaacgaatagtaattttggcgtcaaaacagcgcgtttcaaccggggttgaccttctcaacaagttgaactcaatgcgaatttgtcgaaggccagagggcgtaaaatggaatttcgattctgacatcgagtacttccttcgactgcttctcccttttaattttacttttttagcactgaatcaaataccatgtccgacaacaacacacattgtcaattgtttggtatttctcgtgaggcgaacgcgacttcgcagtggattaatggcgagaagtgcgaacattgtactgtcgttgacttgggcaaccaaaaaatgcgggcccatgaatactcgggccgtttgcttgcccaattgcatggcaagcgcaacttcccatcagactctgctgttgcggccttcgttgtatccgttatcactgatttaaatcagctgttggtgctggcgcattacgtcaccccggaggctgtcttcaaacacctaagcctgtccatctccgatcagctgattctcttaaatggtctggccgaattcaacgtcaccaaatattccgtaagaatttcttaaaaggaactatctatcaatattatataatttagcaaatgaataagaagaaattcgatagacaaaagtgcataccatataaaaagatgaaattttgatcaaattgtttattgtataaatttatattatctaataaataaataatttttaatagaaaaacaaaattttagagttatcttttttcaaaagaacataggataacatttatgtcgacatttgtttttttatgaaatttatacgtcggctccaaattccatttgagctcagcaacacattccattccgttcacagtgtcccagtttttggccattttagtgaggaaatttcgagttgtgcttttatgcaaggagaataattttcctcctggcctaagcatacgtaacccggcgagtacaaaagcgacatcggtgcctgaaaagccgtaaattcacaaaggtgaaataatcttacaaaattcacaccctgattgttttttgtaccgaatggtgggtttgtcaggacaacatcaaattttccaatgaatggtacaaattttgtaacatcagccaaaacgagatttgtagttgtcgatccttcgaattcaaatttatcgatattattttttgcaactgacagagcattctgacaacaatcgacgccaacagcaaacctttaaaataaatttccttagttaaaaaaattttacgaaaatccactttgctccgagtaaagtacttccgagaagaagcattcccgtgccacagcccaagtcagccacggcacattcatccaagctgattaagtcattaacgtgttgaagcagcgcaactacagataaaatatacgcaatataaccgnaaaaattttgtaaaaaaagattaaaa

SEQ ID NO: 2376 - DNA, 2817 bp, Heterodera glycines
aaataaaagaaaataattacactgctcgtactcctgcccaattcatctgcatattcttttccaccggacaatttccagacattgatattgacccattagctaatagtcagcacgagcgcatgtcatttatagtggcgaagcgatgattagcacaatccgattccgttgggttccttttttaattcaaatatacttaaccgacagaaagaacaaaaaatacttaaaagtagagccaagcttatccggatgaaaggccaagcagaaccgataaaaggcgctcttcatctccagttgagtttggtcaggaacgaccgttgttcaactgttaacgttgttgaaagagcaatgaggccaggctgggcggcgtttgcgtaaggctcacgtgtgaccaccttgcaggggcacttttgtggtcatacggagcagctgcgtgtcagcattggtctggtgtggccccttcctgcggcagttcatgtagtacaggaatacctaacacacgataaaagttctcatcttcgtccatttcttgagcatctgacccttcattttgctctataatttgctcttaaagtgcatcaagtgcagaagttaattcccaagtggcacggtttaatgcatcaagcacctcattgtttgccgccattaatcctgcggatttttgggcctgtaacatagttacaacttggagaagagttctaatgtttgcagccatattttccatttaaataaataatttgctaaaacattaacttagaagtgctctatctaccataaaatgcattccgaaatatcacggacacttggccagtcaatttttgaaaaattcataaaatatttgaatgatgatatacactcaaatttttaaaaaaagatttatgaaacaattctttataaaaaagcttcataaaaaaaattaaaataattgaaaaaatgctagatggaataaaaattttaataatccataaaaatcatcatttttcaaacggatccaaacccataacaaaatgattagtaaagtttaatttgaagaaagtctatgcattccatcagcttccacaagaaccaaagatgacccagctcatgcagggtggtgcgggcttggtaagtcgccccgttcgtttgcctctttccatgctttcgacaagcctctcgtacttgcgtcttcggcttgcggcccgacatttgcggttatgtccaaaatagggttcaaaattaagttttttcaatccctgatcgcctaatcagctttaaataagtgattgtatcagatcatttgatcgttaatgaatttttgaaaaaaattttttaaacaacagaatgaatgttcttgataaactagaagacagttttttcttaattttagtgctgtttaagctatcagggcttccgcaaatgtcggggctcctttccaccacaccccaaccgaaaatttttcaaaaaaaaatcataccctaagcaactgtttgcggtgttttttcagtgttttttggcctttttcagtgccgtgttgatgtagccttgttggagcagcgcgtaattttccggcgtgcggcgcattcgtgcccatctggggctcgtttcggtcagctgaataaaaaaatttttttttgcgttcaaaatttttttgtttaaagggagggatccggctgtagcacgagagacgaggtgctcctgcccaccccgccccctctctcctcgttcgtcgtagggggccggtttaaaagaggggagagtcaccggtgaagaggggggggggaagtacacaaaagcagcgacaacactcttttcaccgctcactctcatcgtctctcttcctctcattttcaaacaatctttttctttctctccctctttatctcatcttctctctatttgatgttctctttcgttcccctcccttctgccctggcatagcttaagccgtgagggcacggctttcccaggtgtgggggaatgttatgtcttcccttttgtcttgacttcttttcccctatgtctctcacaatttctttttctctgtcgccagtcatcccaatttctgtttgttggcctttttctgtcttggcacccgacccgcccacctgttacccgtataaaatttgaggggagagatcggagtgatcagtctgttgggatttgcgatcggggatctgatcaattgttgccttcttaactttttcctcacattttcattcaacgcaaaataaaccaattgttaattgataacagccttcaattggggaatccgcgctttgggccaatgcccctggcattggcccagggcccaacggattcatgcgcgcacccattttacctctcttttcgaaaagaaaagctattagcaagcgtgtttggaccaattctaaaacaaatcggggtaattaatttaatctgagataaatgggaatttaagcgaaggattcatgcaaaataataatctatagaaattctctaaaaagtagttcctcgcagattcggggaccgtttctataaagctagagacatatgcgctaaccataaaaaagatgaatcattttttgaaaaattatatagttcgactaaatttgcaaatcgatttatggtgtacaggatgtttgtcgaaaaataactcgtcaggcctttaagatagacctgccattgctattcatgcaaatatgcagtctagtcagcccaatcgattgctattcgaatggtttggggtcgttggcccaaacaaaagttgtgctacttcttgcaaagaagacttagccaactgtaaacagcaagccatccaaatgcttcaatgtaaaaaaaaattacatttggatgcaaccttta

SEQ ID NO: 2377 - DNA, 5748 bp, Heterodera glycines
acatttgcgcctcaatccaaaatagggttcaaaattaagttttttcaatccctgatcgcctaatcagctttaaataagcgattgaaagtgattgtatcagatcatttgatcgtaatgaatttttgaaaaaataataaaaattttcaaacaacaattaatgttcttcataaactagaagacagttttttcttaattttagtgctgtttaagctatcagggcttgaaaaaatgcaactttgaatccaattttggacataaccgaaaaagtcgggcaccaaatggcggggctcctttccaccacaccccagccgaaaatttttcaaaaaaaaatcataccttcagcaactgtttgcggtgtttttttagtttttttcagtgccttgccgatgtagccttttcggagcagctcgtaattttccggcgttcggcgcattcgtgcccatctggggctcgtatcggctagctgaataaaaatttttgttttttgcgttcaaaatttttttgtttaaaaggagggatccggctgtagcacgagagacgaggtgctcctgcccacccccgccccctccctcctcgttcgtcgtagggggccggtttaaaagaggggggagtcgccggtgaagaggggggggggaagtagcaaaatttaacagattcaccaaaaaatggtgattttttcaatttcgaaaaaaatgcatgcatttttaaggaaaatttcagcaaaaaattctaattcagtgataaaccttcgcggccaatcgcttccagtcatccctgtccgtgccatcggccacgcatttcgaaaagaaaaccaattccaccgtcttgccaccgatgcacatgaggatttggctttgagttgtctgcgtgtgtagctgggcgcttcggtgtactgcaccgatccttcatttccatcagcgtcttttacaatggtaatctgtttaattataataattaatcctcaaaaaataaatccactttttttgaaatcccaactttataaatgtgtctatgcattccatcagcttccacaagaaccatggtctgcgaagagcagcagcgatccggaacgcggctccggaggacagcaggctgcggtaagtgtcctttgctcatgcagcgcctcgtcgaccgacctgcaccacaggaacggcagcggatgatggcagacgcaatggccctgctccagctgcagccaacaacatcggctcagcagcagccagaaacaccggctgcgtggcagcaaccccagctccgtgtcaacaccacatggagctggtcgatggagctgccgccagaaacgcagccgccagcctcgccactccacttggacatggagccgctcgcgcacagcacgccactgcgcaactgccaaagcggacacaccccactgctcaatcatgccagcaaattgcatcatggcatcctgctaaaaattctagaattttattacgaattcaattaaatttcaaaatttggaaaaaatcgtcacgggttttaaattcaaaaaaaatagctaccaaaaaagtaacaaaattcttcaatattaccaaaatataaaatcattttatttttttaatttttttagcatcaatatatcccgacaattttcgataaaatttgcactttaagtcaaaagactgactaaaaattctgttctcctctcctccacacccctccaatcgttttaccacctccaattgtttattctgcccaacagtcaacatttccccgtcccaccatttttcataaaaagaaattggtgtctcgattgacaaacaaacaaaacacattataatgttgtgtatggaaaatatggctgcaaacactagaactcttctccaagttgtaactatgttacaggcccaaaaatccgcaggattaatggcggcaaacaatgaggtgcttgatgcattaaaccatgccacttgggaattacgttctgcacttgatgcacttaaagagcaaattatagcgcaaaataaagggtcagatgctcaagaaatggacgaagatgagaacctgccacaaataaattatgaaaaccaaccacaccctctcgatgaattatcccacggtcatttgccgaccctcttttgtgagaaacaaacattttattctaaaacaaaatttatttacgtaaatgaaatatgtggaaaagtatgcatataaacattttgatcataaatttcagtaataataaataaaaatacaataaattaagtttaaaatcaaaacatagccaccactgatcgcatgtaagagcacaaattgcagtcaaagatgccctattccgacatggtcaatctgttttaaaaggacaaataacatgcgtcagatttttaaaccgagtacgttttcatcatcaaacggacttgtcgtcagaatattataaattttaaagaattttatggcaattgacatagacaccaaaaggacaaattaatttcatgtatagtggtattggatcccataaattgacccaacttacaacaaaattaagcctttaattattaaattcttatcccatgcacgagtttacacggggaataattcaaacacttagcccgtgtgtttggaagatactggtatctaagtgtgacataattgttaaaaccagtgccatacgggcattgaaaataaagaattttaattattcttaattggaatttcacccatatttttatatatactaacaaaaatgtatcttacagacgaaagctttatgttgttaaaaatgtcctatcgaaatccgctgtataaaaactttcgacagccataactatcaaacaaacattacataaaatagttgtattaaataccgattaatggcccctgccaattcattcaaatgcgcttcagatttatcaaaaaattcaactgaccaaccgtcattggcatccatatctgagtagtgaaaataatattatgcaaaaaattacacaacatattgttaaatataaaggcgcttacataaaacatattccttccaaagatttctattgaaatcatcaagcggaaattccgctggtgcttctaattgatccattgaattaaagcatttatacattttactgattagcattaggcgttcggtggccaaacgttgttcagattgttcccttttttaaacattaaataatcacaatgcgcgataaaaagatagcgttccaaagtattcatgaagaccagaaaaccattgttccagttggaatgaaatcagacccttggccacggcccctgccccaaaaacactttcaaattctgctttatccatgtgacgaacaggcattatttcaaccgaaatttttatataactaaaattaaatagaaaaacttttttaattataaaaaactacaattatttaataggtgaaaaatgcaaaacaatataaaagacggaaaagcgagcaaagaactatcaaaatcaatacctcttcattctatcagagtatagttatcggtttatattttaacaaattttcaaattaaatgcttctcaagcaattataaaatgcaacaaaataagattcccatcaacgttaaaaaatccatagaacacacagagaataacaatgttaagaaccacaaaattgaaattgtttccatcaccaaacaccatgcccctgccaccgagcgtatagctaaaacaaggctcttctgccatgacataaagctctcaagagctacatggctaatctgttttaaaataaaaaaatcaataacaaaaataacaacggcatattcaaaaatactctttcgtggccgcttccaatgcttccagatgcgctttacgttcattagcaaaatcaatagaccatccatcgtaggcatccatatctgaattatattgaaaacatgcaaccccagacagcaaataaataaaagaaaataattacactgctcgtactcctgccaattcatctgcatattcttttccaccggacaatttccagacattgatattgacccattagctaatagccagcacgagcgcatgtcatttatagtggcgaagcgatggttagcacaatccgattccgttgggttccttttttaattcaaatatacttaaccgacagaaagaacaaaaaatacttaaaagtagagccaagcttatccggatgaaaggccaagcagaaccgataaaaggcgctcttcatctccagttgagtttggtcaggaacgaccgttgttcaactgttaacgttgttgaaagggcaatgaggccaggctgggcggcgtttgcgtaaggctcacgtgtgaccaccttgcaggggcacttttgtggtcatacggagcagctgcgtgtcagcattggtctggtgtggccccttcctgcggcagttcatgtagtacaggaataactaacacacgataaaagttctcatcttcgtccatttcttgagcatctgacccttcattttgcgctataatttgctcttaaagtgcatcaagtgcagaacgtaattcccaattggcacgatttaatgcatcaagcacctcattgtttgccgccattaatcctgcggatttttgggcctgtaacatagttacaacttggagaagagttctaatgtttgcagccatattttccatttaaataaataatttgctaaaacattaacttagaagtgctctatctaccataaaatgcattccgaaatatcacggacacttggccagtcaatttttgaaaaattcataaaatatttgaatgatgatagacactcaaattttttaaaaaagatttatgaaacaattctttataaaaaagcttcataaaaaaaattaaaataattgaaaaaatgctagatggaataaaaattttaataatccataaaaatcatcatttgtcaaacggatccaaacccataacaaaatgattagtaaagtttaatttgaagaatgtctatgcattccatcagcttccacaagaaccaaagatgacccagctcatgcagggtggtgcgggcttggtaagtcgccccgttcgtttgcctctttccatgctttcgacaagcctctcgtacttacgtcttcggcttgcggcccgacatttgcggttatgtccaaaatagggttcaaaattaagttttttcaatccctgatcgcctaatcagctttaaataagtgactgtatcagatcatttgatcgttaatgaatttttgaaaaaaaattttcaaacaacagaatgaatgttcttgataaactagaagacagttttttcttaattttagtgctgtttaagctatcagggcttccgcaaatgtcggggctcctttccaccacaccccaaccgaaaatttttcaaaaaaaaatcataccctaagcaactgtgcggtgttttttcagtgttttttggcctttttcagtgccgtgttgatgtagccttgttggagcagcgcgtaattttccggcgtgcggcgcattcgtgcccatctggggctcgtttcggtcagctgaataaaaaaattttttttttgcgttcaaaatttttttgtttaaagggagggatccggctgtagcacgagagacgaggtgctcctgcccacccccgccccctctctcctcgttcgtcgtaaggggccggtttaaaagaggggagagtcaccggtgaagaggggggggggaagtacccaaaagcagcgaaaaaattcttttcaccggtcactctcctcggtctctcttcctctcattttaaaaaaatctttttctttctctccctctttaacctatcttctctc

SEQ ID NO: 2378 - DNA, 9958 bp, Heterodera glycines
  unsure (1)..(9958): unsure at all n locations
gagtgaggcaacaaaggctcatcgacgcccattcgtgaggttattttagcaattttttcgtcgatgaaatcagcgagtctttagatgaaatgggcaaatttctcctcggacatttcattttcgtaaaccaaaaaacaaatggtcgccgatctcacgcgataagcgacctgaacgaaaaagaatttactatagaaaataaaatggtcaaaaacgaataaatatgaacccctatactacttacaagttcataagccgtaagtgacgggttttcagcatcagaatcacacagaaatactttcggaaagaaatgttcgctgagttcgccgtggtaatccatgagcattgacccatcgacaaagaagccataacgagcggattttatgctagccctggctaccaaattttagagggatttaccaattttagaagagaatttatgaaattataaattaatcaatttatttaccttctaaaggcgattgagggggatggagaaacttcgttttggactgccgaagggattaaagtatggatgacaaaacgacanaagagttggcttaaatgattaaacaagaataaaaaaaagaattaaaaacaaaccaaattcttnttttgcaaccgaaaatntgaacaagtctgaaaatccaaagtaaaaacaaatgaagaaaaagaaacccacctttcttgataaaagaacaagccttttttgatgcagtgaaattcattgatacaatttgcgacctgaacggattcaaactaaaaacaaaggttttcagacacaccaaacagtcgatttccagaaagttgacattgccaatggaaaggaaatccactccattgaagagatcgacaaggggaatcttaaacattcaaacgatgcattgtttaattagtttttcagtctgagatttattctcttttgaagtgaataattaattagtgaacttgccttattaactcgatacaaatgcaaaaaaggagtaaaaaatctgtccaatatttctttaaattcattcgattctgcacggaaacgatatgaaaaatatccataatgaagtttataggcattgtaagcattgaaaagcagggaattaatggtgggcaaatgcaaaaagtaatctttcgccgtacaattctttctaatggtgaaatcttattagtaattgaaaattaagtaaattacttgttgaacgaagcaccgataagaaactctccaccctccacaaccaaaacaacttctttggtatttgtggaagttaccttaagagttgggagcgcttttcacctcctccacactttttaaaaaggtaacatttataattattttgatcacatacgtatcgataatcaaaatcgtgttgagccgaaatgttgctttcgcagtctgtgtctccgacagaaattaaaacaaaaaataataacaaaaaaaatatataaaataacaaaatcaaaacaaaattctttttacacattttttggtcggggattagcccaattgtcccacttttcacataaataaatatttgttgctaatttagcccttgcccggccattttgtcgccgctttggtcctcgttcgtttccgttgcctttggccagcattccactgactcaggcccctttttcccttttctgccccccccttttttccctgtgtttaccacagtttgattaagagtctggtgctcttccgactgagacttttttcgggctaaacttgtaaaacaaacgggactaagtactgtaaagggacaaaaccgtcaatttactccttttttactcaaattttttcgctttatctttctttctctcaactatgtcggccataatccggcagcaactccgcgctcttttggccgccatttccgctgactcattacagggggccgattccgatttgttgcctaatgatcccacttccctggagcctatcagcctcgctgctgagaaactctcgcggaaattaagcaaggcccaagcccttctaaaggattggtctataatcctttcctctacgagtaaagaagtcagagagcaggaaaatactctatttgactccttttcggtgggagggcttactccgggtgaaatcctcgccgacggggatgaagtgctgataaagttggaagtaaaaatagatgggatccgggccatgacttcaagggccccaccctcccaatctccggcccctcccacccaaattcggccccaaattaatttgccatcactccaattaccggacctttgatggaaatgagactaattggccttctttttgggcggctttcgcccacaccattcacgataatatgtcgcttaccggctctcaaaagctcacttatctggtcggtcgtctccggggtagcgcccggaccttagtcgacgggttcgacctaactgatcataactacccgatcgttgttgacctcttaaagagtcggttcggggatgatgccaagcgagcggatcgacttcgcagtgagcttttccacctagcaaaacccacggcccattcctcatccctaagggctttttccgaaaatgtggacagaatttgccgtcaattggaaagtttgggcaccaatttagatgacaatccctttctaacggtagcaattaaagagaaattgcctacagaggttaaggcccaattgtttgacaaagaaatggaagctggggggaattggtcctcaaaacagtggagggaaaggttggcaaaggttgtaaggctgaaagaagccgtacatgccccctgggaaacttcccaaagcccggcccacccccaatttcccaagcctccgccgcgcacaactgaacccattcggcgcgcttttcccgtggttgccgaaacccgaaaaagaaatggcaaacccgactgctcactgtgtttaaaagatgggcacaggccatcaaattgtctgacttatcgcacagttgagcaacggaaggcgcgactaatcgcccaagggcgatgttgtttgtgcgctcgcgaaggccatcacacggacgcctgctcagtggcggccaattgcttccggtgcggggaacggcatcatgttttggtctgcccagggccagagagaacaccggcaaggggcagtaattcagtgccattgggcccccgttcccaaaatgaagcacagggcactcggagaagggacactttccctcaatttgcctctccaatcgccgcctcacaaagtgaccaggcggggtcccaacaaatctcatcggcagtcgccaaaaagggcaaatttcctccggcctctgagttaaaccccgaggggcggaaccgaccgacagcatatttaatgataaaggaaattccggttttcaacaataacgggccaaccccggtttcggccccaatcttttttgaccccgggtcccagcctggtttcattgctacagacctcgtttctcaggtcggccctagctgtgtgggaaacgaaaatatggccgtccagggttttattgggaattcaccaacagaaatggtcagattcgcttctccccggttttccgtgcgtcttaaaagaaaggacggcggatgggaaacagttgaactcaaccaaaccgataaaattgtcccacccgtggaattcctgagggaaatggaatggaatccgccggaggcgccaaaaatgggggtgtttacgaaggagcctaaaattctgttgggtgtaagggaattttggaaattctttttggggaaaagggagattctcccgggtttgttccgaatcgaaacggttttcggtcccatttttgggggagaggtggaccatttctttataaagtccctcccatctcccaccgtaagtctcccacttctctgtggagctacggtaaaggcagctaaaccggacgagttggtcaaacagctttggagtttggaagccatcggaatccgggaccctctggacccaaatgacgacgcattggcctcggctcttttcaatgattcagtgcaatttaaggggggcagatacgaagtgggttggccatggcgcccgggaggtagagacaggctgtctagcaatttttctttggctttttcccgtctgtcggctttatctcaaaggctcagggctaatcccgaattaagggaaaaataccaagcggtaattacggaccaaattgaacggggaataatcgaaccagcggttcggacaggggcaggtgagcatttcatcccgcatcatgcggtcataacccctaaaaagctgcgggttgtcttcgatgcttctgctcatgaaaagggaaaggcatcgttgaacgaattgcttcttccttgccctaatttagtcccggaactggcgggaattctgttgcgattccgggcctcggcgtaccccgtccttggggacatcgaaaaggcctttttggccgtcggtcttcgggaggaagaccgggaagtggccaagttcttgtggccaaaagacccttcccaacccctaaaccccgggaatttggaaatttaccgatttaagagaatcgcgttcggcatcaattcgtcgccttttttgctcgcctccgttcttcggcatcatttgtcatccctgggagaccccctggggatggctcgaaatttttacgtagataacttgttaatttgtagcgagacgcccagcgaagcggccgccgccattcaaactgacacattttttcggatgcgggtcctaattcctttgctgccgccgtttacctacgcgccgagcgtaacggtcgggccgaggtttccctcctttttgccaaatctcgcctacggcccaaaaaattcaaaaatgacggcctaaccatcccccgtttggaactgctgggattggtcgccgcaattcgggccaaaaattttgtggccgccaattttgacctgtcttttgagaaaataattttttgggcggattcccaaattgccctttcttggttggccagcaatgccccccaacccgtgtttatagccaatcggctggcagaaattaggagggagaaaaatgccatttttaaatacgtccggtcctgtgacaacccggcagatttgggcaccaggggagcatccccaaacgaactaagggatcttagtctttggcattctgggcctggttggctcaaagggcctgaacaaaaatggcccaatgaatttcgggagattgtttttccgccggatgtgccttctgaggaggaaaatggccatctcccagcgaccatcgcctcggtggtggagtcaccggcagacccgcccttactaaacccgcggcgttttaatagttggtccaaactgctaacaactagcacttttgtccttttcttcctaggcaaaattcttaaagccgaaagtcttaataagttgccatttctgcgtaaatttgagggggtagaaccattatcccggaaggccaaaaaggaggcaaaaaattggctcttaaaaagggagcagaacaaaattgctcaaggcgatggcactattttggatgctgacggaatggtccgcctcaaaacacggctcgcccactccgaccaatcaattgactttataaaccccataattcttcccagggattcgtgggtcactcgcttactcgttttggcattccacagctcattagctcatgctggggtggactttactctatctaaatttctgggtgaattttggtgtccgagagccaggcgtttggtaaaaaccgtactgcggggttgtgtcatttgtaaaaaagacaaggcagtaaaattcgccctcccgccaatgcctcccctcccctcggcacgcaccattcccagccccccattcactttcgtcggacttgactacttgggcccaactcttttcaaaacccctgaagggccaaaaaaggcatgggttttgcttctaacatgcctaagctgtcgagcggtgcacctggaaattgtggactctctcagcgcctctgactttatcgcggcattccgccgttttgtcgcccgtcggggcactccaaaaaggatatggtcggaccacgggacccaattagtcctggggaggcaacttttaatgatttattatgattttcctgtggaatggaagctcatccccccacagagcccctgggcagggggagtttacgaacggatggtaggacttgtgaaaaccgccttccgccggtgtttgggaagggcaaccccgggctggacacacttacaaacactaacatgtgaaattgaagcagtattaaataatcgcccaattacttttgtctcggatgagaaggatggaccgttaccccttcgccccgtagactttttgtcccctcattcacggaataccgtagtcgaaccggaggaaccggaccaaccatttctgccctcctccatcgaaaaattggctcacttatggtacattaccaatgagtctctgcgccaattttggcaaatgtggcggcgggagtatcttttgattttgaggggaagaaccaaggacactcatgcaggccctaggctttttgctcccggccccccgaaaattggggacgtggtcctcgtggaacaagaagaatttccacgaaaccattggccattgggccgaattctcgccctttttcctccagaaaggccccgcagtgcaaaggtgctgatgggaagtggaagagaatgggagcgtcccatcaatcaattagtgcctctggagggcacagcagaatgggcacaggcacccgaccaggaccccctccccgtaagcaatgacggtggcagaggtgtgaaattaagagtgttaaggagtcaaaggagaagggaaggggcaatgaattttaagtgggcggacaggccgcctcccccccgttgaactgcccgtcggtgcagataaagggatacgactcgggctgaaatgggcacttcgccctcccctggtcacagtcctaatcatgttattggcctttgtccatgaagcgcatgccgcgccgcgccctctttcttgtgacgagcaaggaatttgggtgtttcttaaccctaaggccgagaattcgctggtctgttgtgaggggatctgtagtagcaggagccatttaaccccttatttgctcccccttcccccggatttgctagccagtggttttgaatgccacctttcgtactcaattttgggggaaaaaatttcaacgcagattcagtgcgaccccgtggaagggtgtaatctcattaagtgctatttctgttgggagcgggtccttaatccccattgttcacccttcctcctggcctttgccattgggacaattgctggggcaattggtgccgtgattttcatatttctttgtttcttgtggaccgtccaaagaagtgctgtgcggggtcgatggaccgggttattttcaggtattttttggaaaaaccggcgcagtcccgaaccgactgccaaatggaggcggagtcgcgtcataactgaggaagggtcagacgaggacgaagttctatttcagcacgaggacttagcgggcgggatcatccagcagagggaaataggtccggctgaagaaaggccaactcagtcccggactcaaagagacccgactgctcggcctaaactcttaacccgcttcggatatgcactttcccctcctttactcgggctgctattcgccttattttttatcccatgcataaaagcgggactagaagtggtgtccgtgtcagccgacacggaagagtgcgttgtcgatcacggcagcactcagtgacgttttgacagtgtgacttcacttacactgctaccagtcggccaaaagccaatcatccgcaaattaacataacaaaaacaattatgaacaacgacatggcctaccctcctccgcaatatattcctctttatcccctctccggtgcaccaaattacgtcatggctcggccgctcgccgatggaaatttcatggcgcccatccaggccccaatggcccgtgatgcaacgacgcagcaacagcgccttggaccgccacacacaacgccaactgctccaccggcggcggcacaatctgccgcaccggcacactccgttcctcccccccttaatcccccagcacactccgcagcaccgccccttaatcctccttcaaccggtgcggggccggacatggtaagtcgccgtcttttaggaaatgtgaatcgttctctactggagctggtccaagtcgcccattcgcaacgaattgttttggagcgtttgttaatgacggcttccgtcaaccagatgagcagccgcggtgtcgatggtagacgagggaatgggcggtaccgaaagaaggccaagggctcgggccattccttcccgagccaaaagcagggaacagttgggggggcccgtccctctcgttttcaggaagcgacggagaaccccggcccaatagggcttgtggaaaagcccacccttgggaatggaaatgagccggccgttgctgctgttctcccagaatcggattcaaacgccgcatcgtctttggcttcgtcgacgtgatgcacatctgcaccgcaaggggggcgggggagactgtctccgacagaaattaaaacaaaaaataataacaaaaaaatatataaaataacaaaatcaaaacaaaattctttttacacattttttggtcggggattagcccaattgtcccacttttcacataaataaatatttgttgctaatccgtgggctctgcccaccatttcccccttttttcattaatccccacaggcattttggtgacttgtactgattaaatcgggaagtggtttggcgttcttggccctgctcatcgccccccccccacggcccaatggtgcccaactctcgccgttgcccgtccatctgttgcccgttgctcctcccaacactgtcgcccacccaccgcttggccccaccaatcaccactgcccgcccaccaacaatcacccgaacactgtggacccgcccatcccgtttggccgtataaaaagaatgaaggatgctcgacaattacttactcttctgggcgattacttttctcgcctttttctcgatttcgccctttttgctctacctactcgccagcaatcttggctttccccttttgctcttgccctttgctttacctttctcactttggctttaccattttcaccttgcttatccatttcaattttgccttcgctttaaaaataaaaacaaaaaaaaccttttctcttttggctttgcattaaatttttccgcgtttttggcccctgatcatttctggggcatttctcattttttgtgcccttttgaccattgcgtgggcattcccccgtttttggcccttttcatcaccggctactcctgcccgtggtgcctattttgcctttgctttagccattgcccggccattttgtcgccgctttagtcctcgttcgtttccgttgcctttggccagcattccactgactcaggcccctttgtcccttttctggccccccttttttttccctgtgtttaccacagtttgattaagagtcttttgctcttaccagactgaggtctaaccgggcccttttttcgggctaaacttgtaaaacaaacgggactaagtactgtaaaggggcaaaaccgtcactccttttttactcaactttttcgctttatctttttttctctcaactatgtcggccataatccggcagcaactccgcgctcttttgaccgccatttcttctgactcattacagggggccgattccgatttattgccaaacgaccccacttctctggagtccattagccttaccgccgagaagctctcgcggaaactaagcaaggcccaagccctcctgaaagattggacgattatcctttcctcgtcgagtaaagaagtcagagagcaggaaaatgctttgtttgactagggggcggtgggtgggcttactccgggtgaaatccccgcgcggcgggggtgaagttctgacctaaattggaaataaaaatagatgg

SEQ ID NO: 2379 - DNA, 4278 bp, Heterodera glycines
ttttaacaaatttcgcataaactgctgatttgaggggctctaactctttcgcgtatcgctctgcgaagcacaaaaagtgcttaaatttcgtaaatggtcccaccccaaacaactcacttcagcagtttcgtcctgtctaataagtctttcctcggcagaactcacaatctgaaaagggtttccaaaagtgaggcaatcggtcggcattcactcgcctcactatcagcactaagttcgtcagacaggaacagaccctcctcagtttgcaagtcgattatcggaggcataatgtccgattttgaaccgaaaaaagggcgtatcttcgggcggggattgcttactatgctgaaaattctaatttaaaaataaatcacaagaaaatatgtttaccttaatttgtcatcctcaatttcgggtcctgaatcgctgatgttctccaattcttcaaaaatttcttgcaattccaattcagtcggctgcacaatggagccggaagtgtgcggtccctcttcctcttccgccattacctggcatggacgggaaacagatgaaagaattaaatgaaaattcgagtaaaatttgaaaaacaaaaaattttgggggaatgctatcgcccaccccacctcatccggtttgaacttccgcagcagggcaatcactctctgctttatattgcgctgcttcaaaaactttttccgcctccgtccaaggtattcggccgtgccgtggtcgtctgtcgtcgtcctcggtgtgaattccatgtccgattcgctgtcgtcggctgacgagaactcttccgggtcttcctcgctgagtatcattggctctttctcatttaccgtagtcacaatgcgttgtcgacccgatgttccgcacggttcgcccgtcaattcggcaggctttgtgtaacaattcgaaacttcgattttcccagcatgcaattctaaacatttgttttaagtccctaatcgatgtgacaaaattacccctcattgaatggcgcactttctgctgaatgcaagtggtatcccaaatgaccacctcttttgaacctccgaattgtaacacttcgtccaaattcaaatggcccattgcgagcgttttaaacccgggaatttgtctgtttttgtatctcttccgccgctgtatcaaaatttggagaatgttcggtttgcgcttgataaagtgacagtacttaaatttggaaggtgatttaattgacggggcaattcgcacttgtattataaaagaaatgtcaagcggaatgtccaatttcgaaggcggaacattcaaatcattggttcgcagtgtccttttgttgttctgtcataaaatccaatcaaaaaaagaattgtcgaaaacccacctgaagtcggatggctattgtgaacggcgtattttcagttatcgccaaactttttgtcaaacgcaggcgggtgaaaaccatggacagaacccttggggaatgtacattcaattgtaaacacatggagaaacgagacggcacctttgtacagcaattggcgaagacgtacgatcgacgtcccaattggcataaaagcgcattggcaagacggtaaccgaagatgggtgtttggcaggatgcattccaacaaacaacctgatgccagattaatggttatttttatatttattatacatagtagtaaaatggacaaaagaaaatactgcaccgaattaagcatttaaatgtttttaatttcttacgtaaaatgtattcaacgagcaacaataataataccacatcacaacaaaactgggaacaaaaggaacacattttctgaagacaatgacacacaataataccgcagaataaagatgaagtctttcccgaaaaataagccaatattgaagagatgaattgattggggttttgaatgagtacatttaacgcgaaatgtgtccatcggtcgctctctttcgctttttcctcattccttcggcttctcctgagctgttggctgtgttcctgcctcctcctcctttacgccttccttctctttatcctccttttccttccttcgcttcatcttaaacgcctcccggaatttcacgtcaaactcatcggccacttccttcgccactttgcacaatgaatccttggactgggcgatgtagtccaaaccagatgagatttcagtcaacattttctaaaaaggcgctgttttttttgttacatgaatgttcgactaacgttgaaatcgttgatcaaataccactgttcgcccttggtgagtttgtttcttgtacccaatgcgtcaacatcggggtttttccaaaagtcatatgcataggagttgtaatgaatctgtcaacaatggcattttggttatgattaaatgggagtcctttctaattagcactttgactcctcggtggtctttccgtgacaaatgcgtaagaggaaacaaacactcgtccaagatgaattcacttttgaaagccggcacaaagtcaatttggcttctgctcagacattccgctgaaaggccacccaatgcgaaaacggggttctgaaaatgaatggtgtttggcatctcgcaaattttgtatgttaaagttcttccggtacttccaatcgtcggtcattggaagcaaactgaagacatgccaataacagttcatttacttcccgattatgcttctcaatgtgtgcttcgattgactcgtcaagaggaggcaagacaggctgtttatgaataatacatgagaaaagcaatcatttttttaattataccattgactcatttgtcccttgtaaattgacgtaaaatggcaatattttagccgtaaaaatgtgcgccaaaatacaaatccaatcatcctaaaaaatatggtaaaaaatgagacaaaaactcaagatgaacctttgctcgactcagattgtcatgatgaaaaagatcgccatgtttagcaaagtaccgatggaaaatgccttcttgcaacaaactaacgaaaagcaaattgccgggttcgcgttggctcaaatgaagagcgaattgggcaaaaccgtgcaaaaagcactaaaaccaaatgcaagtaaaatgaaaaacagaaaaatggttaccttttcgtcgagcatttgaagacgtctaagaagttgaacattaaaaaatgtaaggcttttgagaattcgcatgaacacaagcgtatcatcggatgattgttcctcaggtgtttgaatatttttgtgtttggttttcaatacaaacggagcttttaataaggtaagtgcagcctaaacggacatccaattgtaaaaaaacaatggataaactaaacgaccttccttcgaaccacttcacttcgaacatcgtttgtgtccactaattgctgtttttttccaagtatagccttcgatttctcagtattcggatcgcttgtttcagatttctcgcgttttccgactgcatccgaatttgcataagcaaaaagacggagtaaaaacgcggctgtaaaaggtgcatttccacggagtgtggccaaactcgcagtcaaaagacgacggattttgctgaagattaatacggattgcatggtaataaagtttatgagactagcctggtgggcaatgacatgaaaatgactgtgcctgctggatcataaccacgccgacccgcacgaccggacatttgccgaaattggagcggtgtcaatttcggagtgtcaattccaaaaatgactgttttacacggcaagttcatactgacaaagaaaatgtttatttgaattggctttaaataaaatgattaaaaaaaagtacccgagtgccaatgttgaagtggagaagacgaccccaagaaaacctcgacgaaacaatgcctccaccgaagatctttcctgattggacagaccgtcgtggtggaaacctattccacgctcgaagagtttcaataacatttccgttgatttcttcgccggatctctggcatatgtttttctcagtctctcaaccactctgttgtatatgtcctcgtcggtccaattcccatgcagtttgaatctaacaataaacagggattgattgatctaagttattgacaattcttatcaccggcccaagtcgtcacgcattcgaatgcgcaaaagtgcgaattggtcggtgtctgtgccggctgtctcgtccttcttctcgtgcctttccacgttcccttcctcgtcagtccgttttgtcttcctttttgccgctcgttcttcctcgtccctttttcgttttgcgagtttttgggctttctgtacccatagagtgaattttat

SEQ ID NO: 2380 - DNA, 2714 bp, Heterodera glycines
  unsure (1)..(2714): unsure at all n locations
ctgcatccaatgaacaaatctttcttttaatgctgtctcaaagtggcgcaaatgccccctgttcaaccacattgggtcggccgcagaattacaggtaaaaaatgttttgaaaaaccgacgaggttcaaattcatccctaaaaaggcttattaaaaccacaagaaccaatagtacaaaaaatattcatgactaaccgaactgttttgtcgacatcgctcatcatttggtaaagttcaagcacttgacgagcagtgagacgttggtcagccggaattccaaacatacgcaatttttccaatttatatacggagaacgggttgaaaaactgaaccacgtcattccaagtggctctggataaaacacagtttcccaatctcaattttcataagtcactttgactgttgcgaaatttcgcttggtactggcgaattgttattggacgcccgacttgcgacactcgcccggtcatttgccgcatcctcaccggttccgtcttcaatttcattggatgtcacgctcgatcccctgaaaaatttggtttcgtccgtctcgaattgcacgccttttggacactcctaaaaattaatgcaaaataacttttaataaaaattgagaaatcttactcgaattttatgtagcgcaatttccaattccgaccatctctcgtcataagttatcttttaaaaaatttttaaaattaatttaattaattttatgctttataatttaccaattccactgttcgtgccggtgctccatcaattggtttgagttgttcggcctcttgaagccaatcgcgcaattcttcgatgttaccaatcgtagccgaaagagcaagaaaagggcaacggatcaacaggaaaatgtgttcccaaatatggccaagagaaaggccttgggtgtctttttgactaaagaaacgaactcaaatgaatacaattacagtaattatgtgactaacttaatacagtgaacttcgtcaagaatgacgtatcgaattcgggaaacgaattctcggcatctttcgcttgtggaaaggagaatttgctcaaaacaatcggggttggtgaccagcacttggcaattcaatgggttgttaactgaacaaagtaagcggagtcaatttgccagttttcataaaacccacgaatttcgttggtgtaaattccatagagaacttttccaccggacatgttctttgactgtaaatattatataataaaatgaaatacccaagtaaatttagagaaattacccgaaaacgcgcataaactgagccaacgtactgattggtaagtgcctttgacgggcaaatgtaaacaacgacctcatcgttgctttttcgcaacactttctcgatgcaatagtacgaaatgaatgttttaccggccgaagttggcgcaacaatcaaagcggatttgtcttaacggaagtgagtccttttttaaataggtaaaaaatgatttaaaaaatttgcacttgtaagataaacaattttcatagtaataaatgcccctggttagaattaggtcaaccttggtccaccgcatccaacattttccgctgccaagcatcgggcaaaaatccggtgactctttcgtcctttttagggtctgacaaaatttccaacattcttcccccgtattggagttggtaataaacaagatcaatgtccaagttgtacgccttatccgcacgtcgttttgacgaatcagcaactccaaaacccaacgaaagccaaagggtttgaatctaacgagaaaaaagattaacaaggaaattgggcacgcaaactttgtccttctgctgactgtccaaatggtcataatatttggtcagaatcacttttattgactcgacaagttctgaagagcagagaaattactgtacaataatatgacacggttaacaaattccaatacccaaagccgcgatccgtttgttgtcgatgttttcgaaattctccaaccgttctgaaaatatttcgttgtaccgcaacatcttttgatacatgcacaatgctttggactcgtccaactccaagcggcgcaacaaatcatcgagtgcaaaaattgccttaataaaataaattagttattttgtttgtcagtaccaaataaaggggaattcacttctctcacattggcctttattcctgtggcatattcaattttttgtctgtcgctctcaatttgctctttgtttttcttctcgcgactttctttcagaatttggtcctttttgctcagttgtgaccctccctttcctcctcctgctcccggttttccggcctttttcttgaccccagcatccttttccttcttcacagtttctttttgaactgtcgtttcttttgtttcagaaacattagcttttggcactcttgtgaagtcgaccaacatttgaccttcgagcgaatcggagaaaagttggtacctggaaaaaccatgggaaaattataattttttgcccatttgatctcaaattcgagataagccattaaaatatcttatacattttcgctgttgattttgacttttgtttatgaaaatacggtttggttttccctaaccaactgtaccatttagaaaggtcatggcgctagtgtaagagtcgattcgcctttttcgggtcagaaaggtgcnccttctcccattctctttgcgcttcttctttaaaaggaatgggtcgtagatgctgctgaatatccaacc

SEQ ID NO: 2381 - DNA, 5224 bp, Heterodera glycines
atgaagtgcagcaattcagagaattgctattctgaaaaatgaaagaattcacaaaagaaaacaattaatagtttgtttgttgttttaaaactgactaataacacaaattatcgcaaataaatcctcttatcagtcccagcgcttacctccagaaaatcaggaataaattgacgaagcaattcgttttcgactttgtagaaaatacattgaccagttgtactttgctgttcgaaattttgtggagaaattgggtcaagtaatttgtcctcaagatcagttggaattgccacggtaagtcccacacttttgtgcaattgtgcaaatttctcttgtcgacgtaatggaagaatctttaacaaaatgtcaaccaattaattaaaaatatttcgaacaccttttcgccggacattattttcttgaaacaagtgaaaaccattcggccatcccaaatgtcgtcaagtgagaaaaggatttgctaaaccaaactgttttaaaataaggaattggattattgttcaaccttttcaacagcgcccgacaaaagtttctgggctcgttccaacaatccgcgacgaaaactgttcaccgatggcgaaggccccttattataatcttcttccgtgtccaaataacggcgttttactcccaattcttcgcagattaatgccgacaaaagaacagcgttgcagaatttttgaaattcgtccaatttttctttattcttttcggcctctttgagttcgtcgcgcagaacaacagcccaaaagtcggtgatattttgacatgaaaccaaatcagaattttgtgtctgataagcaacttaaaggtaacagacaaaaatatagacaagtttacgcatactcagcaacttacggcctcgggtttctggccatttttctctgattttctgactaaatccttcgatattcagcggaacagttgataaacggtatgcattaacagatataaagttgatggtgaagccattgaacaaaactaccggtattgcttcgtttatcagggaaaatgctaaaaagaaagcaatcgatttaaagagacaaaaaatggacctaatgaaatgaaacggtcagcaaaattaatgggctctttgattatgtccggggcattctccaatgacaaaagcataaaggatggcgtaagctgatgcagatagtcattccatttctcgtcaagaggagaagtgaaaaactccaaattttcagcccatttgctcttggtaatccaacaaagaataaacgggtgaaggaaggcgagaaaagtgtcgcttttgaacaaaggcgtcaattcagtgaatgtcaccaatttgaactttgcgttgagttcttccaatccgccgaggaattgtttaatcttcaaagacattttttttattagtaatactcgaatagaaagaacctgttcacagagaacgatggtctgtccacccaacacccatttgtggtaacgatgggcacacaactcaagcaaaagcgaatcgagagagatgaggaaaatttcaacatcagcaaattctgaaatgtcgaactgatgatgtaataaaggatgttattctaaagcctgttataatgtcggtgtaagggcaaggaatgagtcgtattgtatccaaatcaagcggtaggtcaccttaaaaaaaatcacaaaaatgaagtattttgctagcaccatcaatcgcagcgttttcattcgtttctgtcggctcttccatcaattttcatatgtggctttggcaatttctaaattctgctaaatgagtttaccaattactttcagtttcggttaatcaggtggtttcaaaaacataatcattcaggtccacaggccatttttcggcaacgtgggttctgttttcagcttttttatggaaaactgctcgttaatttttatggagatttttgttgttaattttgatttaaattaaggatctgggatcggcgatgcggaaaggagcacgcccagagaaagtttttgaaaatttactttaacagattttcaatatttccattccaagttactcttttaaatttgattttatccgagccggaattccatcaaaatttttcggcgtgattttttgatatgcaaagtaagtttgttgggagttgggactcaaactaatagtaaaggcattctcgaaaaccaaactcaaagtaaagacagtctcgaaaatttgaatttatttttcttttgcatttcgtttccataatttttttttgttaacgttgcatctgaaataatgcaattagcattgcacaaaacaaattaggtaggtattttttttaatacaacctttttcatttctcttttttattcacagatatttgacttttttcttctagttcatgtgtctttccaattctgtcagaatgctgagccgcacttggatcgtcgcaatttgtttttatattttctttggcacgattttaccattctctgaagcaattcgtttttatgtggcttctaacgataagaaatgtctgaaggaagaaattcacaaaaatatcgtgttgacgggcgaatatgaattaagcgattctgttgggcacacaacgacagttcatgtcagtgatttaagcagattataacaaattgatattggaatttcaggtcactgatactcgtggtcacactctgtacaagcgtgaaaacttcccagaggcccgtggaaaatttgcatttactgcggacgaatacgacattttcgaaatttgcttccaaatgcatggcccgactcgtaattctttgactgttgctattttcaagtgatgcttttaatttccagaccaacaaaagttaaacagagaagtccatttggtgctaaaacatggagtggaggccaaaaactacgaagacttggccaaagcagaaaaactgaaacccctcgaggtggagctccgtcgtctggaggatttgtcggattcgattgtgcaggactttgcttacatgcgtcagcgggaggaagaaatgcgggacaccaatggtatttacttttcctcccaacataaaaccatcttatttgtctgacaataaacaccattaacattgtcagaatcaaccaacagtcgtgtgctctacctcagcatcttctcaatgttgtgtcttctcgggctcgccacgtggcaggtgatctacctgagaagttacttcaagtcgaagaaactcattgactgatcagtgcgacatatttctttcaagttacggcctcttttggtaatttatttgattcactgttgttgtcggtttttatgggtttatttatgcatatgtaacagattatttcttgagcaatgagtaagtgacttcctgagctataaaaactaacaatttggttaaaaaagtgactagaataatcgaaataattagtgaaaatgggcgaggtcattcaattctcttcactttctctctgattgcctcgagcagcttttccctcgcttgcaacagctccgggtccctcccccttgtcatttgcgctgtgaccactgcgttgactgattccacattttgactgtttgtttctttctccgcggttatttcagtttccatttccctttttatgttgtcctctcgttcagatggaatagtgttttcgcttgttttggtttgcttttggatggtattctgacgcggcagttcctccttttcacaaagagtcgcaattaccgagttgactatattgtccatttgtaatggttcataaactttgctttccgaattacgatgcacatggctaaaaaaaaaattttttttttggagaaaattatatttcaatcctcgagtaccgattcacttgcggctgatgtctctttgttgacggacaaggggaggaaaggcacgaatgagtgccttctctgatgagtgcgtccgctccacggtctctgtttgtctccttcacacgttgattggaagtacgcattttgggcgtcgcaggccgtacttcccttagggcctttcttgcttttaacgcctccctttcttccgtttgtgcgatttcttcctccaatttggcctccctccgcaatgtttcttctttctcgatcgctgccactcgactttcactgtccggttccatttttgtgatttgcatgcaaatctgttccatcggtgatggaagcactgagtcggagcttcgtcgaatatcgataacagaaataagagaagccatttgcgtggcgaacggcttcaattgttgtgccacctaaagaagtgtttttttgtttaaaggtggcgatggacagactttgaatgcccgtttggccaaactccgaagctgaatcaattctcgtgccttgtcacgaaccgccagttgctgattttgaatccgttcaatttctcgtcgccaaaactgtttcagactttggttgacgatgctttccacctgtctattgtgtgtctcgagtcgtttccaggcgtcttcacagctaaaaaaaatccagaaataaattggaataatttattctcttaattattgagacaaaatctgtccatacttggtaatttttgataaaaggtcttccggactgacgacacaccgtctcagtgtcaaatccctctggagatccagcaaaatctttgagatggcagaaatttcataagcaaaatcgttcagaggcgtcgcgatttttctgaactgttctgagaagcgttgttcagataccatcggcggcccgtttaaattcatgctttcgagttgcgatgtaatggcaacggaggagtggttaaactcgattgtgaaatcatcagttaattttttgatggttcctttttcggaagtggagaaattttcaaccgcaacagacggaaaacccttcatctcttcttccgaaagaagcgctggggcagcaatgccagttttgtttggggtggagtcttcggcggaaaattcggccaatgtttttcgtctttgctgggaagagcctgaccaatggggacagaatgcatttgtggtgaatttgttgtttcatactcttcgtatggtcgaatgaagaatgccccattgtgctgctccgcgaatttgggtcacaattcagaaaaatgccatgagagctcgaattatcggcgaatgacagtgtggaaaggcccaacggttgacaaacggagagggcaaattcggaagggaagtcgatgttaaaattgcaatcgaatttcactttttggatcagttccaggccatatgaggagagaaattgctaaaaaaagagcgggaaac

SEQ ID NO: 2382 - DNA, 2192 bp, Heterodera glycines
ttttcataatttctttcttcctcaatcaaaaacttgcacaacaaatttttgatataatttaaaaattcttaactagctcaattagttgtgagaagtggtatatgggggataaagcacatgggtatctcagtcggttagagcatttcacggcatggaaaagccgtgagttcgaatcccaccgggcgcgtaatttttttattttctacatacatattcacccatgaaaataaaattcggttttcatttttaattgctaaaaaattattcaaaattcttgcttaatcttttttatttatttatttttttgccattcttgcttaacgttttctctttttttttgcctacaatttttaaggcccgtttttcgttttttgttttttttgtgaaataaatgtaaatttattgatttaaaatgctccgaataattttaccactattttttttttgaatgaatgaatgcatttgaattgcgcaatccatcaacctcgcaatcccatctcatccattgtcaaaaaaaagaaggaaaattccttcatccaccatctcttttcgcccaaacaatgaaaagcgaatcaaatgtccgtccattttcattttcacgacaaaattttcaaattttatttttaggttttttgaattaaaattaattaggtaattaattgggactgaattcaactcagaaatgaaagcttgaaccaaaaattttttattatcatttttcaaccgaaaagtctcaatcaatttgctaaattaattgtttttctacatcgttagaaaaaaaaagtcgaacataagttaggaaaaaagtcgaacataagttaggaaaaaagtcgaacatatgcactatgttttgaatcggtctaaaacatggttcaaattcaatttcataaaataataaaacatttaaaaacgagtttttctttgctctattttttgatgcccaaaaaaaccacagttatttacagaggcttgaagaaatttcggttgaaaaaatgacaaaaacttttgaccgagaacctagtaaataattgtatcgggactcaaattttttccaaataaacacaacaaattacttaaaattgataaatttaaacacgaaaaataaggagagtctttctttttcgatttctaagattcggaccctctgaaaataaggacaaaactttgaaaaattaaggacacttttgggttccccactgtttcgtaaatattaaatttattttcttttatttctaaaattaattaattttaatttctttttattcaaaaatttcgaaaattaattaaacacattttttcaattggaaatgatttttgatgctattttttccgcgtttaaatgaaggacaaataaataaaaataaatcaaaatttaaaatttttgaaaattactttttttctatttgcatgaatgcattttcatgtgcacaacaatctgtcaaaaaaaaacagtaaaggccacgctctcccaaatatcatcatcattaaatttaatgatgttttcattattaaactaaaggatttttcaacaacaaaaaaatccccgaaaatctaatggtatttcatacaaaaattcttaattgcacaattagtgtcaattaatttaactacgaacgtctctttttttcaaacaaaaattgcacaaaatcagcccatttaattaatgcatttttaatgaatgtgcgcaaaatttgtcaaaaaatcggtcagtcattttgctcatctgccctatctttcgtctgttcacctcctaattcattcgttatcatattttcaaatctaaaagagtgccattgtgggagataatttttgcgaaaaaatgagtcataaaaatgagtcgagaatttaggaccgaccctgaaacctaacccgagacagagaaaaacgactgcgagatagccgagacttagggttgccgcccaaaactcgtaacatgaatcccgatccgaacaattttggctgcctcggttccggatctcgactcgacaattttctcgttcgggagtcgaaaacgcgcctctcgcacaaccctacactttaaccaaccctcaaacccgtaaaatttgcgagtcgaaaaccgagccctacgccttaacctaactcttttaacccgtgaattcgggagtcgaaaacgcgaaactctcgcttaacctacacctcattacctaaccctcctctccctatgctactca

SEQ ID NO: 2383 - DNA, 8439 bp, Heterodera glycines
tgatttatttttctattcgggggtttccaattttggcttgtaaaatttgcataattgaataattttgcacatttaatccatttaaatcattcttgatttggagctaattagtatttctaaacgaaaatttttgaaattttatttttagaaattcgctaaccaatttgaattttgaataaatgaaacattttggtaaataaatataaaatgaaacatttatttctttcactatacattcttatcatcatattatcattattcatcaaaatgagaaaataatgataagtgataacatcatttataaagtctaattaaaataaaagtttatggaaatcaaagtcgagactgagccgggaatttcataaatctccattctgatcacagaaaaagggggtaagggattattggaaaatcggggagggcggtgggagctcgaaattcattgatcacaaaatttcgaatcaaagtattatgatggtgggctggaaacgtgattgcggattacaagttgctggggctctgaatttttcttaaagaccaaattacggattcccaaactcctttattggatgaacccagtcatttccgaccctgactaattatgctaattatgacgcaatccctaaattgtgcgaccaacttatttaattaatcccttttttgtaaaaatgtattctcggcaacgataataataataatacgttaattgtcgagaaatgctaatgcgtcgtatatgatggaccttcttggtctgtttgttttgtcctctctctcctccatcgtccccccattaacatcgttttgccaatttggccacgaaatgactattcctctcggctattttaagcacaaacaagcagcaaaataataaaaacaattaaagccgtgagtgccgagaatagtcacccgtttctctccccattcccccgccacttttggcacttctcgagacaaactctcaaaaatctcggacaacaacaatcattaaatatcacgttattcatttcaatgtacggtaaatagaaagggtgagcagagcaataacaaaaagaaaaagtgtgataaaatggtgacataaatgaatgggggtaaacaaggtgctgccagcagttaattgcttcttattgttagtctgctgaactggagctgctggttaacttgtggtgcctggccagttgagtcccgccgccagttgagccccagggaaaatgctttaattatacagtaaatttaaataattttattatgatttgtgtattgtaattataaacggggttgttgtacagccggaagctgctggttctgagttttgaaagttttttaaaacttggttaaattttgaaaaatggacgaaatggtaaatttgtaaattttgaaaaatggcgaatactgtagatttatcagggctgtggtgatggtgagcgggggggggggaggctctaataaaagttagtaacgtaaatttaaaaatcacattaagcgagccattttccttttcattttacaataattaagcacaccatcataatatgcttttctgtcattatcctaattagcacttaataattttctccgtcttcgtcacatttttaattcgctttttcttctgtcccatcgctgataacttatggccaactcaaagacacaaaaagtcaatagggctggggacatagaagtagttgaatgatgatgaatgtttgttgttccaaattttcggggtgagaaggcttaaggcttttcctctcatttcactttgcacatcaaattagtgtcccgtcttgaaacatttcacccgaaaattgcatttccatcccattttatttgtacaaatataaatttatatatcgggaatgcttagccgatttgctctaaaattgtttaaaaagtcgggactcgaaagaggtataggaggtatgtcgggaatgtcgacaatctcgaattaaaaatcccaaaacgaattttcaatgcctaaatttttggaactcgtattgccttaaaatttggaaatttccattgctaaaaaaattgaaaatcgttgacattcttaaaaattttcattcagttaaatttttatttaaatacatacaaatgatgaattattattataaatatcgcaaatttattgtattcattttttaattcatttattgacaaatttctccttttttaaatgcttttttttatccccgtttaagctttgtttattccattgctttaattttatttttcaaaatattcatttttttcaattttattggaatttacagtcaatgcttaagtaaaaagtaacttaaaatgggatttaaaaaagcacaaattgttctttcatcatctcccaataatcaatcagcagcccatcaacacacatttgtcgtaaaattacatttttttcttcttctccccccgtaaaacatttcccaaaatctttatttttttattaatttaaaaacgagtttttaaagtttgtacaaattactttaaaatatttaaaataatgctttttttattaatatatttatataatgcatttattttaaataaattctaaatcgttatttaaattaactaacgaattaaattacaataattgttaaaaaatttattttataaattctaaatcgttatttaaattaactaaatgacttaaactaaaataataatttgttaaaatttattttaataattaaaattatacataaatcccatctttttcccatttaccattttctctttaatttattttattattgctttattattaattattttatctgctatcaatatttaaagtaatgctatttatttttcgaaaaatgagaattacaatataataatttaaaatatttaatttaactaaatgaattaaattaaagtaattttttaaaaatttatttatacctaattaaaattatacatcccatttttcccacatttccctttaatttattttatttatcattcctttattactatttatttatttatcattttatctgctgctgctatcaaattggacaaacaaattgctttgtgcaaaaatggacggtccaattaagtaattaattatgtttgtgcattttctgcaatttctccaattaaaattttcgtcataaaattgcgattttcttccgatcgattttcccaatgtttgtcctttctcctccaattttcatttgttctcttttctcgccccaaacattcttctttctccgtttccttcaccaattttatgtcatttaatgttcaaaaatgcatttttttttttgttttaaattaaaaactaaatttttattaatttttatttatagaaaatagtatcagtttcaatatgctatttaagcttttcttttctctattagcccatataaaaattcaaaaaatttcataaattttactctattagcctagataattcaaaaattaaaaaatttataaagtaaaagattgtttgaatttggataaaaatttttggaattttgtaagctaatagagaaaactcagggctactaactaccggacatacaacgaatgaatttgtagcacttttataatatgccaagtattcatttggatattttttgatggcaatttagtcgacaaaattggcacttttacgatatgtccaagcatccattaagggatgatttggtgacaattttgtcgacaaaattgaaaaaatgtccaaacattcatggaatgatcattttgccccaacaaaacaggcaaagcatccctaggatattttaaagacaattccgacaaaattagcaattttttactgtatatatccaagcatccatgggatattttggcgacaattttgtcgacaaaactggcacttttataatatgccaagcacccattggatatttggcgacaaaactggcacttttataatatgccaagcacccattggatgttcggcgacaaaactggcacttttacttgtccaagcatccctaggatgttttgatgacaattttatctcacaaaattggcacttttactatatatccaagcatccatgggatatatatatatatatatatattgatgacaatttgtcgacaaaattagcaattttttactgtatatatcccacacccattgagtatgtttataatatctttcctcaactttttaataaaaaaaaattgaacaaagaaaaaaatgtacggaaaattacgacgaggacggcacgcacatttcattcatttccatccattcttccttttttcaaattcatttgtccgcttctttcgtccccccgttttcattcttcttcttctgctgctgttgctcacattttccccgtctttcgtcgtccatttttatcataaataataaataaataaatgggacaaaaacaacaaaaagaaagatttcttcttctctcctattcattaattacttttctttataattatttattttaaatattttatttattaattaattatttaagcttttttctaattttcctccccattttgactttatttcagggggcggggggagggctctatttttcaacctctctcccaacctcaaaaggggggggggctttatttcatggggctctaattcagggaggggggctatattataggaaatattttaaatatttatattttatgtttttttctctaattttcctcccaattttgtctattttcatttgtttttcgttttttccaaatgccaaacagaccaataaaaattgggtaattgttatatggggggaccttctgctggctgctgttttgtggttgggactgttggggcggaacagaacaaaaacatcgacggagtacgaatttttggaccatgtctttttttcttactcaaaaaaattaaaaaacattcttggtactgttcgaacaaacttttgacaaactctattaacctgcaaaagtacaaaatttttgtttatgtacaaaaaaaaaatcaagaacaaaaatgtaagaaaacccaagtttttgagttcttcgggccaaattaacaaaaaaaaaaaaatttgataagatagaataataaaaaacagatagagctatcgaaaaaaaaaaaatttttttgtagctttaaatattttagatgtattgtattgttcggaagcgaatttatagaaaagcctctattaaatttgtcaaaatcaaatcattttttgaaaattaatgaatatattttttaaaccaagcctacttgaattcatttgttttgttttttttgataaaaatggaatttttcttatacttttttttggtttttttaatataatccacaatacaaatttgttatcatcgaaaatttcataaattttatgaatttatcatttggaatgatactttactgaattttttgaatttggcagaataagaaaaaaaaattttatggcgtctcgaatttgttggcgttggcgtcccgccgttccgcccgtttgaatttgctgctttgtcccctcaattataaaagctgtctgtcacacaaccaaatatgtacagaaaatagaatttgattgaagcggggacgagggtgtgggggggctgatgagagagacaacgattaattaaaaatggaaaatataattttaattggatgtaattaagcaaaaagataagtaagggtaattaggggagaataatgaatttgtaattaagaaagatgatgatttgatttgatgtgtgatgattatcaaaaagatgaagacgacggcggagatttgataacacaaatttatagggggaagaaagaagaagacgggctgtagtaattacgaatgtaattattggttgaaccatcatccttttcttatgttgttgggaaaccccatcatcatcatcatcatcatcattagcaaataaaattgccaaattattatgctttttgatgggccaagaaaatgtaagatttgggtcctggaaaatttgcttaacatttttaacaaagcctagacctgggtcaggagatttctggacaaaaatccagaagaatctaggcccaggaagatccaggaaatccatggccagggaaaactaagggaaatagggcccagcaaagccacagagaaattccggccaaataaaaatccatggcaatccaggcctaagaaaaacccagaaaaactcagcccaggaaaaagcaggggaaattcaggtccaagaaaaccagggaaaaatccaggcccaggaaaaatccatataaaaaattttttgaaagttttttgataattttcttttccgttctactgcctttttcctcctctacctaagaagtttacgaattttgccccttttttttgcctcaatcttttttatgataatatttattagcaatttaactgattacgaaaatgtttttaacattataaaaaagaacaaccaaccaaaaggtgggtagacaaaattcagaggccatttaaacaaacaatttgccaaggagataaaattttgtttttgaatttttacgagcttttttggccagagcggattagtttattcagcagatggagctttaccgtttaccattcgagctttttgattttgaatttattctcattttccttacgacaaaaaactgccccgtttttttttctataaagccatcaatttgaaaatcaatttcaaaggccaaattataaattttaattgaaattcaaattcaaatttcagagtccaaatttctgcgtccaacttttttcctcttttttcttttccgaattaattaattattcccgctgccgatatgatgcgtgcctttgaactgtaatgttttaaatttgtttttaccgtaaccaattttatttatttattattttttttaattaattttattttttgtgatccgcttttatttttcatatacataatacataaatctcttaacaatagaacccaaaattcaaaaattctaacggtagcgcttaccaaaaatcttacttaccgtattctatactcaaaaattgcatattttttttcttaaccaaaaatttttcggccaagaattgtgatgtttaaaagtaaaattttgtagattttccccaattgtttggcgcttttccccccgcttcttccccctctctgctgctctgttggactgtttgtttattctctcatcatccgccgaccgaccggctaaatttaaactcagtcggacccctaaaaataaatatttgatgcatatttgtgaatgaatatgaatgaatgttagtgatgatgatgatgaggagtgtttaatttattattatttcccattttcgagtacacaaattttttttcccttttttatgcgcaattttattttatttttttaaatattttaaattgttgttgttgaagaatgaagaacgcttttttccgtgggagaagcgggggggggggggaattttattattaggtatttatgattatatttttaattttgttgttgaagaataaggaatggggaacgctgttttgcgagggggggggctaagatttttatgccaaattttattttaacaacaattggagagctatttttttacgatatttaaaacaaatattttatttaaaattaatattttcatttttgttgttgaagagacgcattttttccggctgggggggggcgggtgagatttttgcgtattttagcaattttattttgaaaacaaatatttaaattaatatttctaattttttgttgttggccgtggtgctgcgattttcatgcgcaattttatttttcaaaacaattattttatacatatatgtatttatttttatgatttctatttttattgttgttgaagaagaagaagaagaagaacacttttttggaggagcagcgccggggggtgagagactgatttttgggaggaaccagttttttgtctttttaatggatcattagtgggcagaggggggggggggggaaattaattaattttatatttgtttgttgtagatttcttgaacggacctgtactgatgcggataattcttttgcagaaaacctgaaaaagaaagggacaaaacaatgggaagagacaaaaaagaaaagacggaccgggattgagaaaagcaaagacggaaaggaaaaggctgagcaaattggagattaggtaaatggaaatgatcagcagcaaagtgttagtcgccgcgcgaatgttccgacggcgaactttcatataatcgtagcccatggtcaattcggtgatcagcaaacgcaacctgttgcacattttgtcgccgtaaccttaacaaatggaatggaatgtgaagatggcacggcaaaaattgtacagaattaatcactcacatgagcacaattccgccgttaaaaaacaccaatgtgccgaatggaatgataacaatgagcaaaattgaagaagttgggaagccattcccggtgggtctttttgtgcggggaatgaaaccacggaaggggccaacggactgt

SEQ ID NO: 2384 - DNA, 1991 bp, Heterodera glycines
cttgaaaaagtcgatttttttgttttcggggcagtcccgccgagccgatgcgcccagatttatggggagtcggaatccttccggaatagcttccgtatagcctgtactttaattctgcgttggatttttgctccccataattgtttgagtaccccaaacggacacttgaaaaaatcgattttttttgttttcggggcagtccccccgaaccgatgcgcccagatttatggggagaccgaatccttcgggaatagcttccctatagcctgtactttaattatgcgttggatttttgctccccataattgtttgagtacccgggggagagaatggtcggaggttgtgttaaggagaaaaatcaatttatggcttaaaaatcattcattcattcacattgtacacatgtgcatgcatttgctatggctatgtatgaattcaccgattcacacaccaaatcatcgaattaaatttgtccattagcaactaattacctaatttatttatttattggccaattaatgtatgtgtgtgtgtgtgtatgtgttttttgtttctttgtggaaatgcaatttttctcaggacttgttccagtttcatttattaagatttttgtttattttaggggttttttaatattaggaattcaaaatttaaattttccccatggcgccgcctattggcatcggtggtcctttgttcattaactaaatttattggtcaattaaagtgcattttttggagatgcaatttgttcagtacagttctaaatctgtttgcttgatttataggatttttgtttattttttatgcgtctaaaaatatttgaaattcaaatttaagttttccctatgacacctattagcatcaacagtcctttgtcattaacaaaattaattggccaattagtgtgcgcgttctttgatttttggtactaataaatatagtttgagtccccctttttggttaactttcacaatttttttaaaataaaaaaataataatttatgtgtttattggatgtaattcagcaatttgtgaccataaatggaaaaaaatattcagccttccatcactgttcaattgtattcatgtgatatattagtactctatttttacgaatttaaattaaattttatttgaagttaacccaaaaaatcctccacaataatgccattttttgaaaatcttttttttcggcactcaatttaattgagtaaatctttttgcttatgtttatcccctaaatctctttatgataaaaactcgggggggggggggcggcagggctaaaaaattctgggccaaaatgaatttaaaatatcaatagatttttctaaaaattcatttttaaggcaaatctctttaatgaaaatggacaaaaaattgcgcacattcttgagaataaaaaaatgtcaaaatctatttggataattttattacagcaaattgcattcattgccaaccgaacgaattttgcgtaaaagaattttataatgtccaaaaataaaaatttaaataattaaaaaaaaatttttttacaataattatttattttgataaaaatttgtcaaatattcatcataaaaacatttaaaattctcttttattttgtagattataaacagaataatgtttttttagctaaatttaagcatttttgcaaatttgaacaacttattgaccttttttgtccatattttcatacaaattttggcatttcgcacatattttgagtgatttgttagcacattattatatttaaattttggctttatttttataaatattaagtttttctaattttggccagacaatttccttatttttattggcattcttttaaacacgaatttaaaaatattttttcctttaatagcaatgatattaaagcccgaatttccactgtaaaaaaaagaaataaaaattattaattttttgagccgaattccactttaactaaaaaatttaaaaaacataaaaattattatttt

SEQ ID NO: 2385 - DNA, 2430 bp, Heterodera glycines
tgcaggtctaaaaaaaaattaaaaattattaattttttgagccgaattcccactttaactaaaaaaatttcaaaaatcataaaaattattattttttagttcctttatcagcaatgatattgaaatgatgagcccgagtttccacttttctgtgccctcctcctcctcctgcgcatctgttgaccaacaacaacaaccgtcaaaatcggcagatgatcagcatcagcaacaatcagtcagcagaacatcatcatcatcttcgtcagcactttgcaccgccgccgcgcattgcacctttgatgaaactgagaccgcaaggtgttgcactgaacttgaacaccccgggcgagactaattaatgatgctcgggaaagaaaattaaatcggaaaagattcttggtccccgagaaactcgagacaggggattgtgctaaaactcgagaccagcaagggttggaccccccgagacttcggtttgatttctaagacccgagagtgagaccgacagtgagattcgagactacgattgaccccgtgaatccgagactaatatttgaccctgaggctcaagactaatgtttgtcctgagacccaagactaagacttgtcgagactaaggttggccctgagatttgagacctaaacctcacagccaacaaatctcatcacatgctttttcaaaaatgccttttcataaacattttatgtttggcagagactccatgtcatcgtttagccatcatcaccaccagcagcagctgcagcagcaccggggctcggccctgtcccttggccatgccatcgccgctccgtcctccgccgaactgatcgtgctcgactcaccaccgccggctcccccaaaaacgccaacgaccacggtgatgatgttcgacagcactgatcatggtggtggtggtgggggcggtcaacgacaacaacagcaacaacagtttgatgtcgttgccagtggttgttgtactgctagcagcgcatcatcttcattcataatcggatcgatggtaagaagcgggagcagtccctttctccgtatcacttatcaccccctccccccccccgccctcctccgaaaaatttttaaaagaaattttctatgttaaaaagttttcacacacacacacaaaattcagcttttgtatcattttcggccgtttaaaaaaatttaaatttagcgagtttgagaaatttactagtcgaaattttaccattgattttgaaaaaaaattatgcatttttacaattatgtgcatagtagtgttttagaaattattttatggtataataaaattttagaaattaccaaatcaaacaataaatagtaatattcaaatcattaaaaaaatttatttatttctttttgataaaaaactatccattgaatggttaattgatacaaaaaaaagtgaaggtcacccattcatcattttgaattccaattcttaattatagaacaaatattacattatttcggtaatgtaattttttaattaatgaattattatattattacattcacaaaaatttttttttgaaaagtggcaaattgaaaaaataaacccaatttatagcaaatgctcacaaaaatatggcattatggcacaaattttgattatcagggcctttgtgatcaatcacacattttttgaatttttaaatgtttgacccaattaatcacattatttggtgtcggattatttatcattcattagtcattcattcagtcacccatcaatcagcaccatcaacatcatgctttcatttaaatttattaaaattctttttacaattccatccaaaatcaattaaaatttggttttttctgacgggtgcacttcgtttcccctcctctgaattttttttttaaatttccagtaaaagtattaattgattaaaattttgaaaaaatgctaggaaatgtttaattttgttttcttcaaattttctttaaaaaagtgtttgtttctccattagcttgcaaatttaaaaaaatttcgttattgttttttccttcccaccgcagggattgcccacaatgcaaccgacgaatatgagcaatgttagtgccgcatctgctgcagtgtccaccacgtcggcatcattaaagaccgcctattcggcaataattgatgtgcttgaacttgacgacgtgctaattgacgaaattagcgccgctccaacaagctttggcggtggcacggacggagcgacaaggacggcgttggcaacgccagccggcggtggcacctgcacgacatcggctgatgagcagtcatcgagcagcggcaccaagcaggcccatgagtgagtttttttgttacaaaattcaaatttcggtgcaattaaacattttgccaatatttccccccccccccaaaaaaaaaaattcatcattagtctccaactctcatcaag

SEQ ID NO: 2386 - DNA, 529 bp, Heterodera glycines
  unsure (1)..(529): unsure at all n locations
atttcgtaaaattgagaagaaaaaaaactacatgggaggtttcaataaggagcgnnnntttgtntannntgnnnnnganncccctcaaaagaccangnaaaaagnaancaaaaananannaannnnaaannnacaaaaagncaancannaggggagccccaaagacacaancncgagncncgaaaancgagaccgagacaaaaaaaaacttgagacttttctcgagtcgagaccgagagtctcgaacagcactagttattatgcccatccccggcggggatgggtgcgatggatccctgttcccgggacagaaaaatggagacgaaaaatcagaggatttcaacccggtcaccgtaccgcgccgctggtgccaaccctactgtacctgacagcgccactccaaccaaatacatcagtgtgggactcgagcagaaaacgccgccgctcaaactaagccaacgctgaagagcagtttttattgtaaattatcatcataaatagaaagaaaaaaaatttttcaaaatctttt

SEQ ID NO: 2387 - DNA, 2698 bp, Heterodera glycines
atttttcctaaatttttaattaaaaattaagaaagataattcatcatttgaaccagtaaattaccgtatattatactggcctgttacgtgctccaaaatcaacacaaattcgttcaaccatttctatacatttatttggctccgtcaatgctcttgttttgccggtattaaaaaagacccatggtttttaatttcgggatcaatcaaaaaataacgacttgttcataaaatgtaccatttgattgctcaatcctgcacatgaaccgccagtcgggaacacatatttgtcaacatttttggggaaaagcctggaataattttgaaaacgataaaatataattttaaaagacttaaattgagaccgtcacaaaaaatgtcatattcaaataccgttcatattcttcttccgtaggatttggtttgcacaacgaaaaggcgaattgcaaattcggatcggatggctcaagggaatgcgatggttggacaaacttcaaagcataaaattggaccaaatagccaaaatggaaaaatagttgctatttccatatagccataaaaagataaataggtaaatccccaaaaattgtgtcctttttgtctgatttgcctttctttttacccatgcttcaatgaggcatttggagctgcggctgatgaacagctccatcttcagctgttctctttgctcttctgtttggtgtgccatcggcagcatgtcaagtccaagaagccaaaggtcggcataatccgccaaaaacgacagaccatttgaacggaggaaatcattttgcatggcacggccaccgaagtctgagaatggcattttgggaaagccgagaatgccaaattttatatatataaaataatgatttttttaaattctgataccaaaacatttttcattttcaccattttcttccaaagaaaaacgagtgaatcgaacagcagtttgatttgatgcaaaaagcacagaaattttgagttgtcctgcattcaaattatatcttaaaatatttaaaaaattatcttaatacaaatttatttttttgaaaatcaaaaatttaaaaattttcattttcccacttttgcttaaaataattaaaaatattcactgtttttgtgaggaaattgatgactccaaaatgatggcttttcctttgtcatttttggtttgctttggcactgtgcgaattttaatggcgcgccaaattattgtgacatttttgttgccatcttttggcatcttttgcacacattctttttcaatcgaatttccctggggaattaatatgtaattttaattaggtattacccaaatttaccattttagcgccaataatagattttcttttgacttttgaatttccgcttttctccaaatgattgcctcgttgaagcaaggccgtgtaacagatgagaatgctgtcaattcagattctcagtttattaaaaaattcaaattttatccaattcttagtttatttttttacccatcctcgcaatttccgccatcgcgagccatcagacgaaattcaattctgtaagggttcactacggtttcatttgatccattgttggcatggaattgtgccaatggactaaattgcactttcttgaatccaccaccgctatccgtcaaatggacacttaaattataatttgaaaatgaaattaagaaaaaaatttataatttaaatttaaaaatgaaagtaagaaaaaaatttttacgcatgatcagcagttgttggcaattgacaaatgatgcacattaagagaacgattaaaagagaaattactttgacaattaaaaaagtcatttttagtctaaaacaccaaagaacatagacagaaattaaattaaattaaattaagaataatatttatgtatattttttcctttttataataatatttaatgattaatttttatttatttattttacatttttaagagtttttccgtgtgatatagaaaattgttttggaatatttttatggattctgtcgaacatcagtgaaaaggatggggagaatggaaaacggatgaggatgaatcagcagtttaataaatcgtaagtccccatttgcgcctctacatttgcgcctcgcagtattttacactttttcgcccatttgcaaaaaaaaaataataataatcagaaaatattaaagacattccctacaaacgcttaacaaaaaattatttatcaaactgcctccgaataaactcttttaatttaagtaaatttataaaaattttaacaatttttagcgctttcacgcttttcggtggtgccaataggtgccgccggtgaaagtaattcaattattgtaaaaaactttctgcaaaaagtttcggatatttggtaaaaaagtgtcatttgcgtcattactattctagataaattttcaaatttaaaatagttaacctaaaactaaatatctgtggtaaaattagctatgctgttgaaaaaaagtgttcgaaaaattaacgtgtaaatgccgtgggcaaatgtgggaggcgcaaaaatggaggcgcaaaagtggaggcgcaaatgtgggaggcgcaaaaatggaggcgcaaaagtggaggcgcaaatgtgggaggcgcaaaaatggaggcgcaaaagtggaggcgctaatgtgggggcgcaaaagtggaggcgcaaatgtgggaggcgcaaaaatggaggcgcaa

SEQ ID NO: 2388 - DNA, 922 bp, Heterodera glycines
tagtttaatgttatgccttcctaatgagaaaggatatggaagtagcctcattaatttgtacaaaactgaattaattgccagtatgaaagtgagacaaataaaagaatgttacgtgcgtctacaaaatacactcataagaaaaggcccaaatatgtcaactaaaatgcaataaatgatataagaatttttgatgctaaattctttgaagcttaatacagtctttgaccttttcaaatccaattcaaaaaatttgttaatttaaaatttctctttccatctgagctaccaggccattccattcgagaactgaaatataatttaattggccaaatactatgtttgatagggtcaaatttgactgattgatggagctgttcctgtccgtcatgacgaatatgaacggctttacaattgcacggcgtttcccatttactccgtcccattggagcgacgacggcaatttgtggtcggcggaattgccaaatgcgtactgtgcgccatttattatgtgagtaatcaactgcaacaatgttaaaattggcattttggtcatggcgccgaaaagcaccgccgataaaaaatttgaaagtttagttgtgattttgccaatttccaataaattgtcgaaaatttccaatttttctcaaaaaattcggcaatcggaattcagacggcccaaaattttggaaacatgccaatgccaacaaattgccgaaaattgaagactttgccttgataaattcgacaattagaaatcggatttccgacccaaatgcaggaaactagaaattggaaacgaccttccgacacatttctggtaacataacaataaaataccaaaaattgccatagattctgtatgtgccgtgcatgtactcaatttggaagcattttcaccaaaatcttgctataaactgctctt

SEQ ID NO: 2389 - DNA, 2453 bp, Heterodera glycines
ttagtttgagcggcggcgttttctgctcgagtcccacactgatgtatttggttggagtggcgttgacaggtacagtagggttggtgccgggggtgcggtacggtgaccggggtgatgtcctcgggttttttcgtccccatttttctgtcccagtaacagggatccatcgcacccatccccgccggggatgggcataaaaacgatggctaaaagggtgctaggtcgtttcttaaaaactgtcaagttgtaggaaaataaaaatttaaaatttataaattcttatcttggattaatttcaataccaattaatatttcatggtgtaaaacaaaagctctaggggttctctatcagaatattaatttaaattttttttcacaaaattataagaaaattaaggtcataaaatttcaatatgtctttagttaaaattgtttgaccagaacttttttgaaatccagtgattttttgaaattttaaagataaataaagaattttagggctatcgaattatattattaattttggctcaattgtattttaatgacttgaaaattttaaatgtttatgcatgacaatggcaaaaaacatagcatattcaatgtaactttttttcagaagcaatttgatattctttttagagtctcaagttctctatttaatcgaattatctttaaaatttcttaagccaagatacgaatttataaattttacatttttattttcctacaacttgacagtttaagaaacgctcacttggcagtttttaagaaacatcccagcacgatctaaaagaatggtgggctcatcgaccagaaactaaaaaaacttttttttcgaattctccgtgaaccacccctgctgcaaaacccatccatctttccgtcggagtgggtaggtggacagaacaaacaattaatttcaattaattaccaattttctctctctatttaagttttttgggctgctgaaagtgtcgctgatttggtaattaataaaacaagaatatggcagtaataatttagcagattaattaggtgtttacactgaatcgctgtctcgactcgagaaaagtctcgggtttttttggtctcggtgtcgggttttcagtctcagtcttcgagacagtctcgtgaaaattttttgtctcgagcatcactaaaatctctgtctcgaactcggcttcgctaagctgtgccgtcattttttccccggccatcgcatttacgcatggctcttcgcttgttccctgtacgccctaggcagagccgtattcaacaaacccgtcctgtacagcagccttttcttcggctggttctacgacccgccgttcgtcggttatcgcactgctgatcagctacaacaacgcgaggaagtggggattaaagtcaaaaagtgccaaaatatatgcaaatctaaaaaatgcccaaaataaatgctattctaaaaaatccaaatagattcgacaaactaaaaagctttaaccaaatgtaaaaaaggtgtaataaacattatcgaataaaagaagaaattttataaaattttctttcatatgaacaatttcattcaaacaaatttttcattgatttttaaatccctgtttttaaatactatcgaatcagaaattaataattttgggtgcaaaatctgtaaactaacaataaacggctcaaattttcatatttcttatgctattagtgcttattactttgctttgctgtcattttccctaattgaaaacttagcataaaaatttctgcaatgttcggacgagtcgcagagagtttggcgttttggtttccgaattggattcagtacaaatacgggtcaataacatttatcgctttttatagatatactaaatcttaaaccattttctcttatgattttaaaaatttatttaatttttttttcaaatcaatttatcgtattttctctaattatcccccaattctgcttatctcctcaatgaacacattgacttgctctctttacttattctttcaaagccatgaagttgggcaatgggtgattgttcttgagtttatcttgtcaaaaataatgccaatgaaaaagtaaatgccaaattttgaatttaggttacatctgcatggtacggtactttaacgggaaccgctcagtccggcgccttttcttattatcagctaaattaaatatgccttttttgacctttgtgcctttttgatgtcttttcagtatttttttgaaaaatttgccacttttccttcatattttattacaatttccaaaaaatttccggcggcgcctgagggcacctccgaaccctcattttaccttgatatttgaaattttaaccctaaaatgggtaaaatttggcattttttgtgatttgaaaaaaagattgaaccggaaaatgcagattttgcttctttttttgcattacaaccacaaaatctatgattttactattggt

SEQ ID NO: 2390 - DNA, 1398 bp, Heterodera glycines
ggtatggaattgcgttgaaggctacacttaaaaagcactattttagtgaaatatttttgacacttttctattttttaaatatttttttgaagagacgggttccaaacctccggagcgtattccaataaaggcctaatataagttttatataacgtaacccaaatcttagatgatttggatttaattatccgaaacaaagaacgcatacgtaaatacgcattccttgttatttggttaacatgatcggaaaattgtaatttgttatcaatgtttactcctaaatccctaattgtatacacagcgtttattgtatttccatcaaatttataatttttcatttgggttttttgaacccaaataaagtacgaaagttttttgaattgagacttttattttaatacccgggcccggtttttgcccaaatactcgggcccgtgcagccctagtttaaatgagtttatttggttgtactaaattttctcaaaatattttttgttaatcgcttttaaattcggaatctgtctcaatacccagaaaaagactcttttagaatgcaattttgagtttggggacaatgactaatatttgccagcgtgctatgaagttactcaaaaacaccaaaataaagattttttcatataactttgctaaaaagcaaccatattttaactgttaatatcattcggcccctaaatgttttctattatcttgcaaaatttaaaatttcgtaatttgatttattttctggtgaagttcttttattttgatggtttttgagtaacgacccggcaccttagcaagcaagttcccctaggtgtcctctattagcctgcaaaatttcaaaaaatttcgttaggcttcaaaaaagttatggccaaaaatattcgaaaacctggccacatttgtacttatggccataactttgctcaaccttgccaaattttttgaaatttaagtgagctaatagagaaataaatgttagggctatcgaaatgtcttatttgatagactttgacaaaagttacagatagttttttgttcgaaattttcatttgatggtcttttttatactttttgatggcttttttataacggctcagcacctttttaactctttgtcgcggtttcaccaaggcacaacacaacgcaataaaaatgtattggcaaagccaagcatttgatttttgttatttaaaaataatttctataaatttaacaataaattctaaaatgataaaaaaaatatttttttaaagtaaaattaatcgggtaattattaagcatttaaaaaataaaaattttttttatttggtctttttttctttggctttttccttaaaaaaacccaagggcccaaaagggtccgcaaacccccccccctttttccccctattgggg

SEQ ID NO: 2391 - DNA, 1948 bp, Heterodera glycines
  unsure (1)..(1948): unsure at all n locations
tttaaatttatatttaattttgaggaatcagcagcagggatcatttgaggggatcaccagggatccgggaattattttaaaagcangaattttttgggtcacacaaaaattgattaaattatcaaatatntaaaatagtaaattttctttttgttttttattggctttttaaaaaatgttttaaaacaaaacaattaaaaaaatattattgattctcatgattttaaaacaatcaacatattgaccaataattaaattaataaaaaatcaatttgctttatgttcaaaatttaagggattagcggggatcatttagctggtcaccattgatcaccaaaattatttttacagtaggagggtcacataaatttggtttgcttttaagttaaaattccagggggatcaacgtatttttgtttataaactcataataattttctttctattcaacggggagcatatttctcagaaaagttaaaaaacgaaattttgttttattcagcgtttataattttgtcttaactttggaaagtttgttttttgctgaaaaatttttggatcatatgaaatttgggttgctctgaactgtttaattcctgcgggagaatttattttattttgattttttaagtttccatttcaaccattttattctttttgacaagtgggatactgtagcgtaaagaatgtagaataaataaaagaaaaataaaaaagagcaaaaaggaattaaaaattcagagttggttcttatgattttaaaacaatcttaagatcgaatttaaattgaattttcgcgtcgatactcggtgggtggagggacgcttgctggggaggaggggagtgggcgcactttggggtgtagggcggtgccgtagggtgtaaggcctatgttattttaattaaattttaaattttattttaaataaaattttaattattattttaaattaaataattcccaaataattatttcccatcagtggggggggcgcactcattgagggaagagggaagagatgaactttattatatgaaatgtgaaaaataaataaaaaatgaaaatgataaaacaaagggatcagcaatgagggcaatcactgcggcacttctgcttccaatactcaacaatttgcctcatccttttgtcacggtcgcttcgacgggacgaagtggtggacgaagaagcggaagaggaggaggacaccgagctgaaggcagtgtccggtctattgtcaaacagaattgctcgggcggtcgcgatctgttcggccgagaggcgcttgtaggcagtgcgcacacattctctaggaatgcgacgtgaacacgttggcgtcttattgggtgggggtttacatttataggtaaaagtgggtttaggctaccgtttgcaaaacatcgcacaacggttgaggcgccggggcatcatcgagcgggacaatttggagtgccggagacgcaaattgatgctgttgctgctgctgctgccggtgttgcagatacggttggaaagtgaactgtagcggaggaagtaccaaaggcattgcgaatggtgggaagacgggcagtggtggcatgcgcatttgcaaagtgctgatcgcctgttggacggcagctgaaagcatcggcgatggttgttgctggtgctgtgttgccgggacgcaatgtgtcaattgttggtgttgctggtgctgatcctcctcgacatgttgctgctgctcctcctcctcctcgacatgttgctgctcctcctcatcaacaatggctgcgccgtcgacgacaacctccacgtccggtgatgggacccgggggaaaacctggtcctaaatcatattatttttttaaattttttttttttaaagtttttttcattaatttttttttctaaaagtttttcccagatggggaattggtaanttttttttttttaantttatttaaactgcct

SEQ ID NO: 2392 - DNA, 1679 bp, Heterodera glycines
tgctgatgatattttttaattttctttactttttattcaatatatgcaagttttaacatagaattaattaacaatgatttgtgtattaatttcagaaaattttctgatgggcctgcatggtaaagagagcaccctatatctgatcgattttgggctcgcgcgccgatatcggtctgccattttggcgttcactgatcattaaaattaaaacacaagggcgtagctaatttgtaagggggcgggggcggtaggaccacaaattttgctttctgaactcaattaacaatttttgtaggttcaaaagcgcttgaaaaattctattaacttgctaattaggtaattcattttcgttcatctataaaaaaagtcgggaccaaaatgatttttttctggccatagcattttagtaccgtattcatttttttttttgaaatttaattaaaacccgaaaaagcgctaatttgcagattttcaagaattttcctgggttttttcttagaatttttcttcattcaaatgccaattttattttttatgccaaggatgagtgccttggctgtggctacccccttgaataaataaaaacatttacatacacatttttggggtctgtatcgttttggcgccgccgttttggcgccagcccaagttttcggactataacttttttatttgttaaccaaatccaataatcttggtattattcgaaagcttaacatgtttagaagatatttctaagctattgcttcgcgattagacaattaccaaaaaagttataacatgaaattgcaaaaaagtcgaaaattttgaggttttttcctaataacttttttagaagctaaaatttttgtttgttttttgtaaggctaatagagcttgtgaagggctttcgaatgataccaagattgttagatttggtcaacaatgaaaaaagttgtagtccaaaacttgggctggcaccgaaacgtcctgttccgcgttaaaagccccccccccttagttggccaattgtccttgcaggtgtccttagttggccaattgtcctttcccttgtccttagttggccaattgtccttgcccttgtccttagttggccaattgtccttgctcgtgtccttagttggccaattgtccttgctggtgtccttagttggccaattgtccttgctggtgtccttagttggccaattgtccttgctggtgtccttagttggccaattgtccttgctggtgtccttagttggccaattgtccttgctggtgtccttagttggccaattgtccttgctggtgtccttagttggccaattgtccttgctggtgtccttagttggccaattgtccttgctggtgtccttagttggccaattgtccttgctggtgtccttagttggccaattgtccttgctggtgtccttagttggccaattgtccttgctggtgtccttagttggccaattgtccttgctggtgtccttagttggccaattgtccttgctggtgtccttagttggccaattgtccttgctggtgtccttagttggccaattgtccttgctggtgtccttagttggccaattgtccttgctggtgtccttagttggccaattgtccttgctggtgtccttagttggccaattaacgggctggtgtccttagtggccaattgtccttgtggt

SEQ ID NO: 2393 - DNA, 5436 bp, Heterodera glycines
ctttttaactctccggattgttatttatatgtctccccattaagatacgttctttgggtgaactgaacttggtcgaacgcgttgtccttcaccaatggcccgagtctttgcgagtcgaattggtaagcgaagaaagaggcataaaagtggagcctcgagagtcacaagtctctctcttttcgatttgactccgagagaataaatttcttgaaccaaattaacccaatattgaattaaattaggactgtaattgccaaatggcagaaaaaggaatttaatttgccagtttattaaattaaattttgatttaggattatttgcgtcgaaaattgtcatggacagagagggaggcatgcgaacagatccgcaaacagcttgttcttgacccagcaacaaaacggggaggcgagaaagacaatcggaggaggaggagaaaatgatcagtaaattgatcagcctcaattaaatgtgattcactcgatgatcacctcgacctctgttgttgatcgaagaatcgcattagggaaagcaattaacgggtggatggaggcgggggtttgtattttataaaaaatttccttgtccaaaattttttgaaatggaaaataaataatgaatagaaattttagttttacaatttttgaatttaatgttaaaaaaattttttgttgtttactgattcaaaaggagggcttccaactgaaaatggaaacaaaaaaattccaaataaaaaattttttatggcgcaactttttccaagaattttttgggaacagagggccggtaggcaccgccaggaaaattttcaaaatttgagtttattttgttaacagattttcacgtaaaatgaacaatttttcgattttgagcatttttaatttaaaaaaaaataagcggggtccggcaagaaatacacttttgttttgttttagtagttgatgaaaaatcacagaaaaatcaatgatatgtaaatccgagctcagattcgtggttcaacgcatttttttaccccagaaaaggtgcttcttaaattattatatttattttctcagaaaccacaaaactttaccattgccaaaattggaaaacactagtgatccaaatagggtgaaatggcgccattaattatgaattattaaaatcttaactaaattggaagaaagaacatcaaaaatattattcctcatgagaaagttgacaagtaaatattaatctgactatttaattttggcaaaatgttttgccaaaaattcaaaaaattccaattcttaccagtgcatttttactcccgttttttgggtaaaatttccaggagcgggatcgggagttcaaaattttccgggacgggagtcccgaacgggaatcccgtaaaaatcccgatcccgtaaaaaatcccgttcacctaaaaaagcgggagtcgggagcgggaatcccgtaaaatcccgcgggagtcccgatcccgccggactctaatttttattttttcaaaccaaatttgtaaaagttaaataacaaataaaaagagaccatttattcagagaaattgtaacaatggtaaatagtgaagataaaagacatgacgcacaaataaatggtgaaatggtggatgccaagaatagcataagaaacatagataacggatgaagcaagaaagaaaaatgtccctggggaaagcgtcaacaaaaccaaaagacgaaggacttggaaaaaattttaataccacgaagaacagaaatcggtgtggccgtacacccgtaaccaatggcagaagacgcaccacttcggcacggggaagcagtctcgcggcctacatgccgttgagaagcacctgggctccgctttcctccaaagttgtgaagaaaaaaaggcacccgtcgagggcagccaaaagtgcgacttaatagcgaagaattcgtcagtgtcttttccaaaaataaaggtgaagacggggtgaagataaatggaaaattgggccccttctatgtttcaagtcgttgtattggataaacaaaaacaccttttgtttgtttatgactgtattaaaaattaatttaatgatttcccttccgttcgtgcttgcgttcgaattgatccccgaacgacatgttcgttgtggatttacgctcatagtaaagcatgcacccgatggtttggctgactttttcggatactccacgagggtgtacgttggactaacagaaaacgaacaataaatttccagaaagctgctcgcgttcgcattgatccccgaacgacatgatcgtcgtggatttgcgtgggaactttcaagcatatacaaagtactatttcataaaaattattaattgtttttaaagttcatggcgttgctgcgcatgttccacgttttttttataaaggaaacacattaaatcaagaaagatacagtgaaaactataatttatgctagcaaaaaattaaactcacaataataataataataataatgaccatatagagaacttcaaaaaacactgcacattttttataaaaaattgttttttgtgtctaagcaaatgcgtttaatagaatgctttaatatcggcgtaacatttccatatatttctgaaggtgcgttaaataaccgttgatatccgaaacattttggctcatgaagaagaagaattatttttaatacatataaaacaatcgctttaaataattttttcttttaaagattttatttaaaattgccgcggagtcccagattgcagcggatcgcggccacagatcacggtcgcgctccacccctgatctgcgcgaatagtgacataattttaagcaaaaaattgagcaaaaataatttgttatattacttgcatttcgcattacaaaaaattaaaaaacaaataataaaatgtctctcgtcatttaagagaaatttatcatttaattcacttgaaatttaattccaatttatgattattattgttattatctgtcggcaatacaatcatcttgttggccttcggtaaacacaaaataataaaaaatcaaaaacagtgaaaaactgagcgggtagaagacgcgacaactgaaaaacaatgaaattattttaaaaaattaacaaaattattccacagtcagtggtttcatttttaaattctggcatatttaaaattcctggtagaaatgaagaaaaaatgtttattaatattagcctaaaaaatttcaaaacgtttcaatataaaacttatggcaataaagtgcgaaaatttagttgtcgattttttcggactcatttcgtgccgaaatgacctcttggccatgagagagtgagggtatattcataattgggcttaatttgaaaaaaaagattgaccactattggatgtttcccataatactctttgcatgagtcggcccacccaccaattgtccaggtaccgtcccagcttgtggtaacgtgccgcccggtcggccatcgcgtcgcgtgcctctcggctcagctccgccttgccaatgcgcttcttcgtcgcccacttgcgcaactgattggcccgcttgtccagcccgatcaccaccagcgtttgtaacagtgtaaggaacacaaagcctgtgatgtagccgaaccacaggtcgatggccttcagataggacacgctgggcaaatgctcgcgtgcgccggccgactcggtggacagagtcagcagaacctttgtttgtttgttttttgaaattatggcatttaaatggtgaagttaaaactaatgttctaaataaatgtaaatccgtatttttttcctgactatggaagctgaaacgttcaaaaaaatatatgtttttagctttgtttgaaccttctaggatggagttctaaattcatattttcccattggcattattcccatattttagtattttaagaccggaaaattcctcaaaaagcaaattttaggaaattatttcgagaatattaaaaaaaatatatgacttactataaaataagaatttatactaagaataaattaaaaatgaaaattgttcgattttttacttaattttcttgctaaattaataatttagctttattacaattttttcttttaaaataatttctaatactaatttagccgttttgaaaattttaagtttaatgaatctgaagaaattttgagaaattgttgccattttattgccatatttagcgatttttggtccgtattttatgtccatattcgctattatatactatggagattaatgatagtgagctaaggttgttcaataaaacaaaataaaaaaaggcttttatccagagctgcgatatctgagtatttttactcattttgtggttttttagagggtcaaaaaggatttttttgaaaaatgaggatttgcgtatttttgtggtcttttgacaaaaaagtgacaaaaatgcatgattttttgaaaaattaggtatatttggcaaaatgttcgaactttttcttcaaatcttaaacattttttcgaaaaatcctcagtcaaaatcattttttttgacaaaatttttaacaaatcgcactcaaaattccaaattttttccggcagcgcctatcggcactgccggaccgaccccctcccccaatgttcccaaaaagttttttggaaaaccacgtcacaaaaagagcaatttaaaagcaaaaaatttaagagatgcacagtgaaagcattggccgaagtgaagtgcaacttcgatttttcgagctcagacttccataaaatgcttataatagggtttgtaattatatggaaattcatatttttttcctgtactgttggaggcctgaaacgcatgaaaaacatgtttttagcttggtttgaagcctctatgaaggagttctatatccatattttccatatcgcaattttatgatgttttaaaaaatgagtatttttcattccaaatgaggattttttgaggtattttagtggcaaatgaggattttttatggctgaaatgtggattttcaaaattttgagatcgcagctctgggatagagtgagtgagaaagggagaaaatacagagagtgagtgagtgagagagaaagaaagaaaaatatggatgagagaagaagaccgagaataggagagaagaaaattgaagccacgatggaaagaagttattttttaaaaaaatttttacatcattttaaaaattaaaatagagcggttggcgcccaaccgctcgttttttaatattttgcaggcaaatgggcttgaacctctgagccgcaaacacaaattttaaccaactgacaaattagcattgtttgaaaaaaaaatttatctccctctccccaataattttacggatatgcaaatccacccaattcagatatttatcttgtgtgtataattaaaaaataaaaaagtttagtaaaagaattttttttaatctgtgtactttaaaatgggatagaccctgccaggcc

SEQ ID NO: 2394 - DNA, 1658 bp, Heterodera glycines
ttttcaaaatttttagattgcagctttctttttatcagtgatcattgtatttttttatgaatgcctctcttgacgtaatgagtcattttgtctaattctggtcttggttcatactgtaataatatttgaaatagtaagcctctggtaaatcttaccgtaatcgctaccccgatgcgcccttccataaattcttcgggtagccaaacgccgacctttagaaaaatttaaaacctgtaatttaaaattaaatgccacacaaacccatgaaaacattagagccaatgaggtggggatgtaagtttgggcaatgtgaaagccgacgtcacgcttcagacggaacacggcacgaagacaggcgaattcgccactctttctggaccgattgcactaattaaatatgggacaaatcagttaattaacgacaattaaattaattgagtagtagatttaaattttgtctatgtatgacttacttttgccggctcgtactggtcaatgtacagctcgggaagtcgcacgtccgggtttttatcaattgcgtccagtcgattcgtgaaccattcaaagcgtaccgtttcagcggcataagcaacttgaataacaacatttagtccacccgagactgatcaaaagtgattagaaaagctaaggttggcaataatcgagactgattggaattgactgtgatcttgggactgattgaaaaagattgacacccgtctagactgatcaggagtgatcagagttttgctaaaattggcattggtcgagaatgagtggaataggggggacaagatcttagcattgttggaaaattattcaaaccctgtcggaactggtcagaatttagaaaatttcaattacaagattttatctgcagctcgcacgtctgcttgtcatgtgggtacttgcatagcaccaaattgcaggccggcttcaatttgatgcgcgtttcgtacaaaattagtccgtcactgaaccattatccattttttaaattcattttacttatttaataatgtttaacagcctttttttttgattgctattttgattttaattttagaaataaatatatctttctgattgtaataatgccaactgctgtaactgacggacctgtagatgcgcatcaggaagttcaggaaggtgacctcgtgaaattcggcctccttcgcgtcaaaaaatgggtcagggcgccaaatcttctccagaatgtcctcctccttgaccagcaccggcttgccaaagttgttcaccagccgcgggtcacgccagcccatgatcaaatagatgtccatgtcgtagtcctgattaattagtagtctcgtgactctcggtctcattatctcagtcttgagtctggggataaatgtcagcaatgacttttccttctctcgggtgttggaacaaattatggccaattctcgagctaattctttcagagtcaggattatttgtcggtctcgaatttcgtcgaggcccaaaacttcagttttgagtttaagtctcgagtggccacgagtaattttcgttccctgacaaagaaccaattcttttctctagtctcgaggtctaacaagaagcccagcttagttacaaaaattcgggatttgggtttaagtgtgagtccaatgtaaaatcatagcagaattaat

SEQ ID NO: 2395 - DNA, 1884 bp, Heterodera glycines
gatttgattcatcaaattcgtttgatatttcattcttgtccatatcactaaataggcaaatgaaacaaatttttttttacaaatttttatttagttaatccgattttctttgattagaccaactcatttatgcttaataaagaaggaaaatcgcgaagtttattaaatggattccaatagttgctcatttaattttatactagaaataaatttaaaattaaaaaaataattttaaaaataaaatatttcatatttttgcttgcctcgttgtgctgctgattttggatggcggaatctgttctgttactgctttatcccctactccatcatccgcttttcgttccttttcctcatcttcatcctgttcttccttcgctttgccgaccgaattgtccatgcccggcttcgcctcaaagtcccaagtgcgcaagccgggccgccgttttgcggagacacaatgtgccaacaatgcgaaagtgagacagagtgtcaacaaaaaatgtgccattttaaactgtgccaaaagccaaaaggatgacgatatcactttctttaggcttggaaccccgattctgagattgaaaacaactcgctccgattctgacatttatgatactcgaaaaactcaaagtccgattgatacaaaaatgaaatggtcgtcgaattttttttttttgttgaataaatttataaaatacactaattgtttcagaaaagtgcacaaaattgtgtgacaaaatgacggctgatcagtcaaatgtaatcattcagtaaattgttttggtacaatcactgcgcaaaataaatcaattagcaaaagggaaaaaccaatgcagcgtaaagggcaccacacaatcagcgccaaaacggaaaactccctcccgccaattcagtcccaaataactctgttccatttgaatggggacttccatatacatatataaaatgcaacggggtaaaaaatacagggccaaaattttaaattttgtttttcccataaatgttttagttagagtttaaggacaaaataaattttgaagaatataaaacgaaattgtttctttcccaagactcagtccgagattcgagatagagtcaaacaaatcacagatttttctcgagccaagagttttccaaaatttttattatgcaattaatttggtaaaaataaattataagtaaaaagtcattttttgatgctttccctaacaaattttgttttttttaaacaagcctatggcgcggagaatacttttgctcagctatgaagatgtagaagattagtcggatgaaacatgaaggaaggggataagagatgtaagcggtaagaatttaccaaatacatttttattgaggaagtcgataattgacggttcatattaggtgacctttgtattttaccgggccatcaacgcaattaaggcagagcttcgatcagaaatctttaaaaataagaacatcggcctgaaaaaaaatataagattttggggtcaaaaagactagaatattttgcaaacaatttcaaatcagttatttttataatttacctattcgatcaaaatgatgccttttttggcgttttttacgaaaaattccattaaaaatgcaataaattcgggaaaatacacccctaagaaatgacccaaaaaatttgagaaaatatatccctaagaattggatttttcctcaaaaattgatcgccaaaatttattatttttttcttgataaaaaattttaggtttaaaaattttccttattcgaaaaaattattaaatattaataatcatttaaatgaccaacattaagttttttgatttagttttacgtattttgatctcaaaaatccttaataaaaaatttaaatgcctattttaatgccttttt

SEQ ID NO: 2396 - DNA, 3237 bp, Heterodera glycines
  unsure (1)..(3237): unsure at all n locations
tattttatgactataattctaaaaaatgaaaaaaatactctgaagaaaatcaaagacttgacaaaaaaatcaaagattagatgatgtcatatgacaattatgatatcatattcgtgatcagcggcctcgataaccctcgaatagaacgaataatcgtaaaaggccgtctttttatttcctttttttatgggaccagtaaaagtcagtattaccgtaacgtcaacggttttctgatggttcggagtaactgggaaacgccaatttttaatgttcagagtgactggtaaacgacaattttaattttaattgaacgatttttcaaaaaaatttacccaatcaaaagtgccatattgagaaaagcataattgtcattaaatgattcggtggaaaaaatttcgtggggcattttcttggtcttcaacgtctgtccgcccgatcagttgccaccagcttcgcccgcctcaccaccagcctcctgctcatcgccagccgtgtcggatgtccaaagcgtcaagttgtcacgcaacagttgcatgatcagagtggagtccttgtacgagtcctcgttgagcgtgtccagctcagcaatcgcatcatcgaacgcctgacaaaaaaatgaaaaacgtaacgaaaatattctttttttgggggaatttattaatattccaaataatttgaacaaatacgttgtacctaacatgaaccaatgacccaaaaatcaaccgatccaacaaattaaggttttaattaaacccattgatttttttcttttgccaatcgatgcaaaaagttgatgcttcccaacctgtttggcgagttggcacgccttgtccggtgagttcagaatttcatagtagaacacagagaagttcagcgccagaccaagacgaatgggatgggtgggctgcattttgtccttggcaatgtcaaacgcttcctggtacgactgctgcgacttctcgacaacagctaaaaaaaatttgtaacttaaaatgcgataaagcaattcgacacacgcacccgtttcggtcgtcaccggtggcaacctcagccaggtangcggtagtagtcacccttcatcttcaggtagaacacctttngattccgggttgccagcccttcgggatcagatatttgtcgagcaaatccttgaaaatttggtgaatttaccatccaagtttcttataaaattttcgacacaccagcacgtcgtgacagatctctcgcaactcctgctccaccttctcccgatactccttggccatctgctgcttcttctccgagccctcagtcttctgttcaatggacgagataacgcgccacgaggaacgacgcgcaccgaccacatttttgtatgcaaccgacaacaggttgcgctcctcattactcaactccgcacccaattccgtcaccttcaaaatgcgaaccaaaaaattatagaaattccttagttttctttcccccacctttttcatcgactgagccatgtcatcgtagcgctcagcttgctcagccaacttagcccgctgaacgagttcttctttgttgtcagacatttttcgaaaaattaaataggtctagacgattttcaaaagataaaatttcaattctcctgaaagttcaaatctgattgactcctttaaatgcaaacgtaacaatctaatttatatatttaagcacacagcgagcaatgggaatttttattgggaaatagccctgagtcttgacgagggtcgtgagaaagtgggcctaaagttgcgcgagatttgtcacaacgtgctacatgttttttcgttccttttcattcagtttgaggaaagtgaacgatgggggagagcagaaggaagagtgggggcggggggggaaataaaatgaggggcagaggcggccgaagagttttctctttctttgctttcccacctccaaatagagagaaagagagatagagagagagagaaaggaaaagagagacagtgggaaaataaggggaagaaagtggagggcccgtctcgcgatggaaaaaacgctcagcatttgttacgcatgaagggcgaatatgagaaacgcaccaattccgagggatggaccgatgggtggggcgatgcttaaatcgagggaccgattttcaatgcattttgtgctaggaaaagagacaggggaaaaagagaaaaaggaaatttgtagtgaaagagaaaaaggcagaaataaatagtggataacgcacgaattccggggatagacacgagcaacgcacaaagaagcccattttgaaagtgggcaagggaccgttaaacattgacaacgacagaaagtgcgagagatgaatgagtcagcggtggaagaaaatgcgaaaatgcaatgagacgcaccaattccagggatgggtgagcagtggaacgaaatagcgttaattttttggagagtctgtggcggaacaaagtgcaccgatttattggaggtgagagaaaaacagggaatgtctcgcattgccaaacatgaaaggaagaaaagagcacagagaaagaggacgtttgtgtaagcaagaagacgcacgaattcccggggagagcgtcgagattggcacacagcagaagcaagcccttcgagcagcggaagtcgtttatgctatgcttatttgcggtaacgaaggcgagaatgttcaactaggggccgtctctcatttaacaccagtgacaagtgtaagattgtcattctaacaacaatgtaggtacagtatgtataaaatggcttttttggcgccataaaatttttttaatttgtgactatctaatagggttgagcggtaccggtaccggtactggccggtaattaccggtttttttggtaccggtaccggtaccggttttttcaaaaatgaaattaccgttaccggtttgtctagtaccggtaccgccggtaaaaatttgcactggtaagaatgggggtctggtcgagaaaagagtaggaaattggtgaagaaggagaaatttttgagaaaaaatttaattttatttcatttagtcatggaatattcctcacattttctttaccattattttaattaaaatttaaattttaaaaaatattccaacttttttctttcatgttaagcatcctaaaaacccaaaacttaatcaattggtcattttttttacaaattctgttaacaaatcgcattaaaaattacaaaatttttcccggcggcgcctatcggaaaggccggccctcctttccccc

SEQ ID NO: 2397 - DNA, 2500 bp, Heterodera glycines
  unsure (1)..(2500): unsure at all n locations
attttggaccaaaatataaagttaaattaggcaccacaattctgccacattgctagcaattgtattaacatggttctttaaagaaaaatggcttataattatccataaagaaagacaactaaaaaattttctgaaaaattttgggagatttttcaactctggcgcaaaaaaagccattatttatataggcgccaaaaatggcccgcgtcaaaaaccctcgcgccaaaaaacccgcgccaatgacagggcaaagcagtatttttaaatttaatgaaatttatttccatatacatacatactgtacataattagtaattacaagctctagttatggcctatgttaagaaacgcgattgaaagcgcttaaaaataagctaacgagcgcatgaattcctcggtgtgcggacatctcgcctactgtcattttgtgtaatgacatttccaaaatcggacgtttcgcctactaacctaaaatcggacgttttgcctactaaccaaaaagcggacgttttgcctactaagccgattcggacatttcgcccacttaaccaaaaacatcatcaaaaaaatcattgatatgtatagggcaccgaactggctgcgccgaaaaaacccgcgccgaatggcccgtcgaactgggcgattcccgttttcgatcattttcccttgaaatacggtagaaatcagtcatttttgagttgtccaacttctcaccctctcttgctctctgggtataagtcatagacccaccacccaanaaggcaattcggtagagaattttgtgctctttccaatgggtttatttattttctctaaaagaattttcccaacctcctaagaatttttttcgaaaattttcctgatttttagtgtattttagggtaactctttccctatgcaggagtgatcactgatcagataagttggtgtaaaagacttttttgaaagtttagtccgtagtccggggcccaaaacatgataaaaatttgaaagactcgaaacttttttcatatgagttaaattgcttagcattcgcttagagaaagattctcttttcaaaacttttcgaatgatatcaatattcgatttacttggtgggaatgaagtgaattatggctgatctaaataaacaatacaataaatggcaatgatcagtgtaaattttgaaatagcgcacaaaattacgaaaattggcgttatgtatttattcattttgtctattttaattttctgttcctgacaaatgagccttgagcttttgaaatttttgagtttgggtaattttggcaaacaatgctaacccttctgttggccatttgtctttctttgggcccatttttggcctatttgtccattgcacttttctctcaccgttttttgatcgtcgatcgttctcgcaatcggccaatttgcacttcgcccggctgtgtccgatgtaatcggaatgcaaatgtgagttttttggctctattgcgctttaggcattcaatcaatgattgtttttaggccatcttggaatattcgaaaaaaagagaatttaatgtttctcattgtaattttttaaaggggtttttagtttacctaatttattttctaatttctaatttaactttatttttagtttctaatttaatttaaaagtttttccccaggaactcgcttccgccatggaccgctttcaaaaggctcgtttcgccgcccgcgcgcaattcgcacgcgttcggagtgcgctcgagcgcgcgcgttgcgcgtcggtcgacgacgcgcacgaacttttctttcgcatgaaatttgagggtgtgcaacgacccgtttggacgcgttcgcaactgccgatggcttttgtcgcaaaaatggaattatttgaacgccaacacgcggccattgcgaaggaatgcgaaagggtcggcatttggcaagccattttcaatggaaattaaaaatagacttgaaattggcgcctatcgaaaccaccagacgccctatgtttagggttttcaattattgaacaataaactcaaaaaaataactacaacataaatttatcatccaacttttatataattttttcctcatggcgcctctttgcaatgtcgaaccacatcactagctactccgattttttgaaatttttcggatcgttgttttgtttggcaatagttgttcccaagtttttgtttttttttagttcaaacattgataaaattcagattttcacccaaattcaaaattaaaaaaaaatcatttttcttaatccattttccgcatttttcatttttgcccgttaaggcacttgaccaatgcccttatttgtgggcccggaacgaggaaagggcgcccgcactgcacacggacaatggcgcggccttctccgcttggttcgtttttccgctgatcaaccagggcgactggcaggaaaaacagtgtcgcgagtgcccgcgcatcaccgcattactccagaaagttggccaccgacgacggcgtcgttggacaaccgacg

SEQ ID NO: 2398 - DNA, 2459 bp, Heterodera glycines
  unsure (1)..(2459): unsure at all n locations
accaaaaaaaaaaagtgagacaattnagaaacccattgaaaattactcaattttatatgggtgatagggagaggaaattggactgattttttcaaaactgcaacaatactttcccaacccaaatttgttttcaaaaatcacatcgttcttgctgtgattaaataaattacccaattttccaaatttgcccttcagtttctgctgtgtctgactgttcctctgcttctctgctcactgactgtctgttcggcaatgttttcatttctctgctgcccgctggcgccacaattgcggagcaccgcgggctgaccaacgcgcggctgcgcgttcacttcggcgtacgcgtgcccgagggcaaatcggccgagcactgctcaatgaccgtcgggggagaggtgagggacaaggggacgggacaaatctttccgggacaaaaaccgccaaaatttttttttaattttcaaattagagattcttcaagaaaaaaatcttggaaagtttttttagcgttttttcgagatttatgataaattactaatttttttcttgaaatttcttataaaaaaatttcataaatttatttataaaaaattttcataaaataaaataattttttttaatttaaaatcacttaaattttgtttaaaaatgcctttgtccctttcagaagttccattggtccaatggctccgctattgtcatcgacgattcatttccgtaattcttaccattttacttattaatccgttcgttttgccctccttcaggcattcggtcaattcccgtgcctgttccgaggatcggctggtgctcgttctcgacttttggcatcccaatttgcggccccaagaaaggcattgcctccagcgcattttccctccgatttacgtctcatagaattaatttgataatttctttatgcacattttatgcccagagatattcacttttttatttgttgtttatttatctttaagcaatttgaattaaaaattttctaagaaaggaaaatgaccgactgaattatggcaaaaaataagaattgtaaaatacgagatcaaattcatgatcagcacttttccccaaatttgcgcctatgtccaaaatcagattcaaaattaagttttttcagtctcagatagcctaaacagattaattgatagaaagtgattgtgtctgatagtttgattgttagtaaatttttgagaaaagtcattaattattcaaacagaagaattaatacccctaataaacaagaagactgcgttttcttaattctaatgctgtttaggctatcagagattgaacaaattgaaattgaatccgattttggacatatgcgcaaatgtttgggcacgctttttctaccttaaaagacacggcttaggaaatttctatctttatttatttttcagcgggaccacaattcttaacaattacacaattgccattgtttgggcatcagattatcagtccatcacaagtaattagaactatggcatctcgaaaacacaggggtttaattgaaaatgcggaatatttatgaaaatttagaaaatattaatgacaaaatattttttagagaaactcaaatgcccaaatgaggccccaaaatggtcactgacaaatgaattacccttccaaccgttgcatttgccccttcaaattttttgcactaattaatttatttttgaaaccgaaccaaaacggagatcactactgcccaattttcatgtgactgattattatgagtcgagtggcgagtgatctttggttggatcgccgcctcacaaacaaacaaatttttcgaattttaccatatccaatcactttgcaaggccaaagaattagcaattgtgaaggattcaaatgtttattacaacaaagcaaacaaaaaaaagtgatggaaatgggaaaaaggcaaaagagagaatgagagaatgactgtttaaaaggcgccaaaaatggacaaattgtcagccaatcacacccaattacattgcctattagttaataattgtccatcaattaacccaccgatgccttcccccatccgccttttcactcttttctctcttttcctgtttctgcttcttctcctcccatttttgtccttcgccgctttgtccccccgagagaagcgccaattcagcttcaccgatggcttctcaagtggcacaattttgcagccgggcggcggcggacttttgagttggtggcggagatgagccaacggcggaagtgaagcaaaacaatgggaaagattttgggttgtgatttgatttatgacgaatgaatgacccaccgataaaccgacttaccagaccataattcattcattcattcattcattcattatgccgtgccaatatcccccacccatcctttttttgtaaataaaaaatttaattaatttctaatgttttttaagagaagtttttttaaatttatttatcgaa

SEQ ID NO: 2399 - DNA, 4004 bp, Heterodera glycines
atcaattaaccctccgatgcgtcccccatccgccttttcactctttctttcttttcctgtttctgcttcttctctcccattttttgtccttcgctgctttgtccccccgagagaagcgccaattcagcttcaccgatggcttctcaagcggcacaattttgcagccggcgggcggcggacttttgagttggtggcggagatgagccaacggcggaagtgaagcaaaacaatgggaaagattttgggttgtgatttgatttatgacgaatgaatgactcaccgatcaaccgacttaccagaccataattcattcattcattatgccgtgccaatatcccccacccatcctttttttgtaaataaaaaatttaattaatttctaatgttttttaagagagtttttttaaatttatttatcgaacaaaccacaaggtgcttgctatgcactctaacagtggcgtaaaaacaaaataaaatgaaaatcaaataaaaacataaatggtagtcaaaaatcacaaaaatacgtgtcaaatcacaaaataaatgtcaaattaaacaaacaatagatataaatcaaacaagtcacaactctcaatagggaaaatatgcattatttcttaattattccttttgctatttctcggaatttttgggggtcattatttccataatatttttcggtaataaattccatgaattaataaccctattaaaaaaaattattttttgtttttgtaatatatatcctattttgtaataaaaaaggtttgcgaatagcaacagcaaaaaaatgagatgtttaaggtgtgtatgttttttttaagattttaaaagttgttgtaatatcattaattttgctcctaatttccaatgtcttaattccgcaaatgtttaaccgttcttcgtacggcatgggaacaagcccacattttttgaaggcttttcttttaaaaagtttttaactgcttcaattttgcggaccttttcttttttaatggattccaaatctctgtggcgtattctaactgtggtctgatatagtttttatatgccgaaattaatgtttcaagcttccgagtttataacgctcggagaatgttgggtttgtgtttaatatgaaaaccttggcttaattacaattaatttattcccaaataagcatatgaaatgagaatataccactaattgggttttgcatcgtaattattccattattattttttgctaattaccctaatgataatgatgcgtttctttgctttcgactctttcactcattcattcggtcgcaaatcgcatacgcagcacatcaaaaggaaacacaaagcagcgacgccgaaggcggcgcccggcgcccaactggcgacgggaaaaagctccattagatccaaaaggccaacgacgaggctaatgacagagcaaagataaagcagcacacagccgaggcgaggattgcgtcggcgctttcttcgcccgtacgctttaaaagcgatggaatgggcagtgccaacggacgaatcgaaggaaaaagcgatggcattggctaaaaacaaaaagacttagcaagtgatctgacagaatcagtggatacatcggagtaaaaacagtgccatgaatgtttcggcatttcttatttacctttaattgcttcgaaaaaagctttgatcttctcaataacttttccaatatgattttccatattctctttttttgtgccttcgattttgctaattgcagcaaaatcacataacttttcgtaaattttcggctcaatttccaaaatctcatccaattttagcgagggttcgccaatatttcccatcattaggccaatgctttttccattttccatttctcggcaaaatttctttttaatttttgaaattttctctgccttttcttcgtccaaaattccatttccattgtcattttggcagcataaaatgccaaaaacattcatttcgaaccattgcatttgttcaaaagctgagagtccatttttcgtttcacaatttgcccctttttcataagcaatcggtggtgccgaggcacgcaatttctgtgccatttggaaaaagtcttaaaattctgatttgttttttaattttataaatttttctaataccattttgacactttgtttccgaattattttgctcgcttaaattaaaaaataacagaaaaagcgtaaattgtgacaaaatctgcagcattactctgaatatgtattagttaattaagtgattaaaattggatatatttacaaattaatattttaatgttatgtgacatgagaaaagtcactacaaatatgaaaagaaacaatttaattattcatttgggtttacactgatttttgaatatacttaattctgttttaatgcataaaaataataaaatttgttaccaaaatatatatatatatatatattgcattatcgtgcttattattttcattattttaaggaagtaaacgctaatgtattgattcaaaaatggcaagatggcattttaggccagcaattcgaaaagtgccacctaaaaaacagaaaaaatcagctggattagacatgaaaaggaaaattattcaaatagcaaaaaaaaaaagtaaattttaagggaaaggaaatttgacaatttttaaaatttaattgcctttggaaaaaaaagaaataattgccaattgaatttaatgggtggtttttaggggtaatgaacctgtggcttcatctgaaaatgcttgattaattttctctgtatagattttgctaaatctaacaattttgaggatttttttttgtgtgacacctgataatgagtcgaatttggttctatttttggttattgaacttggtttggtttgcggttgttaattaatttgctttccaattaatgggtcattaaaatttgcagcagccaattgaacatttatttgttcatcactttttacagttaactttcagtgatcagaccgaacaaagtcattatcatttgatttcttaattgactgatcttcggttggatcgccgccccttttgggtcggtcggtcgctgctgcgcaatgacaatttctcaccattaattacacttttaattgcactacctttctgcgcaactttaaaagtcatcaaattaatatcaaaaaaatagctgaagtttaatttttgcaaaattaattcatcgatggataaaaaataacaaagcaaacaaaaaaaagtgatggaaatgggaaaaaggcaaaagagggaatgagagaatgactgtttaaaaggcgccaaaaatggacaaattgtcagccaatcacacccaattaccattgcctaattagttaataattgtccatcaattaacccgccgatgccttcccccatccgccttttcactcttttctctcttttcctgtttctgcttcttctcctcccatttttgtccttcgccgctttgtccccccgagagaagcgccaattcagcttcaccgatggcttctcaagtggcacaattttgcagccgggcggcggcggacttttgagttggtggcggagatgagccaacggcggaagtgaagcaaaacaatgggaaagattttgggttgtgatttgatttatgacgaatgaatgacccaccgataaaccgacttaccagaccataattcattcattcattcattcattcattcattatgcccccgctccttttattgtaaataaaataaattcagaagcgatcggccttaacgtctctagcagactttgggctcaattttactaatttttaagttcgactcgattaaaccaagcaaatgtctttgctcgtggttcagactcttcggtagcttcgcctgattctcggtttttcttctacactttctttaccgtattctcttgcaaattcttcacattttctgcaactttttgattagtgatcatcagatgatgtatttgttgatttgtcctttttttctaattatcacttcctttaaattcctctttcgttttcgttgtgtt

SEQ ID NO: 2400 - DNA, 1846 bp, Heterodera glycines
  unsure (1)..(1846): unsure at all n locations
ttttccttttttttggccttccccgggttttttaaaaaaaaaaaaaaaatggtgttggtttctttttccaatgggaacctttttccccaagaattccctggcgccggtgtgcccatgcgaatgtcccaccgaagaaacgtctgaaacgcctccttcgacgggtggggaagggggcactgacgacatcggtccggcccgacccgttcaaaaatcaaaaatattgcttacaattagtgtgcttttaacggcggcctcccttttttagtgacctcgccggaaggagaggagacgaccacgcccgtctccggttgtgtccggggcccgccgggncctccgggccccaccgggcnccagcggggccaaaggggccccagggaaaatgcggcgacaatgcgagcaaacgcaaaagggaagcagcagcagtgccgaaggagtttatggtaaaagatggaaaaacttggcaaatgaatgccatcggtgattggaaaatcaaattaatagtactaaaagatactaattatcttattccgaatcattgttcaaaccttttaatcttaagacgaatttggaaccgaatgtgccagtcaaacgtgcaaaagaaggagaagccgttgcaaagacgcattttgcacgtggccatgtcaaggggggctgtccaccgggtcccccgggggagcctggcactcccgggcctccgggccctcccggagacccggcgccatgcccgaagcacatgaaaagcgaagcgcaaagcgtcgatggcaaacaactggctaacagaaacaaacgtggggagacggtgctgaatgctgcaaaggaggggaccgaagtgaaacgccaaattgtgcgccatgggttcgtttttgggcaaatcgccgtgggcgaaacagtgccgaaagtgcaaaattgagaccattgttttgtatttggcaacactattttcaaactcattgatgagttaattaatcggtcgggttgaggggtacctaacaaaaatattggaatttaagcattggaccgcccggccccgccggaccgccgggagaagcgggcgaagacggagagccgggcccttgcgaatgttacaaagaccaaaaaagtcaatgaacgaacgcaatttatgcgaatagcacacgaaataaaactagcaaatttaatgttttttaaatttattttggtgaaaaaattttttattgctttaaatctgactaacttgaattttgactgcattataaatgaatcaatttcttatttggactcccgccggatattgaaaatgatcgtttcatttccaaagtttagattgcttcattaatgaaataattaattatttaaagggccattacggactggccccgttccaaaaattatttttcatagaggtcccaaacccatgaggggtgggtgtgcccagcaaggagaaggcaagaagaaaataattattactatttggaatggggagtagacaaggctagagttacacgaatggtactttagctctctctttccctctcatttctctggaatcctactctatgtgtactctctctcccaccctttccctctcgtttctcttttcccctacccaaactcactcttcccaaatttaggcagaacattttgtgctctttctaatgtttttttttgttaataaaaaaatgtgttgaaaggtgccgggaagggaaaatcaccaaaatattccttaatttagtacactaatgtttgaaatataaaataaaagtggccgagtgtatttgaattcgggtaatggaacggattattttgggcgtgccattggtaaaagaaaatgccctcgagggattgaagccaatgggaaaagggggaa

SEQ ID NO: 2401 - DNA, 3679 bp, Heterodera glycines
tcctttttcctaccccgattcgatgtctgggtggaatcatgaaagtagagtcaaggaatttcaaatcttttttgacatattttaacttaggaatgttttttttaatttcaggggcttttcaatttcatatattacgaatatgacatccgtttttaccgataacgaaaaaaaagctttttcgaattttcagtttgaaaaatatgtttataagcaaatgaaaagcattcctaagttaaaatatgtcaaaaaagatttgaaattctttcatgtttcgacccaaaaaacgaatcgggatagtaaaaaggagtgggccaaaaacgaatattttttttattctaactcattttttggactggaacgtgaaaatctaggtcaactcggcgatatctttttgactttttggactctttcaattcaggatgctttttaagttatttttacaaaactaaaatttgggtcgtaaactattcaaaatcacttaaaactatataaaaattctcgaattgaaatagaccaaaaatatcctaaaacttcgtcgatttgacctagattttcacgtttcaatccaagaaattagttggaacaataaaaatgagttttgaccaaaaacaagtttaagttttatcctttttcctgtaaaaactaacaaaaaagtcaaaaatgaattaaaaagcaaaaatggtgaaatatggatatatttattcccgaaaacctccaaaatatggatttacatggactaaaaaccttcaccaatgcaaaaaattgctaaagttcgagcccccttggctgcgaattatttttaaatcttttttcaatccaaaggtgtggacctttaactgtgcctatacacaaaaaaacaaaattttttataattacgaaaaaattgttaagaattcgtaaaacatataaatttatcaaatgtgctgaaatgggcaacggaatttgcctacccgtaggacttttttcgaaatttcctatttaaaatatgttgcagttcttgcttgagattcgcctcaaatactgacaaagtcaattacgacgtgatgttaaagcaattaacaccaactttcacacacttttcaggcaagacaaaggtagtgccgaattacaaaatcattcatcagtgatttaactgataagcaaacattaatgagaccaaaattttctattggacatggtccggaatgttttactacaacagaatgacgttgaaagaagaaccctaatcagcatttcccgtagaatgctcttcaaaattttaaagcctattctgatgattacagacactcaaaacattacgaaattttcgacaggctcaaacttagctttagcatctggtctgtcaacaacgtgacgacaacgtgattctatgattcgaattgcatatttcacagcaatatatgctaacagtaaaaggaaattttgaattttttgtcatttcaaatttgaattatcactccataacagtatgttgcactagaataaggacatcccattgttcgagtgttttggcacttctcgtgaaccggttgagctataattttacctatacgtaataatcctgaaaatattaagtgagcaatcgcaatgacgagaagtatgtttttttttctaaaaatagagttttgctagaaaagaaacgatttttcaaaagactgtaacgttgtgaattgagctataaaaaaacaggcctgtaagatatggtgttttatcatcattttgttgattaaaagtggccaatatgattttttgaggtgctggtttctgatttttgagaaatttgctgattcgaaaatcgccaattagtgaaaacctttaatggtcataatttttatggcggcgcctatcgacgccgccggcccccaaaacttttttcttaaaaaatagccaaaaattgatcatgaaaatgtattaacaaattgagccaaaatttgcaaaatttttttcagcagtacctaccggctccgccggcccctattcgcaaaaaaattttggaaaaagcgcaccgcaaaatcagttatgattattttgaaaattttagccctcagccctgataaaaattaattttaaaataactttggtgccaagcaaaaaagtcaattacactattagttcactccttgatggtgatttgcaaatccgaaaatggcttgagtcaggaaaattttcgaaaaaaatttctagcagtttgaaaattttccgcgtaaattattcggctcatccaaacaggcataaaattctctagcaaaatggccgttggataatgactattatgacgcgtatttgcttaggcgcgtttagttaaaaaaactatataatgtagcagaaatgaaggcaaatttgattaaaactagtcattttttgggttgtcgatatttacccaaacgcgcctcagtggagacgcgtcatagagccatcatccaaaggcaattttgtaaagaattttatgcttgtatttttttctgataaagtatttttaaaaattaaaagtttcggcagagaacttcgaaatccaatgaaatttgccaaaccctgaaatatgtgcgattttataagtctctctaaatcaaaattgttcggtgaaaaagctatttttggacttttcttgccataactaattgtaagccgcaaaaaatatgtaaaaacataaaaatccggtctctaattataatttataataatttttcgtggaaaatgttttcaatctgctaaaaaaatattcaaaaaatatgtatgctaaaattttaaattgacccataaaaccttttaacaaggagcaaacgaaaagggtattatatgtaacgatagcataatcaatgggctttcgaatgataacaaatgtatgtaaattcattccattccgccgatatgcatcaggcaaattgtaccttatccctattttgggtggtcatatgtgactgggccaaaaattctgaaaaacacctaattaagctatttttgatgctgaacaaaagtcttacagctcagatcactccttcataatgaccgggataccctaaaatacactgaaaattgggaaatttttcaaaatcctatagaaatttttcaaggaaaaaattcttagaaaatttttaataaaaaatttaaagaaattaaattttcaaaagtttttaagcaatttttttttgaaattttatgataattactgttttttcgaaaattttcaaaaaaacaaattttttttgacaaaaaattttctaagaatttttccttgaaaattttctaagtttgaaaaaatatttttgaaatttctgcggcgaagttttgtcccggcaagatttcgggcagcgaaattttggggtgtactccaatttttgatgctgatcaaaaaagtcttctgaaaaacacctaattaagctattttttgatgctgatcaaaaaagtgttttacagcaacttgatcagatagatcactccttcatagtgatcggtatacctaaatactctgaaaattgggaaattaaaaaaaattcctaggggttggaaatttttctgaaaaaagcattatattcatctgaaagagcacaaaatgcactacaaaatgcaaaatgagcaagtctaggatttatacccgctgagctatgggcattttaatttcggtgtctacaaaaaaggcaaataggtagtaaattttattctttttaatggaccttctcaa

SEQ ID NO: 2402 - DNA, 543 bp, Heterodera glycines
cttagaaaattttcaaggaaaaattcttagaaaattttttatcaaaaaaaatttgttgtttttttgaaaattttcgaaaatcgaaagcccatggattatgctatcgttacatataatacccttttcgtttgctccttgttaaaaggttttatgggtcattaataaaattttagcaatttttagtggtgttaaagcatatgaccatgactgtagtggaattgacctttttttttctcggcatcaaaagttatgttaaatgattttctgatttttatagctcaattccaaaaattactgcttttgaaaatcgtccctcaaaaaaaaatttttgttttaattatttcggcttctcatttattttttcttaatattttaagggttgctacgtatagctaaatctcagctcgatcgatctaagagaagtggtagaactctcaaactacactttattatttttcataaatatttttggtattccagactgcttatgttcaaacattgaaggacttttgtcttgacttagcaagatatgataaagtacag

SEQ ID NO: 2403 - DNA, 5091 bp, Heterodera glycines
gtccggatcgatctacagagaagtgggtagaactctcaaactccacttctcttcatttttcataaataattttcggtattccagactcgcttcacgttcaaacatcgtcgtactttcgtcttgacttagcaagtatacgataaagtacagtagctttttcgaagcgtgtcttcatcttagcaaggaacgctaacgcgcctcaaaccgcatattttcttttttcataaatactcggttcgaatactcggcttatcaaattcaaaagtcgtactcaaacaacatcgcgacagtaaattctcaagtttaataatgattataaaatagtccaccgtcccttctatgatccagcgcaagccagcccatgcatcattcgccaaccaaaaccacacattgtacgtccaatgccaaccattaccaaagcactcagtacacgacagcctaaaataatagaactttaaaaattcaaagaaaaacacttcgaaaacccatgagtgcttgctggtggaataaaaaacaaattaatatatacatacatattacaaaaggttttctgtatataccatatgaaactgggagaaaagggcacaattttgcgtacacaacatcataacttatttcagaaagcaagaaagccaacatttttcgttataatttggaatttcagttttcttttcagattgtaaaaatttcaagtcttttcaatgaaaagttatttgaatgatttagatccataaaaatgaattaaactgaatttggaaattgaattaggaataaattttgaaggttcaaaatcgagatcaaaaaggaggatgaaaagcgttgagaaatgagggggggggggtacagtcaggtttaaagaaaaaatgaagtgttgtgcatagaaaattagagtggagaaatttgtattttatacttgctgatgatgacaaaaaaacgatgagattattaatttttctgtctgtagccgcaaaataaaaatccatttcgaccttccttccggttatttcaacaaatagcagtgctttgatacccgacatcatttgactgctacgtaacattcagaacgcggcgatgttcagtgatggtccgtttgacaaaatgtgagttctaatgcattgtatgagtctaatgctctaatagcattttttagtccaatcacttaatgagtccgatgaagattcgtattcactggctacgaaaacgccctaaaaatgctttttatcaacgtttaaattttgaatttttttctaaaaaaggggatagcacctaaactatgatagaatccaggatagttagtgattggactcataaagtgctttacaacctaaacgcgaataggacaaaaaggaaatggattttcaatttccatgagttctttgtagtacaaatttacatcgactattttgttgctttccctatcttcagtgaaacagattttaccttgaaatattctttcactttgcttcaatcaattcgttacccttgattaactttcgttcaggttaaaacggaatatacagtcaagtgcaaaagcacaaaatttgctacaaaatgaagtaaacaatagtttcataatttatcgactacatatggtcatgcatatacacaatacaatataaaattgggcgttaaaatgggaattgaatatgccggatacagtacagtacatatacaatatacacgtacgtactcaaaaagcatatcaccatcatacaaaacaataataataatatacagaatatacatacatatatgtacaaatcgctatcaaattctttacatccatcagaagcgacgtccaccgaggaaagctgcccgctgcgttcggctgacaaaggagcactgacaatcgcacatcacatcgtattggtgacagtatctgaaaatggggaccagaattaggcgcgtgacactgtatcgtccgactgtatgcccatcacacagtactgtacctgttggccatgtcgcacacccaacttgacaagaagtcgtccatccacgcgaaccagtcagtcaaatagaacagcgttccccgtgacgaaccgagcatgaagtgcaccggtggccaagcccagcggacgcatgcggcggtcatcgcgacagcacactgttccaagaagcccagacagaagtagatggacagaaggacgaaggcaaaacggaaaagctgaaaaacggaagcgggggagacaaattaattcatcgtccgtccccgtgttaattggtatatttgccgctctggttgctcacccgatattgccacaggtgcgcaaagttaaccagcagcgattccatcacagtgccaacagtggtgtacacacggccaaggtcgattgtggacagtgaggcgaccgggctggcttcatcagatatgccatgctcatccgcgttgatggtgctgttgactgactgatggacgatgacattttgttgttgattgcttaaactgtgcgtggggaaagaatcgatcaaaattgcttaaaacatggagtttacccagctttgtccgtctgattgccttcaacccaatcgtaccaattatcactgagcaccgaaattgacctgaaaaggggaaaatggtgagtcacaaattggtactgaatttttttttttttttgcctgcgaagcactccgccatgttcgtcgccggcgccgttgttgatttcttgttgctgttgttgtggttgtttcggttccaccaatgcagagatctgcgaacgccgaacagcttcagcaggtgtcagaccagtcgtcgatttgacttcgttttgttcgttctgttgtggaggaagcggtaaaatgtgtttctgctgttgttgctggtcgttcaccacattcggatcactgaaaatggtgtgaaaattttgcaaagattactgaaatcaatgaaaaatgatgtgaaaatttgccgtaatttttcgattcactgaaattcattaaaaaatgatgcgaaaatttgccgcattttcagttttccagaaaaatgccgtcaattcaaaaacgatttgaaactttgcggttttcacggttataagctgtcaaaaagaactttccggaatgtctgaaaatggcatttacaaaatgctgctaaaagcggtggacggcatcatcatcaaaattaacgggcatcaatcactctaccgttcgttgctcggctccacttttggcggttgcgttgtcgaaatggtggtcgcttgcggcggttgctgctgctgttgttgcgccatgctcggctcatccacttttggcggttgcgttgtcgaaatggtggtcgcttgcggcggttgctgctgctgttgttgcgccatgctcggctcatccacttttggcggttgcgttgtcgagttggtcatttgcggcggttgcgttgacgaattggtagtagtcgcttgcggcggttgctcttcctgttgctgatgttgcgcaaccaccagtgctgttgctgctgccacagttgcgtcgtctgtctgtgttgcggcgatttgtccacgtgtgagcacttgaggcgacggttgcgcttgctgctgttgctgccactgtcccgctgctggtggtggtcgtttgacgggcgtcagaagggccatcatcggcgacgagtgcgagttgcatgagcgacgtggcaaatgatgatggtggtgatgctgctgattttgttgcggcgtgttgttgtcgttgtcattgttgttttgcggcgtgtgtcgttgtcgttgttgctgctgttgtggggttcactttttgatgaagacattgcgcgttattatgagcggcgacggcggtgacgacgaaaatttgggcagaaatgacggaaataattgaattgaatagcgatttgttgaacaaatgatgcgcatttgcgaaaacgcgtccttttataataaaaattttcttgcaaattcgtcgttctcttccatctgaccaaattgaaaaaataagcgaaaattttttgtcttagtagaaaatttagtgttttaaaagttttccaggactcagaatcaaattcgaattctcaagtgcataaaacgaaaaactttctgttaaattcccaaaatttcttgctaaatttcgttttacactgtgttaatttaaaataaagacaccctgttttttgggagtttgaccacttcccatgaaccgatcgagctgaatttttaactgtacgtagcaattctgaaaatattaagattctgaaagtgagaaaccgaaatggtgcgggaaaaaagttttacgatttttttccaaaattggcgtgttaatttaaaatagagacactttggaaaactaagaaaaatctcaacaactaacaaaaagaaactgataaaacaagttaaataagaaagaactaatcttttttcacatttctgtttattttgcatacagaaatatgtcttttggggagagttatgttgaattttctaagttttccgtagaaattaagggccaaaaggcttaatcgcctctaacatttgaccaaccgaataaaactgactgcaaacaactctaaaataatgtacagacatcctataaacattttctattcactttatgtcagaaaaaagtcattaaacacaaaatttttgcgggcgaaaaaatgcgaaaatctgggtaaattcgtaaaaaatttcttatatacatatttcgggatttttttacatattacatatgtacatattttggaatttttagtacgtattttgcaattttttctttttatttttttttgcatattttgggaatttttgagaatttataaaaaatttcataagaaaaattttatatatatattttttaaatttacccctaaaaacgggttttttctaagactgagccgcgccaagccctaccgcgttttaccgggcccggcgattttagggaaaatccgggttgaccgggttttgagaggccgggcccggaacccggcgtttttgaaaatgcaatccggcccggaacccggcgattttttgaccggtttttatcgggttatgatgatgaccgaaaatttgttcggtggctggacgtttcgacgatgaccgtttcgccggataccttttcgacgaatgaccgtttcgacggaccgggtcggttgagtctggc

SEQ ID NO: 2404 - DNA, 2646 bp, Heterodera glycines
  unsure (1)..(2646): unsure at all n locations
ttcgtcgttaggatgaagatccttcttttatcaccttttaaattgctttaggtaattttctgtaaaaaattggtataaaaggagcaaattttcagtatttgacacattattccaattcttataatggacgacgacactccaaaccggaaagcgccgaccatcaagaacaaccgcaggacaaccgtgaagcgcaaatcgtcgacgacgcgaagtgtgcggacaaaccggaaagcgccgaccaccaagaacaaccgcaggacaaccgtgaagcgcaaatcgtcgacgacgcgaagtgtgcggacaaaccggaaagcgccgaccaccaagaacaaccgcagggccaccgtgaagcgaaaatcggcgacgacgcgaagtgtgcggacaaaccggaaagcgccgaccaccaagaacaaccgcagggccaccgtgaagcgcaaatcggcgacgacgcgaagtgtgcggacaaaccggaaagcgccgaccaccaagaacaaccgcaggacaaccgtgaagcgcaaatcgtcgacgacgcgaagtgtgcggacaaaccggaaagcgccgaccaccaagaacaaccgcagggccaccgtgaagcgaaaatcgtcgacgacgcgaagtgtgcggacaaaccggaaagcagacagacgatcaattggtgattcgacagcggtcaattcatcgcgttcgggtcagttctcaaagatccaacttccaaaaataacccagtaaatttaaggaattgaggactcgcttggtgcttctacgaccggcaattcatcgcgttcgggtcagttctcaaagatcccacttccaaaaataacccagtaaatttaaggaagtgaggactcaattggtgcttctacgaccggcaattcatcgcgtttgggtcagttctcaaagatcccacttctaaaaataactcagtaaatttaaggaagtgaggactcgagtggtgcttctacgaccggcaattcatctgccgaatccaatgagtgcaacgactccgaccccagctacgccccgccttctactgaatcggaaagtacggacgacgatgccccaaaattgtgctgccgtgctgaagcaaggaccttgccgaaacgtgaccgctaatgtttcctgtgatcaccctttgtggctgttgtatgtaataaatgtctgtgttgtctatcgctatattgtatgtatgtatattcaattctgtgccgaaataattgattgctgttgtatgtatttatattcaattgtgtaccgaaataattgattgctgttcgtataaaaactttcggctattatgcagtttgacccccataaaattttttctaaatttctaagtaaaaaagccggtaatactggagaatctgggctccacccaaaaaattttttttttgttatgaaaagatcaacccggggattttcggggcttctgatcacgaaatatgttatcagatttgcaaaaagcattgattctatcattatttttaaaatcatagatttttaaaattttatcaatatggtcaaatgttgcacccttttttcgaatgaagcaaccatatatgagtagcactttttattagctaattaaatgatcatagaacaatcacacaaaacataaataaaacacttactaccctgccaaaaaccaatttttagaaacatttgcatattggcaaaatttcgaaaatctatgattttcaaagtcaatgatagaatcaatgacttttgcatcataaagtgctttagaacctaaacgcgaataggacaaaaaggaaaattggcaaaaagaaaatggattttcaatttccatgagttctttgtagtacaaattcacatcgactattttgttgctttccctatcttcagtgaaacagattttaccttgaaatattctttcactttgcttcaatcaattcgttacctttgattaactttcgttcaggttaaaacggaatatacagtcaagtgcaaaagcacaaaatttgctacaaaatgaagtaaacaatagtttcataatttatcgactacatatggtcatgcatatacacaatacaatataaaattgggcgttaaaatgggaattgaagatgccggatacaatacagtacatatacaatatatacgtacgtactcaaacagcatatcaccatcatacaaaacaataataataatatacagaatatacatacatatatgtacaaatcgctatcaaattctttacatccatcagaagcgacggccaccgagcaaagctgcccgctgcgttcggctgacaaaggagcactgacaatcgcacatcacatcgtattggtgacagtatctgaaaatggggaccaaaattaggggtgatactgtatcatccgactgtatggccatcacactgtactgtacctgttggccatgtcgcatacccaacttgacaagaagtcgtccatccacgcgaaccagtcagtcaaatagaacagcgttccccgtgacgagccgagcatgaagtgcaccggtggccaagcccagcggacgcatgcggcggtcatcgctacagcacaccgttccaagaagcccnagcagaagtagatggaaagaaagacgaaggcaacgcgaaaaaactgaaaaagggatgggggagacaaattaatcatcgtccgtccc

SEQ ID NO: 2405 - DNA, 3169 bp, Heterodera glycines
caaaagtgcgctttgcgtatttcatccaaaagtttgaatgagcgcttttacttggtcatggaccgactcattgcgacatcggtgttctgtcagtttttatttttttttgttaaattttttcgtattagataaggcaacaaaaatttaaaaaaaaattcttgatttttttttctaaaaaaatattatttttaaatatttgcgatgacgttatgtcccagcgacttttttgtcacggtgctgttttgtcctgctccgcttttttccgcaaaatttttcacagtttttccgtcctaattttcagtttattctcgttgtctgatcacggaggaatggcgtctgaacagtttggcaaatgatcgcttcattgagtactgttgtgagattttgcgctgtgaaatgccaccaaaatgtttggcactcattgacgcggtcaaaacggaagcactcaaaacgttggccagtgtcgtgtttttggaaaaggacaaaaagtgtgtatttctattgccattagtgtactatttcgcatcggcggattgttttcccaccatgaaaaaaatatagaagaaactaaatttaaatttttaaattcgatatttttcgactttttaaattcataaatcgtctccaagaaaagttgaccaaatttcatcccgatatcgacaattttcacccgtcctccctttttagaattcaaatgattgttgaccagcttgaactgcgcacataccatggcttcctgccatcccaaatccgcagttgcattgacagtttgaaggcaggccgtgtggacggcagcggtggcggtgactgttcaattgcatttgtcacttcactgttttcattggtctaccatattgctggctttgaatacggtaaactgttgtatacccgaaaatttaatggaaaaaatttaaaaaaaaaattattttttttgttgttgttgtttaggcggagatgcgctcaatcgctcttcaatgacggctgtactgcttgatgtcgtcaaaaatttctcacttcctgaacagaacatcagctttgtgacccgttcggtacgcatcattgacaatttgacgggcatggacatcaccgagttcaacgcccgaagtggcaccgatgcggtcatcaaacgactgaatgtaagttcaacctttttctccataatccgccgtcgccacccccctctctccccgaattttttttttactaatttttccaaaaatcactaaaaaactaaaatatgccgaagttccattttttccacagcgcttggtgcctttacactggcaaaaaaacttagttacccacattttgttcctttttttagcatgaggtcaacaagtgcaaggagcacattcaaattcgtcagtcttctcaatcccccggcccgttgctttgcaaccagcaacggtcggcgctggtcaagtcgttgctcaactttctgaagcgtgcagtgggcgacgttcatttggcgggccaaatgcgccgaatcatggacaccgacttgcccacgtcgttgatccatgtgtttgagcatccccaatattatgggccgtcgcttttgaattgtgccatctcattggcaacaaattttattttccaagaggtaaaattactattgaaaacttttcaaatggggttgggccaggaaattagtttattaattttttcatggtttggccaaataccgagtttttggccataatatttaataatcaccttgataacagaaggtcattttttatgatacaaccaatttttacgaaaaatgcacattttccgaatttctaaagttaaaaaaagagttaccaataatttatttagataattttcatgcgatttcctacctaattgtttatttgtttagccggctcaattgacaactttgcaaaacaaggggctgaccatggcaataattggactgattttcaatgaaaaagtacgttttttccccgtgttcatgaaatacaacctccccccttctttttttcatttttctctgctttttagttcccaatttcacgtgaattggtctgtgcattgcccaacgtttgctcggcgctgtgcttgaacgagcgtggcctcaacgagttgaaattgttcaacgaaaagaaaccattggagaaaatattccgcatcgttttttcaaacaaattcctccagtcgatgaggaagagaaaaattgaaataagtgagtgatggactgacaaattgcaattaaattaaaaaaaaaaatttttttttttgaatatcaatctgacggcgtaaatttttgtttagttgagacggcacatgtgcttggcacctcatttgatgagctgatccgacaccatccatcgttgcgcaaagatttgatgggcacattggccggggtgagtaatttaaaatggcctgttttgttgaaaattataataattttttaagaaaagtttgtttgattttttgttatgtgggtagcatcttaataacaaaataatttaaataggttttttagaattttaaactaaaaaaggtttaaaattataattaaataaagaaattcttatatattaaaaaaactaattttatctttccaaattatttttaaaggttattcgttttttaattatattcctaaatttatttatccagtatatttcgcaatttcaatcattttgtcatattatcttacaataattaacagatttgtgacgattggttgtcctttgagcaaacgtgtgagaaggagggcaaacagtgtgccatttcatgggctgttggcaaggctgttgttgaggatgagtcggcactgttgttgccgctgggcgacttttccacaatgatgggcagtgagtttttgggcatacaatttacgacaaaaaatgccatccattactttcacacctctcggaaaaatttaaaaaaaacattttttaaaccttaaaaaaatttagatttttttgaaagtttgtgttttttataaattttaaaagtgacatttatttttcatgttgagaacgattaactggtcccattagtattaaaaaaacacattaattattacaattattaagttatacttgaaacaatgttgaccaatcgtggggtgcaggacaatgtgaatgtggccatgactttgaaattcactgcgcatggtcaacttatcacagaggcgaaacaaccggtccaattt

SEQ ID NO: 2406 - DNA, 4500 bp, Heterodera glycines
  unsure (1)..(4500): unsure at all n locations
aagaaaatntagtgtacataattcatcatcataataaatntaaaaaagtctaggaaaattttccaattgtaagattttttcaagagacctttcaaagagtttgaaaaaaatttaaataaaaatttcgcgggggggggggtggaaaaccgtaggtcactcccttccaccctctcattgcgacttgggaagttttaaaatttatttttaactaaatgcaattcaaaaaaatgttcaaacacaatttctgttccgtttaaagacgcacaaacatgacatggacaaggcatttctgcatttgattgaacggagcagtgttgagttgtccgcctacaaacagtgtgaaacggttgcggacgtgaacagtcagcagcgcctttgccaattgacgcgtctctgtgccctgctgatgacgctcaacagtttgatggtgaatcgtgtgaatagagcgagaaagccttgcattttgacaaaaaaaataataattttattctagaaatcgtctctgcattcacaaggcacacatgagtgagttttacgactggagcacagctcgttttttatatatagataattttttaattttcaaatattttgaaaaaatcaccaccatattttccacatttttcatccctcttcattttccagaatgcgttcttacatgcttaaatattttgcaactgatcccaacgcgtgcgccttcatttatgccctttttgatgcgtacaaattaattggaacagaccgattggtgaattttttaaacaccttgaatttgaatatttatcaaaaacaaatattttttgccgcttattaaaatttttgacaatttgaaaaataatattcattttgtttcttaacatccgcacaattttgcttcgcatttgccaggtggtcagttgcaacgcggaacagcagcaggcgacaacttcacaaattgcggaagacacggccaaagtgcgtgaactgttgattgatgatgactcatcatcttcatcaaaccaacatggtgggacaatgccagcaataacaaccgctgcagccggcacagtgccaatgccacaattgatggaaatggacaatggtgccggcacactttatttcggtccaccacaacatcaacaccaaccacaacagcagccccatcggtcggttgattttgccaccaccgctgccaacattttgcggagcaacagcgcaggcagtgccggccgtggtggtctcggtgttggcattggtgtcggtgctggtggcgccattaacatttcaattcttggtggacctactgtcatgatgagaggagcatcgtactcaacaaattctggcactttgtccgcgtccatcagcgatggcattgtggggtcagcaggagggggaagcggtggtggtgggcgcattgctgagcggtccacccattcgattgccattcggacgttgaagcaaatcacggaactgatcacctacattggcaaagcgttttgcaccgtgtcgttgccccgtgtgcgacaacgtgccaacatactaccacaaatggaccaagccacggttcggcaccatgcgcaaaaagtcaccaaaattgtgttcaccggcctgaaacgactgctggaaatggacatgaacaccgataatattgtctacgcatcttccgcctcctcctcctctttgaacaccacgacaatgaacacaattggcctaaggcaaatttggcattttgtttaaaaataattttaaaaatgtttatcattgcatttacagtgcttcttacattcaccattcattgtcaacactgaaaaaattgctggtcgatgatacgcataatttgtcgctgttgttaccatatttttacaagaccgaatgccaccaagccttttttgccctgggcgactatctacggcagaatgttgacaaatgtaattgtttttgccattgtttttttttggtttcaatgacactataattttgtattccccggagaaaaaaaatttaaaaatgcatgttttatagttttttcaattttttagttttttcttaaaaaagttgatcaatttttgaaaaatccctctcggtggaactgttcttgcttatggtctatgccttttgtttcagttgagttgaacacatgcatccaagtttggcttgggatcacccaacgtttggttgctgtccaactgcaagacatgaacacgggcaagagcaacaacgggccacagcagcagcaaaccaagcagcagccgactgttgttgttgaaggatttgagccgaaaaattaccttgccaccttccagaaggcatagttttttaatgcttacaattaatgcaccaattgtttcatcaaaatttttttttcaaaattgctcaaatatcaacaaaaaaaaaactgagttagatggtaccataatcattcgaattcggtcttttgaaactgaaaataaaaaatttaataggcaatttttgtaacaaatagcactcaaatttccaaaaaattttcccggcggcgcctatcggcaccgccggacctccattttccactatttttacaagttttttgccttaaaacggccaaaattgggtcattttttacccagcagtggaaaaaaagttattggttaaatagcaaaaaaaaagtcttcaggtcgggtcccccccccccccccgaaaaatgtttctagatacgcccctgcgtcaaatgatgaaaaatttggcctataatcaccaaaagttgccattgtatttttttaaattctactttcaaaccaacttttaggatacattctctacactcattaccatgttcaagtcgttggtccagcaattgtcttcttcttcgccgcccccctcatccgacacaatgcccccgttggttggccaccgggaggaagacgcattcattttgttggaacgcgtgttgtgcgccatgaaagtgctcatccaaggcgaaatggaactgttggagttcaccgaaggcaaggcggagcagtcgcaggaaatcccagtcagcgaaattgacccggcaaaggtgagaaattttggggtgtatgtacatcggcggaagggggttatagcaatacgcgctagcttaatgggtcctcaattttgggaagaaaagtgtgctaaaaaggctggaaaaaaaatttgtgggctggtttttgaatttttaaaatggcaatattaaataattggcacatggttggctcggggttttccgaaattctggtccagatctccaatttttgaaaggatttctcgaaatcgggatgcgaaaaatccggagattgaaatcccgacaatcctatcccctacctgattcccaatctcgaattctggtcccaattttttaaaaattctcgtctctattgtaaaccataccacttatggacgaattcgttcggagaaccagctgccattattcgtcttgcattttagattttcatatgcttccaaatttgaataaaaatgcatttttttagattgaacaacttgttgaggttggttcgtttgttgtttaattttcttccaaatattatttatattttccattgaatgaatgaatggttgttgaaatacagtttttgtccctgttttttagatgggtttttcacaaagtgacgcggttgatgcactcatgcaatattccagcgttcacgaagcagccggtaaaaatttatttatccaataattgtgaatgtgtaatgcgcccaaaatttccaacatttaatttaccaaaattccagaatacattgtgtccatgctggagcgtgtgaccgttccccccaccgtttcacgaccacctgcagcagctgctgtacaagaacacccggccatcactgtgtcatcatcagcaaccgccgcagctcctcctcctccagcaacaactgttgcagcagcgacaactgtggcggcaaatttggttgccgctgcgaccgccgcagcggtctccgctgaaccaaatggaactggtggtagtgctggtactgctagctacgacaacgcactgcaacatcaacaaccgcaacaagtaggcgatgctgctagtggtggttcaacaacaacaaatgcaacaaccccgatggaacaggagcaaccactgcaacaacgagagcgcgaccagcagcaacagttgcagcagctgaccgcatcgctcgctgatgttcatcaacgcaaccaggaggctgccgaggcggtggaacaactgttgcaagcgcttcggggtgagggcgtacaccaccggggagagatgagcggcacattgccaccacctccagcagcggcagcaacagcgatggaacaggacggaaaatcgtttgacgagttgaagccgttgaagcgagaggaattccaggcaattcgaattgatttttgtgaaataactaatggtcgggtcataacataaaaattaaaaagaccccaaaccgccaattatgttttttgccgcgaaaaattataagttttcctgctctttcaacggcgacattcatttttctttcgtatcaaatttctaacatt

SEQ ID NO: 2407 - DNA, 1683 bp, Heterodera glycines
  unsure (1)..(1683): unsure at all n locations
gaaatgctcattgaacgggatgcggagccgaagacggcaggccaaaaaggttgcttttaattgtggatgtagggagggaaatcccccggccaaatcggggaagaatccgaaaatcttttttggcaaaaaattttagccattatcatttgttcaaaaatgtttctgcgtcggagagataaaagctggaaatggttgtcgtttgcgtcaagaaaatacaatttttgctattcctgaggctcaaaattttcttcaaaaaaaaaaaatttttttaacccccccccccctcccccatagtaaaacgtgcggtggagacaaccttctacatttcgtttggcctcatctcctgcgccgttctgggcgtgatgacctacctcgtgttcaaggagttcttcgccttcaacacgccccagggcgtttaccgcgatgcggtgaaaagggtgaaggcggacgagcgctgtcgggaaatgttcggcaagcgaatcatgacatttggcgaagagtcgggccggggacggcgacggcacattctccacaacaaatatgtcaaggacgggcaggagcggttgagcgtgatgttccatgttaaggtcggagggtcaacagctcatttcgaccaccaagaaaataatttatagagggtttttcaaagaaaattttaaaaatctgaaaaaaataaaaatatttccaataaatatcttttcaaagaaatttgaaaaataaaaaatacagagcctcaaaatcaggagacaaacccctggtccatactttttcaaagttttgtctctaaaaaataacaaacaacattaaatgccatgaaaatatcaataatgcataattaagggtgacgcgggcattgggaaaacgtacgcggagatttacaagggcgaggacggcaaatgggactatcgctttgtactggtagagagtgacgggtttccgaagaaagccattttcttaattgacaacaggaaaggagactagttagtaattgtgtaggtgtttttccttttttgcttgttctgttttctcaattttttgaatttatatgaaaaatatttaaacccaaaattcttgggcagttgcatggcggagcaggtcgtcctcatccctaatatttttggagttttctaagatttttttcttatgaaagttttttttaaagatttatagggggaaacccactagggccaatgaacggcaatttcggaagtcattttttatgccaagaaaaagagagaaagaaataaatgattataaaatgcgaataaagtgtgtgtttgttgttggtttgatgctaacaataaattgtgtgtgtcaattttccatgttttttttggttagacaaaggtcaatccgtcaatataaaatgtacacattcccaacgagacggctcattcattcatcgttggcactgtcactggtagtacggcggtctgtccatgtgaatgccgtactcctccagcacgggctgaagcagttcagtggtcagacaatatttggcctcacgctggcccttcttcacttggccaagccctttaatacgtgcctgtgggaaaaacaaaatccattttcatccatttccactctttttcggactcaggattcgaaaaaaaattcaatttaatttgaaaagagatattttttgaattttttttttcaatgnggggagggcgacnntctaga

SEQ ID NO: 2408 - DNA, 2663 bp, Heterodera glycines
tccactgtacacataaaaagtattacaaaaactgtcgtactaatactctcgaccattttttttgcaatttttatttgtgtcttgcctgttgcattgcgtccaaacagatgtcggaaatgaatttttgagcagccagcgaaaacaggcgtaccacgcgcacgtccggatttgcaatgccattcttgcgcatgtaatacagtgccaccgagtccgggatggtcggccgataattctccaagtccctgtagaagtcggccaacgaactgcccggacgcacatcactccctgcaaatttagggcgtttttataggcctttatgaacacaattcaggcacaattttccgttttgccgaaaaaggggtaattttaagtgaccaaaccaaaaagaggaaaactgtatgatcgggccaactcggaccgtttcgcagtgcttggatttgctgttcggtcaccggacgtgcgaccaacggacgcgcatattgcacggaagcggatgattgttgctgcaccgtctccgcaccggtggattggtccggcgccccggcaccaagctgttggggctgttcaacgacggcatcgtccccttcatccattggcatgtcgtccatcggtggcaattgcatcaataacaaaaaaggaaaatgtatgacgaataatcaaaataaatgcaaaaaataggaaaatttgttccgtggaacatttaaaattgaaattgttatgcaaaaacggtatgaaaaataacagcatgaaaaccacagagatcgtacaaacaaataacaacgaaaagaaatgcactcagataaatgtgggggggaggggagggtcgaaaaatgaatccaaaaagctcgcctcccccaatttgtttttgacccctcattctatataagtgccaaaaagatttgatttcataattcgccgcactgttcaatgacaattggtattttcggtttgttgttctgaacggtgggcacctggaatgaaaaaaaaatggtaaatgtgactgatagaaagtaatgaatttcgaatacattttctatttttcgcacagtaagcagcccgtcaagaacacgtcctgaaacaaattcaaattcaaaaacaaatattgtttatttgtaaatggggttttaggactttcgttcccaaaagagtgccgaaaaccagggaaacccggacctagccccattaattgtaaaacaatgaacggacggaccaaaaacgacatgtttggcatcaagaaaatcgcacttgttacatgtgatgaaaaattggcagcctaaaaattgaggaagcaaattgtgttaccaagaaagcaatattatttttttataccatttgtgtcagggccagcattagccttaaaaaaacaaattttcaataatttttgttggaaaaattttgcacaccattgaaagaattccaggctcggaatgttttacttcaaaattttcgtccgcaaattttggcccataaattgacgtcattccggttccatcaccctgaaaaaaaaacagagtggttggaaaaacttttcgccacgtctctttttacattgacaaaatcacctccctgcaccataaaatcctaaaatttttaagtttattattgcgaaaacatttaaaaaaattttatactttgataacccggtggaattgcgaattcttatagccaattggaacgccgtccttttttctaaaacattttttattacgcatttttaaattgatttacatatttattggcaatttgtttattttattacaattcgccggtgcaaagctgtcgaaagttttccgccgtctttggcgtcacatccccaaacaattccatcgtaatacgacctgtgacgttaaaaaatgttttatttttgcgtaggcatttgcatttctaaccaatgggtgctccacctgccgcaatgtcctgacgaaattggaatgaaaaaagtggaggcaaaatgaaaaacccacaaaaaagacaattggattttccgggtggcgcaatttctcggacaaacgctcccattcgctcatttttgttgtataaaatagcaattaaaaagagaaagcactaaaaattctaaaaatgtatttctaaaatatttcaagaccaagaaaaaatacgggaattcttcgatcagttgtcgtttctcgattattgggaaaaaaaaattttcccgcgttatgccaatgtttattttatgtgttggcataatgttctttttttgaatatattattttgtttgctttcctgttttcttttgtccggaaccgtccgtctccggatcttttcagcccggtatttgttagggttcttttttgtgaatcttggttggactttaagtctggaaccgtatccgggtccttctctggcttttaattccagaaccatattttggggatccggggtccgaattccaatttttcataagtctgactctatattttgttataccctgtgattcttttactcattttgcttgtacatttgtctacaaaattcttttagaggcatgaatgtgcttctgcttttacgatgcgaagaaagcgcattttaattatgtttgtcctcatattgttttggctgttcatttactcgctcattttcttcctttggttatggcggaataacaataatttgtcatcatccgccaattgggcacagccgag

SEQ ID NO: 2409 - DNA, 2135 bp, Heterodera glycines
ccataacacgctttcattcaaaacaaaaatgaacaaattcttacttcggaaaaaagattttgaaaaggagaatctttttctccgtgaatgctaagcaatttgacatctcagaaaaaagttgtgggaattccaaatttttattacgttataactcaagtcctaggaagatgatttcaaccaaaatgcgaaaactaatcatttttctattggttctaaatgtccaaagtgaatttttacccgtataaccaaaattataggaatttgcaaatttgatgttttttaatgtgttagagacatgaaaatagtacgccaaaatgagaggaaaagaaatgcaaaaattttaatcactccataactttttagttaaccctttttttgttcttaaaaacccttaaattttgttcgtaatttttttctctatcaatatgcaaaatttgaagaaaatctgtaaggcggaaaaaaagttctatagagcgaagtgaatgttgttttttacataattaaaatgaagagatagtacgccaaagtgagagaaataaagataaaaagtgaatgtgacagaacgccaattttttcccataattatccataaaaaagatttattgccgcttttttttcttttttaccgtccatgctacgacttaaacccgctgaggtatgggtagatactgtattttatgaaagttctttatcgaaatggcaagtggtcgtaaacatatgaccatgactgtattttctgggggtttgtgatctttttaataatggtggagggttcggtgaagaggtcaatgaaaaggttctcacacttgcgtccataccatttggagacatcggttagatgctttatactttttacaaatttaaaatatttaatttggtttagtcggcgtaagcattccgttggacaatgaaacgggcaaacacagaagttttgggtaagttgattcattttaagttgaatgttagtctttgctttttgagatttgtcgaatttgaacttccggaggatgcagcggcagcaattgacaatatgaacgactcggaaatttatgggaaaacaatcagagtgaattttgcacgccctccaaaagtgaatgagcgaagtcaacgaccaatttgggcggatgacgagtggttgaagcagtacggccatgggagtggacagggcgaaccaggagaatgccaaaagtttatttgggcatcaaaattggaataaggttggcattttgactctattgcagcagtttacaccgaccataaatcatttttaaaatatataatccgaattaaatattcgagtccttaattagtctgttaaacttcaaatgatttcgttttgtttcaaaaaggttatgactagaaaacgcaaaaacacttctcaacattttagtccgcaaattttgaatcttgaatgattttttcatctttcctagactatgttttcaacaaagattctttggctctaatgcactttatgagtccaatcaattgacaatcccgggtttttatacaataactttttccatgttcgaacaaaccctatctttttggtatcattcgaaagcacacagtctgacgaagctaaaatatataaaattgcagcgttcaggcaattaccaaaaaagattaacacaaatttcgacgacattcaagactgctttttgttaaaatatgaacacatatttaaccggaaataatgaaaggtgtgtgcttgatcagactttatcttctctatttgttacactatcgattgcttatagaaaattgcataagatatatacaattaataaaattacaaaaaaaaattgtttatttaattgaccttttccaaaacataatgaaaataaacaagcctatgattttttaaatgctttgcaatcatagaaaaatgtttgataattattgtttacttaataaagtacatagaaattgaaaaactgaccatagaagagataatctgttatagaagaaaattgagaaattattagtgaaattaagatttctcttaacagggtaggcgaaaaggactgcaatttgttaaaaatattaatacagtttagttccccgtttttagcatagtcgtttagatgtgaaatgcagtgcaattaagaaagtaggtatgaatgcttgggaaa

SEQ ID NO: 2410 - DNA, 4805 bp, Heterodera glycines
ccacacccttaaaattttctttataatttcgaaacattttaaaacatatatttttcttatttttatattaattttatgcctgaaatacgagtattatattatttttattaaaaattcacgaaaattgaatttgccctctcgctttgggaaaccaagttcggagtggtcattttgtggtgccaatgcttactgtgccaatttctgccgaaggtggggattgcgtcggtgccttttgctgtttaattctctgtacatatgccaatatttgttcgccattgaaatttttgacgcgaattttcagcggattcattccaaccgttatgcatttgttcagtcggcatcgcttacataatgcagtatcatctaatatttataataattagaggcaaaaaaagagtgatttttataaaagaatcccattttcccgaatttttagacacaaaaaaaagaattaattcttttcaaaatgaaatattttttgttcaataaatgattgtttctgagcaattgaattgatgattttttgtaattcgaatttttttttcctttgcggttttttaagcttctcatggcaattatgtgagaatgaataaattttaatgaatccaatttcatttttaatctaatattaaatttaatattatttttaattttaaataaaaatgaaattttttgaatgaattttatcacggcaattagcctacgaacaatgcaaagctttaaatgataaaacttcccgaacgaggttaattcaaaaacgccttatctgtgctttaaaatttaatttttttaaaattttatttcttatttgtctttttgattgaatttgtgaagaaatgtaaaataataaatttgggaaaatgttaattttgtaactgcgttcatcgttttcatttttgcagtaaaaatataagggctaacaacctgcagtatttcattataaaatttttcccgaagcctatcggatcgctggattgggcaggatcgttactcaaaaaaccatcaaatggaaaattatagaaaattattaatgacttcgcccaaaatgaaccaaatttaaaatattgatgacttcgaaagcactaaatgttttattttttatagtattttttgcctttttcgacgtcgcactgtccgccatttttgcatttgtattccttcagcagcaaaatggttctgcgaaaaaaatgtttgcatcctgaattataagaaggtattattgaagtattatttttctaaatggattaaataatactattgatatatttagtccaattaagattatacaatggccgaacttaaagctattattagccgcttaactgctattgaaaaattaatttcaaccaacaacaacaacaccttggcaaccgaaatgactgcgcagttcagcgccattgcggaacgcctgggtgaaattgagcgcaaaattaacaacaatggcattgtcagcgcggaggagatagaacgaaaaaggagccttgtgctcatcggtcttccggaatcggaggaggaagtgccatcactgcgtgcgaaggatgacgcgaaaacggtggaggaagtgttggaccggctggacgtggaagtgtgcccgcaaatggtctacaggatgggcaggaggattgacgagaagaggaaaggaccgcgcttggtgaaggtggtcctgccggcttcaaccttccaacgttttgcgctgatgcagtgggggcgtcgtcggacggagctgaagaagagacctggatgggagcgtcttctggtcaggccatccctgacgaaggaggagttggaaattgagcgggaacagcgccaaaagaagtggatggaatttggaaagaagaaaacgggggaaaacatcacgacgcgacgcggaggcaatgaaaaaaacttttgaggtcacctccttttttaaattgttatatttcaatgtacgaagtttggcgaacaaattggacaagttaaggtttttgttattagaaaataggtttaaaatcattgctgtatctgagagttggttgagtaacaaaatagaaaacccccaaattttggaaaatctcccctattctataataagatcagatagacttaacaaaaaaggtggcggggttgctttcataatatcgaatttaattccttttgaaattatcaaaactacaaaaaacaaaaattccgatattctttgtgttgacctattttcacctcttaaccacacaaaaatacgttttattttggtctatagacccacctcccatgaaaaacaagaagatttcgaaaaattggtcgaacaactctctgttttagtctcggcttctgaaaaatgcattttgttgggtgattttaattttcctcttttaaaagcaaaagacttagcatccaacattttgaaaaaagaaacaatcaccttgaatcacttttcatttcatttttagagggatataaattaagactaatggtcaactcccctacacggggaaacaatttattagatttattatttacaaacaacgaaaatctattgaataatgttatagttgaacccccatttggtaatagtgaccataatgcaattcaattcagcataaatttacaggttaatagtaatgcttcaaaaaaattttataacttcaaaaaagcaaattatttggaaataaatgccatactctcaatggttgattggaatttatttttttctgattgcccggacatagagcttatttaccaaaaatttatgtttttcctaaataatttgataaggaattatgttcccatacaaacaacgaaaaaagttgaaaaactaccagaacatattttgaaactaatcatctatcgtaaacagctttggaaggacattcacaaagaccatataaaaatcaaatttttggaagtttcaaaaaaaatcgatgtagaaataaataaattttataaaaatcgtgaaaataagtttttgcggaccttagactctaaaaaacgtttccaatttataaattctttccttaagactaaaaatactatgatacctgcatttactgataaaaatggtctaatcctcttctctgataaaaaaaagtcgaatgcattagcgcaacattttttttccgtttttacagatcaaaatctagaacaatttcaatgcatagaaaatcctgaaaaaaatatcgaatatttcaacataactccatatgaaatttatttctctctttccaaactttcaaatgctaacaacactagtattgatggaattcccaacatttttttgaaaaattgtaaagaaaatttagtccgaccacttttccatatttttagtttctcattgatgactgcccaaattccagaaatatggaaaaagtcaattatttgccctgtcccaaaaattcaaaatccggtaaacccagtcgactttcgtccgatttctctgctatgttctgtttccaaaattttggaagaaaatatagcaggaaaaataaaaaattttgttgaaaaaaataatttgttaccaaattgccaacatggttttcgtaaagcacattctgttaccactcaacttcttgaagtggtggatgattttagttttgctttagaaaataaaaaatcaattgatgtaatttattttgatttggctaaagcattcgacacggttccacataaccggctaatatctaagctaaaaagcattggtataaataattccttattaaaatggattcaaaattacttagaaaaccgaaagtttttcgtcaaaatcgggtctgatttctctgacgaatatccctgtctcagtggtgtgccgcaaggctcaatattgggaccactgttatttcttatttacatttacgatttaccaaaattctgcgaaactgaaaatgttaaaattaaactatttgccgatgatcttaaggcctatcatgttctttcaaatatttccttttctccactccaaaattttattaacaaatttaatcgatactgtaaattaaacggccttaaaatcgcttcaaataaatgtttaactttacatttaggacacaaaaaccaaaaaataaattattttattgatgactttccaattcctaaaaatcccggaaacgaaccagtcagagaccttggcatttattttactaatgatttgaaatgggcacaacatattgaaattatctcgaaaaaagcattacgatctgcttttgctatattaaagtcaatcaaaactggtgatacgaaaatacttgtaaatttgtttaatatttattgcagaccaattttagaattcggatctccaattttcaatccttatttaaaaaaggatatagaaaaattggagaatgttcaaaaaacttttttgagagtaatatttagacgtaacaattatgctgctgatttacctaattatgctgaattgttaaacatttatgatcaaaagtcgcttgagagtcgtaggttaaaaatagacttaaaactttttcatgaaataattttaggtaaaataaatttacaaaataacgaatccttttctttttccaaaaaccctgtaaaaaatgaattcattataagaacagcttattgctcaaccaatgctagatacaattcgttctttattcgaacctctcgtctctatagacttttacctaaagagacgagattactaaatccaaatgagtttgccaaacttcttgaaagatctgatcttaatttgttgatttctttgccaccccaactccaaaagtgaccaattgattgttttgatattattatttcattatttctttatttttcggcatcacgcttttgcgtataaatgattgattgattgaaaa

SEQ ID NO: 2411 - DNA, 1965 bp, Heterodera glycines
  unsure (1)..(1965): unsure at all n locations
aatattcgatgaataaccgaccgtcaggaagggaatttcacggccctcggaggttttgccgatggagtcgaatttgatgaaatcggtgactcttttggcattgtcaggcgcggcaaaaaattcggacggttggccaacgaatgggcgaaagttccaaacttcggcacccgaattgggctgaaggccgacatattcgctgaagttgcgaagggcggcgagctgttccaatgtttgtgggatgacacgaagcaatttgaaactgagaaaagccgggggaacgattttgaaagaaaagatgattaatgataaagcgaggagcgaacccatcgtagtgttgaacggcacccgaagcggtagcgaaattggacagtgccaaaagccaaaggacggagagagaaagagattggggaaacattcgatcaaaaagcgatgacttggaaaaggaatgagcgaaagtgtcaacgtaattggccatcagcgaaaccattttttgactgccgggacaacacggatctgcagaaaatacaattaattaactactgttaattataaacaattgtcagctaaaaattttaaagaacaaaatttagaggattaaactccgaagcccttcaagtgctcacctttctcctcctcttgctcgtcaatgttttgctcttgcaggttctgcaacaaattgccgcctccatgctcaaaagggttatgcccccaagtggcttggtaatcaatttctccgtcaatgaaatccatgtcaatatcgtcgaggttaacacctccgccagcaatttctccgtctccctgaccttcgttttggtcattgttggcgttctgctcagcgggctcgctctgccccttgattaagacagcacaaatgatggcacagccgactgacagaagaaacacggtccaccaactgaaaaatgaattaaccggttttgtcgcaaccctggtcaaattttattgtactttagatgcatgaaacgaaagggtaatccttcggaattggtgtcccgacaaggaaaaggaaataaaaattaaacaattacatgatgaaaagcatagcaaaaccaatgattttgcaaaatcccagctcggattcgtgatcagcatattttttccgtcgggacaccaattccgaaaaaattaaggatctattctaagcaaattctcgatgaatgaaatggaaagaaacaaaacagccaaaacgaacatagcagagtggttgccatggttattgtcatcgtccccatcgtccacttgctcaattggactgaaaatgtggggaaaacattaagttgaatttatcatcagcaaatttgagaattagggggatcgtattcaaacaccgacaaattttcggaaacatgcacaaaaatgggaaaaaagtagcgtatttggaataggttaccccacaaaaattgggatttctatttcgaaaatgatgcaatccctggacacgtatggagcaaaaaaatattcgccgagacatgcgaattgcggtcgctttccaccccatccatgccttggatttttgtgtttaattttcatttttttgagtgggagtgcatgtattttaatttttcggatttcaaaattgctgctcatcaaaatcacagcacctgctgctgtcgttgtcttgttgctgatgacaaaagccatagttgagaagcaatgcgacgatgaggagcagaaaaagcaacagagaatttttgttgttggaagccatggcaaaaaataggacgaaaaattggaattccgacaaatttaaaaaaaatgatgatggaaaaaatggatgcgaaaatttgagaaacagaagaattattgtcgaggcattgcggaccacaaaagacaaggaaaataattgtgtgaatgatactanaataaaaattttgccctttatatatacctcgtactttcaattcactcacaaatcagcactgctgagtcagcagttcgacgcctttt

SEQ ID NO: 2412 - DNA, 1596 bp, Heterodera glycines
ttaaaagagcaaatcaaaattcgttcgacaagacaacaatttgagaatacttgtagaagattttgcaaatcgtgatccctttagaatatttacaggcttgttcctatcactcgaattttgatttttttaataatatttggctaggtatacgtatttttacgaattaattttcactgacgaaatcacttactgacgaaatcactcactgacgaaatcaccgggaaccgtaaaatctgttagacatcctatataataaagttgagtgtctggggggggggggggtcggtttagtctggcaagctgtttttgtcacttctggattctaatgttttttgtcgaaaaatttttaatttaatattaaaacatatttatcaatgtattttcaacaaaaaaattacggtggaatttcataaatttcgatataccaacgagaaaaccaatgatgttatcgggattaacatggacattagcatggtaatattgatcattttggttagccgggttatttttgatggcattttactctgtaaaaatcgaagaattctacgaagttcagcgatatgtttcatgtgaaaaattcggccatctttgaacaatcagttgaaccattcatgtgtacatcgcttcacactgaagttagaaggcagtagtaatcggaaacccaattaattcgcctaaattacaaaaaaacgtgaaaaaatggaattctggtggattgagtcccggtgattggaattcaaaagaatcagtgagattgatccccagtgattggaatgacgaaggattgcttagtttgagtcccagtgattagaatgctggtggtttgagtctcggcgattgtaatgcagaagaaatggtgagatagagttcctgattgtaaagccgaaaatacgggtccactgcgtttcggcactctcgttttggcgccgggatgttttcggctacaacttttttctttgccacccaaatccaaaactcttgttatcgaaagcttaacatctttagaaactttttctaagctattgcttcgcgattagataattaccaaaaaagttatacatgaaaattgccaaaaagtcaaaattttcaagttttttctcaataaaacttttcgtttttgataaggctaatagagcatgttaagagctttcgaatgataccaagattgtgggatttggatgccaaagaaaaaagcttaagtggaaaaacgagctggcgccggcgcgcgtgggtcccggaaataccgagggttccaaacgaagaaatagtgcaataattggcattgtgtttttatgccaaaaatttagtggctatttttctcgttttttactggttaatgattagtagtagagtgccacgggaccgggaccgggccgggaattcccggtcatccgaggtcccggtcccggttcccgggttttgaaaagctcaggtcccggtcccggtcccggtcccggtagggcaaccgggaaccgggaaaaacaagcactggtaagaatggggggtctgagtgaaaaattagtgaagaaaattggagtcaaagggaaaaataaaaaataataattaatatattctttaaaagtaacactgcctatg

SEQ ID NO: 2413 - DNA, 1304 bp, Heterodera glycines
  unsure (1)..(1304): unsure at all n locations
ctgatttgcctattttagatcactactaatcagctntattacaaaatttttggcgtccgttacaaaatgatcatttttgaaagtgcaaaatgcggatgccttttggtttcaaaaattttctctttgtgcataatttgcttatcactttgctttgtaattagcgccaattttttattcgacaagctgattgtcttccgtttaattggttcttttcttttttttttgttactatatcttccaaaaagattcgaaccatttttaatttctaaagcccattcacagcaatgggacaatcagcttgtcgtttttgtgtaccattatattgtcccagaacagtaatcacaaattgccttttttatttttgtattcttttttgtacttgaaaatcatttaaccctttcttttattctctacattaaactaaatttaatttaaagaaatttttttatcttttttatttttgtgaaattaacatatttttatgcgcttttccctaaccaaatttagcccatagttagaataaagcgaaaacgcttttttaattcgaaaatgtttgctacaccggaatttatggatgccgaagacagtttgatggagatgaaatcgaatcagttcaaaatggacaaaaatgagttcattgccgcggagaaattgatcgacaaggtaagcaaaataacattttaatgatataatgaaaaatgaaattgcttacatttttaggactactacagggactttggcgatatctttgacccggatgtgaagtaaatgcggctactttttgtgcggaaataagcaaaatgtaatgttgttgtttttgatttttgagacataaaattgtgtatgaggtatatgaaatggaaacaatgaaagcgtagaaattccagataattggagatcacaaatgagaaaataatttccatcgggccgttaaaacatggtgatttaatcttttctgtcgcagtttggcgttcaatcagtcacccaatcgaaaagtgtaaagccatctcttccgtctagttgaactattttgtttggtattaattgagggtaattaagcgacttattaacggttaggcaatgaaacaaattaattttttggggtgtttaatcacgcccaattccgattgaacgtcaaaaaactgcaataggttcaatgtgatcaaaatggtgtctcatatagtgaaataggcattgatagtctctgatagggcactttgtgtgtttgttgtgtctttcctttgtgctccccgcgccgtgccatccctcacatttgccggcatcgaatgacgtgagggccttct

SEQ ID NO: 2414 - DNA, 1768 bp, Heterodera glycines
  unsure (1)..(1768): unsure at all n locations
ctcttcctcttcgcgtgttgagtcgacttggaagaggccaagtccgaccgaattgagcagttgctcccataccaattccggtgttctggcacgacggttttgtctcatcagttcgtacagttcggtgatgtttctatcttccgcgtcctctgggaaattcgcatcagttgcctttttcagttgagtctgaaatcacgcccttttctcgaatatttagtgcgtttgctgagtccgtctacagtttataccctcaacaaaaattcttcaaatgaatttagaagaacattttcccccaatcgttccccccccctccccacgtatttatccctaaattcttttcatttatttaacgaaaagttcaaaaaactgaaacgactaaagttaattgacgaataaatattaaatggtattgtccctttctaaccgatgcgggctcccaaaaacggatcacgtcgtcaatgccagaacttgcgattaggcatcggagagggtgtggttggcaacagttcactgtgtaatggtcgccctaaacgcgtcaaacaaaccattaagaattgttttacacttatttcgggtgaggagagggggtcctaattctttgaattctccacaaaatttagtgcgatttttctaattcatagaaaatttgttagtgagatttttcaagtaccaagtcagtcaaaatgaccttgagtgcattgacgatgcactgactgttccgttcccaaatgaacaatgagccgcaatcgctgcccgccacaatgaattggtcgtcggggccaaaccaattggactctttgatgtccgtgtttatgttcaaatggccggtgtaacgctgcacatagtcacgatggtgggttgtgtactccggggtccacagcttttcccctgtaaattattcctttcccttttttggattataagagattcggcagcaaatccaatttttacaaattaaatcttttcaattcaatcccccccattcattaccttcctcttgctttttgtcgcccaacaattgtttcaattcagttgtgtgctcatcgtcaaaatggtgcaaagtgcagtagtgttcaaaacattcattggccaactaaaaaacgacaaaacccaattctttgggtgtcactttttgggatttgaaaatgcttaccggcagttgttttagagagatcaagcatttaatgagcaaagaatgggcctttttgtgcgaagggcagaagagaagaatggcgaggcaatccctgaccgagtccaattggtccccgtcccaattgcgctccatgaaacaggaagctcggatgaacagacattggacgaaggcattccgatggggaagttgagcaaattgttgtttgaccaaggcactgtcatcagcagatccaagctttgagaacagtttgagacggcgttgaacgaaactgaaatggatggaacagaatgtgtcttttttaagccgtacaatccccccccaccactcaatttttattcattttttgctactcgaccaattagaaatttttccacattttccatttaaattttggccagtaaggatggggtggggattcagcggtgtccgaaaacctcgtttttaccctattatttccgttcaagacctttgcataattaaaatcggttacattttatacaagttttctaacttcaagaggtggnganaattggatttctaacaacaaatcgctttgagagnntaggattgttgaaatacctataaatttgaacgaattttcgtaaggaaataatc

SEQ ID NO: 2415 - DNA, 2556 bp, Heterodera glycines
gattagaaattggtcgaaatggaggcctgattcgtgctcagcgcctcaaaactcccctagaaacgtgttataagaattttcagaaaaaattttaaagaaaaaattttcgggaccaatgatcgacatgattgcccgagtatttaataacttatgttgggtctgtaaacacactgaatatgtaaattactgcatgcaattagctttatatgttttattccatcatttacatgtgtacatagcatacgcgttacaacatcaaatacaattatcgattaacacaaaggatcgatcgcaggggataatggtacagacaattgatcagagatgggatagatcacaaacaaacacagcaaatgttgtacttcgcagagcgcacatcgtccgttcacttcttggcaattcacttgggcttcggaggttgcttaaatgtgaagttgaaagttattgaagtcaaaacccagcccattttcaactcaccgcccaggccgagacttcaattggagttggcgattgtgcaacgcctaaaattgaaagatttagtttaaaaagcaagtaaaatcgacgcccttctctcccacctgcgtaggtcgacaagccgggcatctgcgaatttgccatggtggagccttgcgccgcactctgtcccatcttggaggcgccgccttgtgccgcactctgtcccatttgtgagccctgctttgccacgcttccctgctgcatttggtccccagtcggcgccatctgttgttcggcagcatctttctgaaaagtggaaaattcattagactcaaatgttaaatttcaaaaatgccggcctcaccttcccgcagccgcagcattgcgtgacgatcaccagcacagaagcggcaacgatggacatcagcaggggcactatgggtcaagcccagtgttagacaaaattgctcataacgccaaatagcgtatttggcgtaaatttttgcgcgttaattcaaaatttacactggaaaatgtcttttttgtattttttattttgatctgccataactcgcttcattcccaactaaactgaacaaatttggtatttaaaaaaagtttttgaaaaggtgaatctttttctaagcgaatgctaagcaatttgacatctcagaaaaaagttgtgatactttcaaatttttatcacgttataactcaagtcctaaactgctgatttcaaccaaaatgcgaaaactaatcatttttctattggttctaaatgtccaaagtgaatttgtacccgtataaccaaaattataggaatttgcgaatttgatgttttttcatgtgttagagacttgaaaatagtacgccaaaatgagaggaaaaagaaatacgtttttattattatttacaacttttgagtttgaccatagacaaaattaaattcactatagaaagatgcagaattcttttctctatcgatatgcaaaatttggtgtaggtttaacgtatagaaaaaaagttaaacgtagcgaagtaaatgttactttttacataattaaaatgaagagatagtacgccaaagtgagagaaattacaaagaaaaagagaaacgacgagatagtactaggcttttctctgcacagtggagttgacccatagtgcaggggcagcagttgaagtgaaagggacgcggtgaagaggacgtcgacgagcatcgcagggaattaaataatttgtaattgaggaatgatgaggatgaaaaaaggtgggaaaatcgcaatatttatactcaattttcatttttgagttacaatttctaaacaaaactttttgttgctaccattttcatttaaatatagaaaataacaaaaggaattcctcagtcaatctcaattccttcttcgccgactgttccattctcaaaagcgtcgtaccataacgtcaccctcttcataaccctgtagatttttgtcatttgttttacttatttgttctaatttcaattttttcagcatgaccactccagcaaacgcggcgagggcccggagtgccaaggcgaagctgcgcgatgccaagcggaggagggcggcagttggacgcgcaggatacgtaagttgaacaaacccccaatccaaaaaaacaaacaatgaaatttcccaaatttcagacaagaaaagcgcagcggggcgagcgatgtgccatctgcatgaccaacgtgagcgccatcacgcggacgacgctcggctgcacccatccgttccatcgccgctgcttgtatcgctggatccgctaccacaccaattgccccgtgtgccgctacaacttcacccgcactattccgcgccgtaactaaccgctgtaagatgccatgtgttgtgatcgccatacgatgtcatttgttgtgatcatatttgtatcccattgttaggttatgcgtatgtatttgtacaatggaatgtatgttcttatatgtattctgtatgtatatataatactcgtcagtaaataaaatacgtttctaacccttgtccttttctatttttgaatcttaaagtgtgtatgaagaagctttgttaattaggggagattagaaat

SEQ ID NO: 2416 - DNA, 2443 bp, Heterodera glycines
ataaaaacatgaatccaaaacatgaaattcgaaaaatttgaattttcgactttttgttcgaattcgggtccgggattaggaattggcccaaatggatgtgcattcgtgatcaacgaccccgaaaaccccctaaaacctatcttttaaacacttaatatataggcgctttaagctttcgtttgatatcaatgtaggtattgatcaagtaagaaaaatggatctggcttttggacccagcaacatccagacccggcaatacccgtaccagtataatactattcttttccatcaatatatataaaatattgatattcaaaatttattgctaaaacaatatatgtaagttgaaagaatagcgacggatcgcacataacaaaataaaatggtgaacaaaggcacgtagacacaaaatgacgctgacattggccatcattccatcttcacaacgcccactttggctggtcgaatcggacggtcgtgcaaactgtacccaatgttcaacacatgcgcaatgtgaccggcaggcctatctgactgcaaattgaacatattcattgacttcataccattaaaatgacagaatgccaaatactcctaggcacatataataggaccttttgggaattttgctgattataaattgcaaatatgcccttttgttgcaattcttgcctggtccttcggtatttcatacaccgcttcgtgcaaattcgggtcgaacttctgtccttcgggttgaaccggtacaagcccatgctttttgaacgtcttcagcaacacttccttcgtcattttgatccctttgttcactccactgtccaaggaggcggcaccgtcctccgttttcattttttccaacgaattcaacgccaagtcaagcacatcagccacctggaattttaaaaatcaaagaggactcaatcgtcgtttcgggctttataaaacaaatgtgttgaatatattttcttaactgagtatgaatttcactaacctccagcaaatccttgcaaaatggctgaattgcaaaaagttttgcctcctcaatttgccgctgcgttctcttccgcaagttttccatgtccgcaagtgttcttttgtatttgtcggtcagcatttcgttgtcgctcttcagcttttccatctgctcgatttgctcccgacattcctgactcattccctcgtgttgcgttctgtcggatgagaaggaataggaacggagaaagatgagccctgccccttctagaaacagaaatattccactattttttatcgtccactttgcgcttacctgtaaaaccaaaattatttgtattgttcgacccggtaggcttatcaaatcacgcatttttgtccatgtgattggtcgtccgtccctttctttccctttttttttcaccctccccactcctatctattctaaacccactgattgtttgtaggggaaggcggcgattgtttgtcggacgaagcgctcttcgttgtgccgaactcgatgtgttggttcatcttggagaagtaccttcgcaaattgcagctcaaaattcgactggtcattgccgcttttaaggaaatgaaaaacagaggagagagaagcaaagagaaaattttctggaatttggatatttatagcataagcttccctagggaaagacaatttgagtcaaatcaactctcgtttaattttgctgatctaccaaatttattatctctaatctaacgaaacctcaaattggcataacgcataataattagagagagcagagaaaaatacactctcattttggcatactcctattctttatctggaaaaagcagaattcgcacagtaaatttttttttaacgcatacctatttgagtggaaagttttttatacttaaattaggtaggaagaggcaagaactagggatcttttgtatctaaattcgtcatgatgagtccggggatgaatgaaaaattacaatgttttcctattgtggccattaattattgaaatattttttttgttctaaatcctcaaaataattctttatccgctaaaaatattaatcatttattcattttagcaaatatggatttgaaagggtcaagcgaaaggacaaaaagaagggagaggaaacggcagcgaagctcttcttcctcatcttcatccagttccgagtcaagtgcatctaccgacacatacgacgaaggttcaccgggcagcgaagaaaagtcagccaaagcgcaacactgaatgggccagaaacagagacaaattattagttttagggccaaaaagtcatcgaaaagtgctggacggaggtattcgtcgtccagcaaaggtcggcaccaccacgcgcaacagcagcagacgacgacgcattcccatcgccaccattaccaacatcatcagcatcattcgtcgtcaagaagatatgaaagaaaaatttcttcccatgaaag

SEQ ID NO: 2417 - DNA, 1487 bp, Heterodera glycines
atatgaaagaaaaatttcttcccatgaaaggcatgctttttaaattaaatttaaattgttacctttgttccttttcacagttattgtgcatttttagtttaattatacttttcattgaccttttcctttggaatatccttcaatttattttcgtttttaatcattcctaatttattaacaacaaagcaaaatctgattgttagtttgattgaatgagtttcttttctcgttcgtttgatctactctgacttctttatgtttttgatgttttcagggacaaagaatcaaagcgaactcaaatttcaagttgtaacaaatttacgtcctctcggaaacggttagttgacgagtcggcggatttagcgaaaatagccatcacttacagttagttagctggtattgtattgaaaattgtttgtgttaaagttgatcttttctatctcttctatttgtgtgttatacgaagggctcccaactgaaaattttcaaaaaccagctttgacaccttgaaaagaaaaaatgctgataaatcagcagaattgggagtcctaattacctatacggcatgcaccattgttaaaagtgacattttcgtcatcaaataatttgtagtaagcatccttttggctcacctttgtgtgtattttcgggattggatatggttggccatttctgcgataaaacaattatttcaacaacaattgcaggagtagcagggatcagcagagccatcacgagcacaaaagcaacaaaaacgggcactcgttgtccaccgcaagcagaactcacagccgagcggagacacgtcacagtgacagcaaaaagggcggcagcggcggaagcagcagcagacaccactaccagcagcagcaccaccatcggcaccggagcagaagcagagagcgccggaagaggcggtcggcaacgccaccggcgccggtgacatcgccgccgccgccagtcaccgcttcagcagcagcccgagttgagcacagcaatgacgaagccggagttcgttttgctatgatatgtaaaatgtttgttgatttttgtgagcgtcacaagtagctgatgcagcatttgatttcgacaacttcgaaaactcgcgattttttcttttcttttcgcgttgccttttttattattaatttaaccatttccataacgaaataccgaaattattatactcaatgaaattgctcaagagtttttgtttactttttaatgttttaaggtgtcacattcgcttggttctcttctgaacattcgcaagccatcgaagaaacggcgaagtgaagaaagcgaccaacgaccgctcggagacgacgcattttcggacagcaaaaaagcgccggaacaggtggccacgaaaaccgaacacccaaaatcgacgacatcaacaaatgcaccagcagcggcaccaagtgccactcataccgccgatgttaaaattgattttgattgtttttagttctatcaatcccaaa

SEQ ID NO: 2418 - DNA, 1583 bp, Heterodera glycines
atggcctccgcccccggtcgttcagttaggagccgttgtttgcccacaggcagcgactcaggttcactaccggggtttgaacacggaaaacattttagtaaaaaagaaaccgcacaaaattgaattagatccaattattcatcgggtcacaatgtaccaaaatccgtttgtcatttagaaattcatactattcgaaccattgttgcaaattaaaaatatattgtatgccaatgtaaggtccaacacgtgtcgaacatttcctcgcatccgtacggttcggtttggctgaacatggtcgcgaaccctccgccaccaccaccaccgccgccaattccatcgttcagcggcgataccaccactgcatttcttgctgcaaccggcgcgcctgtcgttgcaccaccgccgccgtcgacgcctccgcctccaccgcccccagagaatgaacatgctggggagaataaaggtttgacgcgccatgcaaaaagggggggggggcagagaaaacaaaaacgattacattattaatttcattttagtgggttccgctggctcaccgccgccgcctcctcctccagtgcccgttcctccgccaaaacgttgcagaccgctgtaagtgtgccaagttcttgattttccaatggcacttgtcaatctatgctaaactggtattattgttctaacagttcggtatatgccaggaatatcggttagcaaaaaacctgactctcttgtccaactttttgtcgtaaatcgtccgcctgaattattaaagcattgagccctctctttttctatggaaccccacttttctttttgctcgaccctttttgtttagtgtgctgaaacctcgcgatttgccaacaatctccgagggctggggcatcggaagtgcggataaattccgcattatcgaacaagtgggcgagggcacgtacggccaagtctacaaggccagcgatggacaaaccgggcgaatggtggcgctgaagaaggtgcgcttggagaacgaaaaggagggttttccgatcaccgccgtgcgtgagatcaaaatcctgcggcaattggaccatccgaacattgtcaaattgttggacattgtcaccgatcggacggggccggcaagtgcagaacagtcgccgcagcagcagtcgccgagcatcggcggcgatttgtccgcacaacgcaagcgacgctcgtccacgctgaccaacagcagcactagcgggggtcaaccagcaggtggtggaggtggtgcgtggtggagtttgatttttaggggttggaaatgagactgattttttttaattatatggaatttatgacagtgccggcttaaatgagtgaaagtaccggctaattgtcagaaatatgaatttaccttgctaaattgtaggtttattctttttactattgtaaaattaattcgtcgtcgctttccgttgtcatcgttctatctgttttttcctccttcagttgcctcctcctttttcctggtgtttgaatatgttgaccacgacctgatgggcctgctcgactcccaatcggtcaatccgtcggagttgcaaattgcctcactgatgaag

SEQ ID NO: 2419 - DNA, 10501 bp, Heterodera glycines
  unsure (1)..(10501): unsure at all n locations
ctctcattggccttcggtggtggtgagagttctcattagggggnaaanngagaangaatnaaaacaactttggccttttgaccctccacggatttttttttggcgaaaaaaggcaacaaatttctgcaaaacacaaatcctaatttggatttcaaaaaaaagaaaagaaaaatacatccccaaaaattgaatttttgaattcagccccccccccccccccgaagccacgggtctggttacgccattggaaaaggggacagagtgagcgatgtgtacaacaaaggaaaatgaaattcaattcacaatttaaggaggagaatggctttgcctttatctgcagactgttgctcctccgtctgctgttgttttgggataagcaccggcggtttcggtggctgtgggaacgaacggatgagcagcggcggtttgggcggaggcggaaattttggtggagtcggagggggcggaaggaaagaaaaagcggagaaaaacaccgggcggaacgggtggatgaattgacaattgagaaataaagaacaggtaaaaactcagcaaatgcaaacaaccttcggcaacaggtcggaccaacgcggcggctaacagcggcacggacagcgactgagaggccataaatgagggctgattgtgaatgtctgcggtggtagtggagggtgtgtcggagcgggccatgggcggaatcatcggaggtggaggtggcgccttgccaagttggagccacggcatggaggacttttgggtggagccctagaaaaacccggggaaatcgaatcggttttatagttggcaaaaacaccgaccgctattttgattttgatttcactgctcaataagcgaagcggctttttgaacggagctgtgccgtcgccgccctccgcctcctcttcgcccgcttctttggccttttgcgtgcgccgcttccaactctcatgacgaccttaaaggcaaaacataatccaatagcggggatcttttttcggtcggtcagcgttttgtcgccccttttgtgaagggggggggggcttcaaagatactctggacatggacaggttattagggatcctaattaggaaatttcaaaatgccgtcttcttacgctggaatcgctcctcctcgtcgccttcctcttcgctgccgctggacactttttgtaacagcaaatagtcatcgtcatcgcccacgggccctccggcgcgatgcattcgcttgggtggtgcgcctccggcgacgccaagtgggaagttcgggttgatccatttggtgaagggcactggacgggcggcctcctcatccgccacctgcttacagagcgctgaaaggaccaatttatttactgctaaatttaattaatggtgctaaaatttttagcatatttcttaagaaataaatccgagattttccatttcccgggcggtgcctccctctcggcaccgtcggacgagttttttttatttttttctcttcttttttttattttggattttttaataaacagaggttttttctgtatacgtctctactccattattattttttatttatggtctaacatacttgccaactgttccactgatttgattttaattgtgtccaccaattcggcccccttgggtaattttccttcctaaattgacattatttacaatgaaagtttttttttttttttttttttgtcagaccatggctaatttggtggcattttcggtggcaatctccaacagttttcgcttgtcaatttgtccacgattgtccaaataatcggcctttggtcgctgagtaaagaaacggaggttcactcggccaccacggccgcgaagacggctgtaaatttgaatgttttactgacaatgaatgaaaatttttgtcccaaattccacatccatgccccccccccggtttttaatgtctcttattgacttaaacactgacccgcgtccgcgtagtcccaaaatggtcgtagttgttgctgtcgttgtcccagacgttgtttccccattgatcgtccttgccaagccgtatgtgctgcgccgtcctgctcctggaatgtacggacgccggagggtggagatgagtttcgggtcgcgcacatgcgcaggcagctaaaaaagattcaaataatgagtcacattcggttcttttttctccccaaatgcacatgggttttgtcacttaatcaaacaagaaattctcgcctgtccacccgctgccaatttcttttgcaaaaattctgcccgtgccttctcatacattcgccacgagctgaaagcagtggaaattaggaaatgttctaaaaaaattggcttgtcaaaaagtgaaattaaacattgcaaaacacctggcatcaggcccgtacgatcggacagtccgtcgttttttcggctcattatcgctatcgtcggcttaaagggaattatctctctgaacaattaatggtcccctttatgtccattaacttacagctgtacgttcggctgccgtcactgctctgtcccgctctgctggcagcggacgaacgccgcgagcgtgtggaggaagaagaactggacgaggaggaagcgctgctgcttccgctgccactggacccacggcaacgtgagcgccgtgtcgacgacgcggcggaggacctaaaattaaatagtttttattttttgaaaattgtatggcaaaaaaggtccctaaattcccaagccgaaatagggcatattagctaggcaaaagcaccttcgagacctgcttctgccgcgtgaaaccgacgacgcaccagcggatgacacggaaactgcccgctctatttgcgtcacacgcgctggcggtagcggcgttggtgggctcagtgagcgcgcgcataacggccgcagagtatcgccgcgtgggcgtgcagcaggcggtggtgacggcgtcagcaacgagcggcggacaacgcgacgtcgatgggtcattgtctgcgactttgagggcagcagcggtcgttttcgtcgcaccggcatgcgcggctgtgggctaacgcgacgcggaggcagcggccggtaggggcgtcgaattcgctcaggcgccggtcgacgaatggacggcgagcgacgcttgacggcatcctcgtctctgcggatgtcagcgaccgagcgcgaagtcgctgaggaggcggcggtccgacgcggggcggcgttattcggcgcggcgacaaaagctgttctgctgacatgaatatatttaaatggtgtttgagtcaccagaggaaccaatcaatttttgttgtgaaaaagcattttaaagagtgaaataaaacgggttttggcgaacgttgcccagaactgacatccttatggcaccaaattggaaaagctgtttgtcataatggctgccgatttgtgtcaaaaataaaaacaaaaaatccttggagtttcaccttttatgagtgaaatatagccactaataaagaaatgtcgaacctttccgccgctcggctcgccccggcggtgtctttcgccgtttcctccgctggcgtcggcggcggagtcaaagactcatgcgaaacttgcttgtcctttttccgctttttactcttctttttcagtcgtttgcgcagctgtttttctgtctgaaatttttgtaaataattttttttttcggtgtgtgccaaattttcgaatctaccaagtgccattttcaactttattttgtctctcatttccacctctgcggtcccttcgtccgcttccgccgcctcttttcgcgcacgtttcgcctccttccgtgcccgcttccgctccttccgctcgcgtttttgccgcttccgctcctcctcctccagatccacaagttgccacatcccatcgtcagtcaccgcctcggcaccaaattccttcagtacaaatagttactctaatcattttcttttgaatacgaacaattaataaccaaagtgcaattccctgttacatagctttttgcagtgattactttattactatatttaaaccccattttggaaaatattacttttcatttttggctttaaaactgtcgggtaataacttccttggtccatgatagcattttccaataaatttgccattgaaacctctgcgagtgccgtagaggcggtccccgcttccgcttcttccccgtcctccctctgctcttcttccgcgtctcccccttccgcctcttcttcttcatcgttttgttgttgcgttgccgcttccgcctcttttcgcgcgcgtttcgcctctttgcgcgcccgcttccgctccttccgctcgcgtttttgctgtcgacgctcctccgcctcagccgctgccgcaaccgcttccaaaaatgtctcgtcatcaatatccataggaatatgtttgcactgagataaaattactgtttatcttaagaaatgcaaaattattgcccagcagaaaacaaaagcgatgcagacaatgtgagtcaaaatctcaaagtctatacacaaatgtatgtgaattgttgttctcatctcagttctcgagagagagagagtgacgactaggaaaggcttaaggccaaaggcatttaaataaaacgccaaaatgttacataagttaaaattttcgttttttcattttttttttctaaaatttttatttgtttcaagacaatttatgcgttttaccattcaattacttcaaaaatcgcaacgttgttataaacttctttttacaaattacaccaaacaagttgcttctgtgtcgccgcttttaattcatagtcaaaatttgataagtttttcggccttccgcaatttttgctcttcaattgagacgaaaaaggaggaaatcggccgaatcaaatcgcaattggcaatcatttttacgtgtaaagtctgttccacgagacaggcatggcttttgctttatataagcaaaccctttcgattatccccaaatttaggggcctaagcaattctcgcgttcagcttatgaaaacggcgttgtgctgatccgatgcgatcactgcagaaatcaccatattattgcggacaatttgggctggttcagcgatttggacggcaaaaagaacatcgaagagattttggcatcgaaaggagaggcgatcaaaaaggggacggcggtgttggagatggaagtgccagcggaggaggagggggacaacgccaaatacagcaaataaaaaagggtgatgatttaatgaaatttgtgaccgaatagactcaaatttgcgtcgaccttgccctcatctccccattctttagacttctcccaacaaatgttcgaccacatcggtgccatcgatgactccccgtcggcgtcctcttcgttgctgattgccatcagcgagttgcagcgggcactgctcggcattggctcggctgtcatgtcactggtggacccaaaacggggcgacatggtcgccacaatgggcgaaacgacggtcagctcaaaaagagaggggcgagggggtcaattcgaatttgtcctttactgaatttgttgaggtgggagctgttcttgtcatttggcgtaagaatgcattttacggaatgtttagatttttgaagaattcatttttttgcttttacctaaaattgttcccaaactttctttttgtacattttcctatttcgtggaaatcccattctatttccgtgttttttcacttttcaggttccccattccttgctgaaacatctccgcgatcggctgagtcgtgacgtgagcggcgctgagcttttgcggaatcggccgcgcatcagtggcgaaaccatcgaccggcgatggttggcgacgcttcccgacggaacgatgggcagggaatatttaaggtaattttcaaaaaatcaatccaatgaaataggaaattgagcccaaaatcaatctcccccaccctcattattttattttcaaaagcagaaattcaattgtttgttatttacaaatagggcatcctttattcgccttttataccacacttccgtttttcggtttctcgattcgctcaacacttccccggacgcgcgaccgcccgttcaatttgttgcggatgaccccgaattggtatacgtaatgcaaaggtcccttttttgcgtttttattccaattttccattttctcgcttattgtcagatatcgcgaaacccacgactttacgcatgttctgttgcaaatgcgcccaaatatgctgggagaggtaaaaaatggcccattttcggtcgataatattagataaatgcacaaaagcaaaagtagcattgtttttaaaagccaattaaatggctttgtctttgcatgggaattgcgaatgcacgcgtttttcaacgttttagcgaataattataaaaacttttttgggaatcttggatggctttatttctttttaatttttgatgctccctgactaattataggatcctggaaaagtcttgtatacagaaccatatcctttccgggctcactgaatgctatcaattttttattttaaacgtaaaaattcttcaaattaccaggtgaccgtcaagtacttcgaggccgttcagcttggctttcccatgtgtgttgctgccgcgattttcggcgcacttcgacttggcccagtgtaaatgaccaattactccctctccccttctcatccttttgaaaaatggcaaataccaatattatggggtgtccatttgacttcaaattccttcactacttctccaaatttccattaaaataatcatttttagccatcgtcgtcagctgatcgaacggaacattccatgggttgtgcaacaggcggagaggggccgttttttgttggcgttggactgggaacgccgttttgagcagaaaatagccgatttgcagagggaatgctccatcgaaccattttcagcagaatgttcaaatgaatgattattcagttaaaaagaaatgctcttttttagaaatatttttttcgcaataaactttctttgtatgttacgcatttcgatccgctccattttctgatcactgtcatttttgcacaaaactttcaaatttgtttcgatttaaattgagcatttttcctctaaattcggcagatattcttttcttaaattgtcacttttttatctgtgcttttaatcgattggtccttttctttcgattttatttatttcctaatttttaaagcaaactttttgagaaaaatttttagatttaaaatagaatggaaaaaatgagtgagttacccattgaacgaatggcaccaaatttccatcggaactacaaaaatgtgaagaacatataaaacaaagttgaaatttccatttgagtgcggagattcgtttcattgatccaactaaaaaagaaaaattagggaacaatttgatgagagaatttagtcaataattaccgaaaatggattaggcttttataattcgaaatgctcattcggttactgtatccaccggttcttctgtacgcaccgttacggtgggtgcctccttccttacctatttattgctgctgttgggccgacctccccacgccgttcgccggagtgaccgttttgggggcggacacggcaacaacgcccaccgagctgatacggtgccgctggaacactttcatgaacaatgagcagctgtccttgcggatggttttgttcagtgccaaataaatgaccggaggaaatccttgggaaaagtggaaaaaaattaaaattcaaaaagaaaagccgacaaaacggacggaccgtgggcatgaaacctgaaaagttaattaggatttagcaaatttgaaaagacacttgggtttacataccaagcaaattcggcgagagtgagcatccattgctggcgcaagtcgttgtgttgcatgtacacgtagagactgccggtcaaagtgttgatcagagagaccaaaaacacttgcagaaaggtcggaaacaatcccaattattaatttatttattttaatttctgtgacccatcaacacctttttttgcattgtgttaaaatcgtaactcgaagcgcaaagaacgagggcaaagatcagataaatgcccgggcacagaaacgccaccaaaatgtcgtggaaagtgtgcagttgaacagcgaactgtaacttaagggaaatgcctttttagatggcacttttaggcctttgtcgagacttatcaaattcatgagaaaggaagagcaatctcgagcatattttcgacttttgtccgtccgtttacctcgtgttgattatcggggcgatagccgacgaatgggaaaaaagaaccagccgaagtaaacactgctgtaaacggtgggtttgacgaacacggcccaatagagggcgtagagggagcagccgaagagccaaagcaaagtgcggtggccggagaacaaaaggcgcgagaaacgggacgagctcagctcgagacagcgattgaaggccaaagcctggcggaaaattggccgatggattgggaggaaagggctcccaggcaaatccgacagcgaaaaaaattttaaaaataattaatccgataaatgcatatgcaaaaaaaatggatgataaatgaatggacaagccacaaaaggacgagaaatgtagcaaatattttgatcagcgaaaatcactcccattgctatgattttctgaatcgatctttcacaagttcctttttattgttttttccttttggcgcttgactttctaactttttgttttctatatgtttttattgcccgaatcaaattaattagactcatttgtcagatatgtttaggaaatgatcgaatattactataaaattaattttttaaatttttattcgctgttggattgtcagtcatggggtaaagctgtgccaatcgctaccatttagcacatttttaattcttcttactcaaaaaattgcccgtcgtggattttttttgtcactttgttaggaattggtcaattcgtaatatttttctggtccaccgcacttgaagaacactcacaaccaaataggccttcactttaataaaacacacaaaacaaaataaaacaaagtcggaagacgaggtgggaaccaacaatcaacaaatccaaaagctggaggaagaccaaacatatatccactttaagagtggagaagatgtgaatgaataaaacaaatatcaataaaaggtcaaaatgccgaaccttgaaactacgttaatgtccacaaaaaaatagtagtaaggcacctttagcgtgattggtctaaggtagcaaattaattagtttttttaatggattcgaggatgaatgttttttttattttttttaataatttattaaaaaattaaaaattattttttttataatcccaattacgcactaatttaaataatatcacaaatttttacccactcaaatttaaaatgattaattgtaattttttgtttctcaatggcacacttttgtccctttgcattttaccaaatcagcagtgctttcagcgatccaaagagcttaaaaattaaagaaatttttttcttaaaaatgagtcaaacataaaacagccacgcccacaaaataattcagagttggaaaggagcagaaaacggctccgtgcaaattgagccatccgctgaagaagccgaggatccacaagttggccaagtcagtgatgccaatgtaaaagagcaatttgtagcaggaattatcgcgtaaatgaagccaaatggagtacatgcagggcacgtacagcacctaattgatcccaattaataaaattaattaattaacttatttatttatttatttgaaagaaattgcttgtaccgtgttctggtttacccgttacagtagcccaagtaatgctcaatacggtaactaattttcaacccaattacataataaatggcgcacaatacgcagatggcgattgactcgggcacaaattgccttttctccaacggaatggcgtcgatgtccaacccagtgcaattgtaaagcctttcgtactccgcgtgacggaacagaaacagttccattgggtcgctttgaaaagaaatgaatgtggcagaagaaggccaccacaactcttaagccacgggagaaagccaaagagaaagtgcgaaaaaggtaattatcgtaattagttgaaatgttgttattacatgctaaacgattgccagtgcatttggcactaattaattatcaattgagttaatataaaatattctaaaaatatttgagtaattcttacaaatttttttagctgttaggcgtaaatgtaaaagaaaaatgacgacgcattgtttaattgcccattgcttttcccattggcacgcattctctccaatttggacaatttgctttttcttcaaatacaaaaaggaccaccccacgcattattaaaaatggtttttgccgtccctcccccctccctttctcattttttcccataaactattaaataatcaaaataatttatagaaagaaaatttaggctcccggacatttggacagtggacatttggacagtggacattacgacagtgaatgc

SEQ ID NO: 2420 - DNA, 1658 bp, Heterodera glycines
atatggatttccatataattacacgccctagtaattattcaactgttgaggattttttaaaatctaaagctgaaaaaagtgaggctgaaattcgaaaaaaagtaattttgtcttcaactttttctggtgacacgaccataaaaaaatacgatcataaatattttggcaacttaataccacataacattccaagaagaattataattaaactttcttattatcatttgatagcaaaaggagtcctctattagtctgcaaaatgataatggcttttatctattctttcttcatcttttaattatgaaattgacatgttttggttttgttttgaaattataataaaaaatattggtgaccggacatttggacagtggacattacgacagtgaatgcaaattttaaaaaaggataaaatacgtaaaatatacaattttgatcctattaatagatgattaaatttttcaaattggatcaggcattctatatgcaattgcgcacaagtacgccaaaaagggcgattgacacggtcaaggtaaatggcgcgaacctaaatcgagatagcaaagaaaaagataatgggcttcaaaccatcagcaatgcgactgtaggcttcatagctgtattcaaagccatatgccatgagtacaggtttttgacggatagtttcaccaagaaagaaacgtttttcataattggcagggtcgggattttgctcttgagcctgaatattttgctggggttcgtggatttccccctcttcagaagatgaggaggaatgcattttggtaagaatgaatgacccataggcattaacgggagagaatataagcgatgttttgcaaatattcttatcaagaaccaaaaaaatcggtgggaaattattaatggtcagttattggaattagcatatgtttgcaaaagttgttatcagtaaaaaatttgcattcactgtcgtaatgtccactgtccaaatgtccacttctgtccaaaagacttcactgtcctaatgtccactgtcgtaatgtccactgtccaaatgtccactgtccacctttgttcattccttcgcctcatttatcattgtttttggcactttgcccggtgccacccatccgccaaatgttcgctcaatctagcgaccaacagcgataagaagggcctcgttgaaatgggaagcgatcagctggacgcccaatggcatatttgtggtcggactcttcggaccgattggtgccgcaagggcagggaggccgagaatgttcggcatgtaaaaataagtcaatttcaattttaaatctcaattttaaatttcttgttttactttgatgtattcgctgttgaacacccccgtgaacggttcctggtgatggtaaccaattgtggtgggccacaatgggagaagcagaaccccgtcactcccgagcagttcagtgagctgccgaccaaacttttcgacttttttcacaacctcaaatttataataaaataattaattatttaattgcttacaaattccttctcttcctcatcttttggcgccacaaaatttcgcaacacttcgaattcccatgaccaaaaggttgcgttgattcgcccgcataaatttggaagaatttgaggagccacagagacaagggctgccaaattaaaataatcaa

SEQ ID NO: 2421 - DNA, 1057 bp, Heterodera glycines
ataataataataataataataataataataataataatcattataataataataataataataataataataataataataataataataataataataataataataataataataatattattattattgttgttgtcagatgatgcatggttcgttctgtgcaaatgtgactttcaaagggaactctacagaaatccaatggtttcaaaaagagattttactgatcgctgttcagatcatggatcacgcgaaaaaatatgtggaaaatgaattggtgagccatttttaacctttactaattgacaatttatgataattttaataacaaaaaaaaatcagtttgtagttataaacagggatgcaaaaaatattcacaaaaatgaccaaaatatgcacctaaatatgcaaataaaattgtcaaatatgtacaaaaacttcaaaattagggggtgaacaaaaatttatttctcataaattttatcggttatttttgtaattgcaaatcaaaaatttctcaagattctcggcagtgaaactcactgttgacccactcgcgcatccatatttggaaataattttaggcctaatcaattttttttcttaagggatattcaaatcggtaaatttttgacgaaaaatggcaaaatatgtatgaaatatgcagaacaacccaatgcatttgcatattttttgtatccctggttataaatgccaaaaacatcattactataaatattaaatactcaaaaaatgataatgttaaaaaatgttttttaaatgtattgaataatgtttgcagaaaataattataaatgttaattatatgataattgtttaacaaaaaacaaaatttcttagtcacaaaaacgggcacggatttaatcaatgaaattgcagtaaaaaaaatctgaacttttctgacatatgctgtaataataaaaaaagaataaatattttttttcattatgcattttgaaattattaaaaatttattacaggaaaaaacatttccgctgattgaaattggattggtcgaaagtaaaaattgatcaaa

SEQ ID NO: 2422 - DNA, 1737 bp, Heterodera glycines
taagcttatgcttgcttggacctaggccaaggcttaggatttttttgttaaatagttattgtacgagtttgcctctgtacaaattaccattgacctctatttcactttacgattccaatcaatgatcatccgcagcttcttagactgtgattttccaagtttaagcccacaaatcccctcgcttgtaataatcaatattactaaatacacccagtttttcacgaaattttaatcaattttaccagcagcacagaatgcttgttacactagagttagacatttagaaaaaagcctggacttgatcctggatttcaaggtttacctgtacctggatttcctggacaaattccaagaaaatccacgcctgggtccggatcatcatggtcgaactctagttaaaactatagaaagcaaaacaaaaaattgaaatcgaaaacaaattggaatgtgtggtcaatcgctcagccaccctaaatttttgaaattttgcccatctttaaagccaacactaatgttatttatttgggtgtttacgcagatattatcggcaaggctttgtgtcgacaaatttgcaaaatgataccgacttcacactgcgctgttcccctgagaattgttttgccgttttggactacaacggtgtccatgttgtgataacccgcttcgacacttacgtcgaccaaggcagagctatcgatgcctacgattggcttttccgcttggatcaggatgctcaaaccatccgcagacagtttttggcgaaataccttcagtatatgagggggggggggaaattttttttgctatttttgctcgattattattattatgtttatctcttttatcgtatttttgggggcttagatccatatattttggcagtttttatcgcatattttcatttaacatatttatttattgcatttttcgatccataacttaatattgtaaatatttattattaatatggcatttaatttagacaatacttcgacattggcaaaatgtctgttgttctggaccgttttgaacgacggcattttccgctcacgaacgaagaccaattccacaatgtggccattctgcgcagaaaatgtgccgttcaatcatcagcattttattacccattaataaattttacggacacatgtacggtcacgtattattttcctggttcctttttgcatgcctgccaatcattcattatttacttttttgtataatattggcaatttttgagaaaaaaattttggaattttccaaaaaattggaaagggaaagttgcaaaaattgtcattaacaaattgaacaatgtcagcattgaattgaatgttttcaattgcattgggtgagcatgagcaaaaaagaatttgtataaaaatacaaaagattaaaaataatataaaattttaaaataaaaattttttacaaaattaacacaaatccacaaattatgaacataattttgctttaagtatttctagttttctattatttattatgactgcatgcgttgaaaagattcaaaatttataaatagtcatttaaaaccataaaatttaatttaattttgtaaattgaattgaagaattttgttgtttcatgtgcttattataatgtatttttactggcattttttataaaaatttctgattacagaattatgacttttataaaattggtaatacgtccgatttcttaaaaaatggcccaaaaattaaatttagcaatctggta

SEQ ID NO: 2423 - DNA, 4521 bp, Heterodera glycines
tcactatttcggactttttgtcactgtttatttactatttcgacattttttggaaaaattccttaacaaaaatgcaataaacgaaaaaatacacccctaagaatcgagctaaaatttttcaaaatatactcctatgaaatgaaaaaaaaattttctcaaaaatttactttcttggcaaaaatttttaattttaaaaacttttttaggtaattattttgggttttttgctcataaaaatcccagtcctactcatttgcaactgcaaatagtgaataaaaattatttttgctcaatttttggctgaaaattatgtcactattcgtcactatttcggactttttgtcactgtttcttcactattttgggatttttactcactattttagttaactatttcggtatttttcgtcactaaaagttgcggccctaataattacgtataaaagaaaaaggattaaccagaggccatcatgccaaaaagcagttgctgatcctaacaaatacaataagtgggattaaataaatgccaaattaaaaattgtagaaaaaataaacaaaatcgaaatgcctatgctttgctaaaaaaatattattttttttcaaaaaaaatatacaataattcagctgaaatggcgaaaatgaaattgatttttaatgtgaatacaaatgacgacagaaaatctaaaatcaattttgaccaattttgcatattaaaaatgtgaattttgatgatcaggaaaaattatatatgttgttttttatttatatttttaaatttaaaagaaaaatttaaatctcggataattcactcccgcacatttggacggaaattggacactaaaaattagacattaatggaaaattggacattatttgatataaataaataaatggagcatattaaaataatatcttttagccaaaccaaaatttttgtttattaatttttaatttattatatttttataagcgtatattgttattattattttaccatcgctataagaaagccatcacttatcattcataaagaaaaaagttttcttttagatagagttcccatttttcgtgcattttttggcacatgacaaatcattgtgcctattgaatgcttgatcaacagaaatcattaattcattaatccatttttcgcgcgaaaagtcaacttgttcctgcatttttgctaattctaaaggctctaaaatcaaatccaaatttgaatggatgcgcgagtgggtcaacagtgagcttcactgccgaaaaccttgagaaattttgatttgcaattgcaaaaacaaccgataaaatttatgaggaataaaattatttaattaatttgcacccataattttcaagtgcataataattaaaaattccaaaatatggtacgcttctgccgatcactacttgaaaaatttgaggaattacattttcattaaaaaaacctaaaataatagggcacaattaaaaatgttataaaatttttaagcaaaataaatgggaagataaattaatcataggttaattctcttgacttaagtatctctgcaaagtttggtgagcatctgatccatggacggtaaaaaacgaaaaaaattgccaaaaaataattggcgtaaaacaaaacgccaacacaatcaaacactttgtcaatccgttcatccgtcccatctccttaatccatccatcaattaggcccattcgccgtgccattgttttgctgttccggtacattttgtgttgccatttcttgatttaaagaaaatggaggacgaatttatttgcataggccgccaattcatgacaagtttcacgatcgtttttaaaataatttacccatatttaaattatctttaccgataaacaattccgaaatgccacaaaacgagatcaagcattaatttgcataatcggaaaaataaatcggtaatatttattgaaattataaattcattaaggtcttaccacggcggcatattggacatgttttatgattgcctccatacctataaaagattttttcttcatatatgcacatgtatgaaaacatagacccgaaaagccttaaaaataccagttttcaatgcactggttgtggaaaatgtgctgaaaatagcgtcattaatttcatgtatttaattatatgattttatcttacgttacacggcaacggtctgacaaatgtctccaaaggaatttgatcgagacaaattgcgcaatcaacacgttgctgatcaatggccataaaatgtatttttggcatcgcgcgatatgcagcaagaagcgctggcaattaaaacataccgtacttatttgtgaatattcccttctccccttctaagggtgtccggataaacataccgtacttcttgtaataccatatttccaggattctaagccacacttcgattagaagcccgcccctcaaatataagccacatttggagggggttgaataatagaagtcccggggattctaatcgaggaaatacggtattttcctttccctactatgccaagacaaaccgtcagtggacaatccgtcagtatggaaaatcgtattattcaatttaaaaaaagaaaaaatagctcaacaaatacaaatattccttctcgcctgcaatttgagcgagatatggaccctgatctgcggatcgccaaaaacaatgacaaaccgtcagtggacaatccgtcagcaatagacaatccgtcaataaatttacaatgataaaagatttgcataaacaaattatttaattaaaaaaaattgtaagaaattcaaaacattttatcactatttgggactttcatactaaaattgttgcatttttactttcgcccaaatttgatttttattaaaaacttgatccacactgttccagcccttgttcattttcccttataatatggataacgtaagatctagtagtctactgtagctcagttttgatggatttggtagactaaaaaaaggtgttgtaaaaacaatgtttgcccgctgacagtccgcgcccctcgtccctcaatcaaatcagcaactgctcctcctcctcctcctcctcctcctcttttacctggaattggttgttggtgctgctgctgctgttgctgcaacgcttcgatgttgataatatggttgtggttgttcaaaacaacttcttccgccgccgccccaactgccggcaacaactcaacattatttgcaccccgttgttgttgttgttgttgttgttgttgttgttgttgttgttgttgttgttgttgttgttgttgctgctgctgctgctgctgctgctgctgctgtggtattcgtatgcagcgataatgtagaaagttaaagaatttaaagatgaatacaatgccaataattacagcacaacaaagcaagaacgtgccgaaatcttttgcatctttgtcggtatatctgctgctggtcggcgacggcgcattccttcgcttccgacgcctctgacgacgacgacgacgacgacgacgacctccaccacttgcatcatccaaaatgatttaggtatattttaaaaattgcatatgctttttaaaaccttttgttgttttaaaattcatttcgaatattttacacaattttgacattttttttgaaaatttatggcttttttggggatttagtccccgattttggtccaaatttggcattttcagatttgctgttaattagtatttatgtcaatgtttggcgaacgtccggaaccggaaatattttatgtttgtttaattgaaaatcatttaaaaatgcatataattaccatcatcgtcgtcctgctgctgctgaccacctgctgaaaatgcatttgcgtcccatttcatttccaatgaatgcgcaacaaattcaagaaagcgtcgttcttttttgccatatttttcttttcctttttgccatttttcttcttttccttttttcccacattctccacaactttttagcaccttatcagcgtccaattgacactcattataaatgtcaattaggccaattaaaatttcttttggctccctttccttctcctctcgtgggctttccagtggaatttggccacgctttgccatgaaaaacacggcatatgccaaactctgtttgagttcattaagctgcgcagatattttgttagcatcgtctgaaaatttccgaaatttcggcctgcgaattattttttaccgtattccaaagctttatttgccgaaatgaccgtagcaaataatgcctctaacaattggctcagtgccggatcgttttgattaatttcaatccaagcatttttgacaaagttgtattcggtttcatccgaacaattgtattcctattaaaaaaattttaaaaattaattttttaatgctttaaaattacaaattttgaaatttacctcagaattttgtgggtaaaaaactgcttccaagagagaatgttttttgctaatctcttcaatgaacttccatttgccttggttttctttgccgagaattcttctaccatattttttaaac

SEQ ID NO: 2424 - DNA, 4074 bp, Heterodera glycines
caaccgggagccgggaaaaacaagcactggtaagaatgggggtctgagtgcaaaaatatatgattcttaatttttttttaattgtattttatcatttttaaagaaatccgtacaaattgagcctagtaatcccaaaaccagccttttttgttgaaaacctgttaacaaatctcactcaaattttcaaaatttcccccggcggcgcctatcggcaccgccggtccccctttcttccgctaagttttttggaaaaagcgcgccgaaaaaatttatgtgaaacgtaaatctgaatttctaataatattcgatcacttagtccaaaaatgattaattgtttgaaagaaatgaagaaaatttgatttgaaaattttcattaatttattagctttaacttttgggttttattaaataaaaaactaaataaaaatttaattttgtattattttcacttgaataaattaaaatttgaatttttttttaattttttaaattttttgaatttttttgaatttttaaaaattcccggttggtcccggttcccggtcccggtcccgaagaaaaatcgaggtcccggtcccggcttctcaggtcccggcaagtcccggtcccggttttgcccaaaattcccggtcccgctctactctactcaaaagtaattcaattaaaaaatttaacttatataatctattaatttattttgcttagaacggaaaaagttatcctgccttaacaataatttacgggtaaaagccgaagtttttattatggcttagaaatctaaaatttatatcaacatcacaaaataagcttttcttaaaggaacaccaaagaaaaaaaataaagcaaaaaaatcgagggacctatttaattatattttaaatatatgaaaatattattgtaataatgttcatttattgtaaatgaaaagaaatgatggatgaaggtgaaaagacagtaaattttatgcagttctattagtttgacgtcatttagttattaattgatttagtttttaattgattattatatttacgcatagaaaatataaacagtaataacaattaataactgagtaaaatattgattttccaactgcttcgtgaaatctcatgctttttccaaccgttcgcatttcccaggtatttcacgtgaaaatcattgtttaagtgtggcgaagtgacaaaagtatacataggagtggtgatttttccgaggaggggtcatttcagtcccaaaaaatgatttgaataaataaaattttaaaaaaataaaaaagggccaaataaagcaattttgcttttttaataaatttccgccacccgagacacagactcgacctcgagtcttgagaactagatcgaagcttgacccgagattttccatattataagggaaatggacccaaaagccgggacagtatatcaattttcacgacccaaatgcaaaaaattcacgatcctctcgacccctggattgtttttggcgatccgcagatcagggtccatatctcgctcaaattgcaggcgagaaggaatatttgtatttgttgagctattttttcttttttttaaattgaataatacgattttccatactgacggattgtccactgacggtttgtcttggcatagtagggaaaggaaaataccgtatttcctcgattagaatccccgggacttctattattcaaccccctccaaatggggcttatatttgaggggcgggcttctaatcgaagtgtggcttagaatcttggaaatacggtattagaagaagtacggtatgtttatccggacacccttagaaggggagaagggaatattcacaaataagtacggtatgttttaattgccagcgcttcttgctgcatatcgcgcgatgccacaaatacattttatggccattgatcagcaacgtgttgattgcgcaatttgtctcgatcaaattcctttggagacatttgtcagaccgttgccgtgtaacgtaagataaaatcatataattaaatacatgaaattaatgacgctattttcagcacattttccacaaccagtgcattgaaaactggtatttttaaggcttttcgggtctatgttttcatacatgtgcatatatgaagaaaaatctttttatattggggtgttgtataagttctgtcaccccgaccaaaaatttcattcaaaaatttataaaaaatcaaataataactcaaaattaatcaaaatatgcccaattattctccacaatcttctcccatttttgagaatttaaaaatgatctgtcgattaaattcaagatagttaaactcaaataaactgatcggtctacttaaaaaagtcgccaaattcaaccactgatttcttggccaagaaaaggataaaggtacaaaacaaattatggttttgtagagcaaagttgggactatttgacaagctgaaaaagagtcaccaagaccgacgggttatttttttaaattgtcctgtctgaaaatgggtgctcaaaagtgccaagattcagcacccactttgtacaacattgttctgaaaggacctaataaaatgaaattgatgttttcatgggcaaaccaaacccggagaatccgaatatcgcctcagatttagtcagttgctgttctatgaccctgtactgcttcaacttcttgtcaacgacatggagcagtacaatgccagagaaaattcagagatcaaatctgaggccagatttggattctccggacttgatttggccataaaaactgcttttaataaattccaactgatcaaagcaaagttttgacccgtacaataaaagtgatcgaatttgtaatttggggacacccattggaaaatttttttaaaaatcaatttgaatggggaagaacgaaaaatggcttttaaccgaagcaaaaatgtctgctctttcctataggacagaaattgatcggctgtcacttgcggttaacggtgcaaaaaattccgattagcatagcataagaagggtgacagaacttatacaacaccccaatatcattttttaaatgaaaatcctaccaattgagcttaataatcgcaaaaaccaacctttttttgttgaaaatctgttaacaaattgcacccaactttttaaaatttcccccggcggcgcctatcggcaccgccggaccccttctttcccaaaagttttttgaaaaagcgctccgaaaaaaagtgatgtgaaaatcaaatctgaatttctattaatattcgatgatttagtccaaaaatgattaattgtttgaaataattgaagaaaatttgtttgaaaattttcattaatttaatttattaaataaaaaaccaaataatttgtattattttcacttgatataaattaaaatttgaatttttttttaaatttttaaaatttttttgaatttttaaaatttcccggttcccggtttttcttgcggtcccggtcccgaaaaaaatctaggtcccggtcccggcttctcaggtcccggcaagtcccggtcccggttttggcaaaaattcccggtcccgtggcactctaattttaagcaaaagaagacttgtaaaatgacaaataaatattctgaaaaataaacaaaaatgataaaacattttgtttcttcacttttttttgaaaatcatcctttaatccaaatttgttaaattacatcaatttggcattcgtcatcaatttcttccgccacttcttcatccgtgtcatcctcgcccttcctttcttcataattctaaagatgagaattcagaaaaggcaaaccttttgaaaaaacaaacccgcttcaattcgtcaatccttccggtgtccagcagccaattgttgacgaaatggtgctccaattgttgcaaaattttttccgcgtcaggcatacatttccaccattgttcgagtcttcgccacaccgaatgaagcgcctcatcaccttgaaaatgaaaatattaaaaatttgtgctaattaagcaatttgtttttccccctgctcatccaaaaggccaatgaattgatgttatagtgcaaatggcacaaagtggagagtagaagatgggcctt

SEQ ID NO: 2425 - DNA, 1401 bp, Heterodera glycines
cccccccccccccctcccaagggaatttttggacttttttgaaaaaggcttagaataaaaatagtctaagccttaaattgtcattttaagccctttcaaaatctttttttgctgatgttgctttaattttaattttttgttttattgtgctgacgagttcctttttctgccaattaattcctttctcgtgccatttacagattctgcatatttctatgagcagccgtcgtccatcacccaaagcatcgacaagtagagctcgatcagagcatgaagtaattgaaatcccgggctttttgcaaatttccaacccaaaaattttttgacattaaatattataatatttcaattctaaatttgtactcaaattttcttgtaattattattttttcagcgcgctcgttctcgctcccgacatgaacgaaggggaatgtttgaaattgttcggcaaggaatgtggtcaaaaattgtcgtcactttgcgaagtatgctgccatcgccaccaatattggaacgtgaatcggtctctaatttggcatttaaaattgaaataaaaaatggatttgataatttaggtttatgacaatcacgcgcaaccatttcgtggaatggccttgattataaataattacatcttccccgatgacagacgagaaggaacaaacgttgatagtgtcaacttgcaggaattatttcagcaattcggctacagagttcaaatttaagaaattaattccaatgatttataatagatttttattattttagttttttttcaacgcatgtggaggacgtaagtgaaagcaaataaatcaaattatttcatttttgagttgttttttaagcaaatgaagaatatggagcctataccggaagcaggacccttgcaaaaccggcaaccggacaaagcagtgatagtgctgactctactgttgggtaaattggactaagtttgagtttgcggtgtagcccctctattgaatcagtcccccgccctccccctgatcagttccctttgattttttaaatccaagttagaaatttttcaaaaaagcttcgattttattttaaataaatttttattaaaaagtttaaagtcaaggttttttggaaaatttgagaaattatttcttcataaaatttataaattcgctgaaattttgcctttcaaaatctttttttgctgatgttgctttattcggctacagagttcaaatttaagaaattaattccaatgatttataagtttttgggggggggggggtgaaaaccccccccccgttgggcctcaagaaatctcaatatacggctgtgacttacggggtggcttctcaagtttcgcagtctactcaaaaggactgacccgagacatgattgttggtaattcgttgagttcgctgc

SEQ ID NO: 2426 - DNA, 1660 bp, Heterodera glycines
  unsure (1)..(1660): unsure at all n locations
ggaatttttgggcttttttggaaaaaaggcttagaataaaaaatagtcctagcctttaaattggtcattttaaagccctttcaaaaatcttttttttgctgatgttgctttaatttttaattttttgtatttattggtgctgacgagttccctttttctgccaatttaatccctttctcgtgccatttacagattctgcatatttctatgagcagccgtcgtccatcacccaaagcatcgacaagtagagctcgatcagagcatgaagtaattgaaatcccgggctttttgcaaatttccaacccaaaaattttttgacattaaatattataatatttcaattctaaatttgtactcaaattttcttgtaattattattttttcagcgcgctcgttctcgctcccgacatgaacgaaggggaatgtttgaaattgttcggcaaggaatgtggtcaaaaattgtcgtcactttgcgaagtatgctgccatcgccaccaatattggaacgtgaatcggtctctaatttggcatttaaaattgaaataaaaaatggatttgataatttaggtttatgacaatcacgcgcaaccatttcgtggaatggccttgattataaataattacatcttccccgatgacagacgagaaggaacaaacgttgatagtgtcaacttgcaggaattatttcagcaattcggctacagagttcaaatttaagaaattaattccaatgatttataatagatttttattattttagttttttttcaacgcatgtggaagacgtaagtgaaagcaaataaatcaaaattatttcatttttgagttgttttttaagcaaatgaagaatatggagcctataccggaagcaggacccttgcaaaaccggcaaccggacaaagcagtgatagtgctgactctactgttgggtaaattggactaagtttgagtttgcggtgtagcccctctattgaatcagtcccccgccctccccctgatcagttccctttgattttttaaatccaagttagaaatttttcaaaaaagcttcgattttattttaaataaattaaagtcaaggttttttggaaaatttgagaaattatttcttcataaaatttataaattcgctgaaattttgccctttcaaaatctttttttgctgatgttgctttattaggctacagagttcaaatttaagaaattaattccaatgatttataatagatttttattattttagttttttttcaacgcatgtggaggacgtaagtgaaagcaaataaatcaaaattatttcatttttgagttgttttttaagcaaatgaagaatatggagcctataccggaagcaggacccttgcaaaaccggcaaccggacaaagcagtgatagtgctgactctactgttgggtaaattggactaagtttgagttgggcggtgtagcccctctatggaatcagtcccccgccctccccctgatcagttccctttgattttttanatccaagttagaaatttttcaaaaagcttcgattttattttaaataaatttttattaaaaagttnaaaagtcaggntttttggaaaatttgagaaatatttctttcataaattataaaatcgctgaaatttgcctttcaaatcttttttgctgatg

SEQ ID NO: 2427 - DNA, 3181 bp, Heterodera glycines
  unsure (1)..(3181): unsure at all n locations
caacaacgacgaggggaggggacggaggagaagcgatgccggggagggaggggtccattcttggagatgacagtggcggactgatgaatggacagcgaacggagaaggaaacggaaaggataataaacagagggaggggagtagagagagagggaatggaaaagaggggaggagataagagagagtggagaagaagaggaggaaggattgtaacacagaggaggaagaggaagggaagagatagagggggggggggggaaggaaggaagcaaaagcataatgtgcactttgatattctttcaaataattgtaatttatttgaatatatttttatataaatatttacagtttctgttttattttctggcggtatgtttcgtctgcgtttgaaattgcgcgggttgggccaatgtaagcaaagtgccgctggagaaagggtactgtacctgcgagtactgtttcgtccgtcccttgcgctccctttgctactcacctccgttgggttcgtcgtcgtctgataagtcggtggggcaatggtcctcggaggaaatatgcgcggagcttttcctgctgtgtttccttttgccgccgaagggattcgcctcgggggaaaagcgggcggagccttcggcggcacttttattttacgtccatttgccactttctgaacattctgccggctgtgttcaattggctgcttaaccgcatgttgtcgttggccaaactgacgaccgcgaaaggaattggcaccgttttgggggaaagggccatttcgtacactcaattctttttggggttgcacaaattgactaggccccgaatgaaaattgctgttctgttgctggttgtaagaatacccccccccctcccaagggaatttttggacttttttgaaaaaggcttagaataaaaatagtctaagccttaaattgtcattttaagccctttcaaaatctttttttgctgatgttgctttaattttaattttttgttttattgtgctgacgagttcctttttctgccaattaattcctttctagtgccatttacagattctgcatatttctatgagcagccgtcgtccatcacccaaagcatcgacaagtagagctcgatcagagcatgaagtaattgaaatcccgggctttttgcaaatttccaacccaaaaattttttgacattaaatattataatatttcaattctaaatttgtactcaaattttcttgtaattattattttttcagcgcgctcgttctcgctcccgacatgaacgaaggggaatgtttgaaattgttcggcaaggaatgtggtcaaaaattgtcgtcactttgcgaagtatgctgccatcgccaccaatattggaacgtgaatcggtctctaatttggcatttaaaattgaaataaaaaatggatttgataatttaggtttatgacaatcacgcgcaaccatttcgtggaatggccttgattataaataattacatcttccccgatgacagacgagaaggaacaaacgttgatagtgtcaacttgcaggaattatttcagcaattcggctacagagttcttgtcaatgacaacgagacagcggaggttcttgatcgcccaaatccacctttttttgcttatttgtgtgaaattgcttatagaatggaccgaaccgaataaatttgactcgaatatatttttaggaaatagcccatttatatcgcctaaaaattatttatttttaattttagtttattgacggattgtccgggagccgacatggatagtatttaaagtggtgacaaattcgatgttaaaaaatggaattttgccaaaaaatgcgcaacgtgcccccaaattgatgggacagcccaaccttgtaaggaattaacaaaatntaagaattttaattttattatctaagcgatatcgctgtttttgccctgaaaggctctcgcgagcattaatgttgttaataaaaaaaattgcatctgagtcatttttaattaattgaagaaaaggttgaaaaaagttgataatactaaaaatgagtaaattaacaaaattaatcataagttatgattcataacttacaaaatttgaactcggctctatttcattttttaaacttaaattgtttttgaaagattttttataatattctttttagacccaaattttatttgttatgcttatatgttcatgtttttaaattttcttttgacttttaccgtgttaaatcactccgcttcttcatcaacagcttctaggttatattttgtgaagtagaaaaaaatatttatattattcataaaaccatttcttttttatttgcaaatgattttttgggtttttgcctgttgaattccattaagtaaaatatgagctcatctctcagtttcacattccaataataatttattcgtacaaatgtttttaataaaaagcaatgcttcattcaaaaacccaaaaataaaaataaatcttgctaacaattatagagcggctcaattggtacccgatcttttttgtttttcatttgattttatatcgaaaatgatcaaattggattttgatcgaactttttatactttttgaagttttcaaccatttggatgtttttttatttaatctttaaggagaagcccttttgtaaatcccaatttggtcatttttaaaaacaaacaaattttattagtaggcaaatgcttaacgttccccttgctaatttgatgaatctttttccatttgctcactttccgttgcttttgctcttaattttctccaactgccagcagacatcgcccaaccagtaaattgcttttttggctagtaaattttattataaatttttatagtttccatctgcttctgagcgatgattacactggtggtccagcaaattacattccataccgtaattttcgggatccgtgattctggtccaaaaaactccggaatttgaatccattatttaaggcatcaaatattttcaaaaattttcccataccttcattttgagaggcatattttaaacattagcaaatctgagttttcataaagaaactggaattcggaattacggcacagagcttaggacaatcctttacttgtaacaaagttttttttccaccttcattagcttcacgcgccaaaaaatccgtgcaaaacccatggaaaaacagaagaag

SEQ ID NO: 2428 - DNA, 1651 bp, Heterodera glycines
  unsure (1)..(1651): unsure at all n locations
tcttacaaatgaaggtccacgggtgtccgtgggatttccgtatgaaatttggtgaatggtagagcacccatgggttcttaagaaaaatgtttttattttctgcgaaatgagcacgagtgccgagttatgaagtgacaatgtttttagttttttctaataaagaaaggaaataattatttcgctatatttcaagcgtcaaatggtgtagaggtaatgcgttaggcaacaattctttaggcatcaggttcgaatcctctgcatgctaatatattttacaatttttatttgcaaagttaacttttaaaaaattgtttaaaaacaaaattttattaattgactttgcaattacctatatgtaaaaatgatattttatgaatctttaaatgaaaaaaatattgcaataatgcaatatttgctttgagattaaaaacattagtagtaagttgtccaaaaaagtccggattacggtattgatgtcatccaagcctaaaggtattcttttatttatttattgcccatctatgataaaaaatgaatagataatcaaatatttgaaaactctgttctatttaataaatttagtccaacaattttaaattcaactaaatgtttttaccaatgattgtattatttttacttgctacgaaaaatcagttatttatgattaataatataataaaattgatagaaatattattcccacaaatacacttatttaagttgttttgttagaataaaattaattttttatataagataaaattaacttaatcaccacccacgaatgcaaacatgctcttaagcgccacatcgtccatagctgctccaaaactatagatctaaaattaaaaataaatatctacaaatttatcgatgacaaattaatattctaaaaaataaggatttctactttcgagttgatgcacaagttcatattagaaaaatttaatgtcggctaaccgatatcatcataatacgcttgttgatgatattttttaaatttcaattcatttggaattgaaactttatttacctaattattaattgaatataaaccttttttaaagattttattcggccttgcataataaaaattagcttattgagaataatatctaaaatatttgcaagctaagcaattcaaaaatgcttcccataagattaatatggtaaataaaaccaataaagaattttaaattttgaagtttactaaataatagccttaatatttatcttttcgttgtaaagaaaatagttataattgttgttcaaaattaaaattttctatttatttaaaaagaatccattatcattgcgtaataataaaaaggagtgtgtcggaaagcggaggcagaggcccgcttcgaacattggtatgtggtggaacccaacctaccggtttttcgcccgattgcacgatttgaaaggctgacatccaaaaaatagtcagtacatatgaaaaatttgaaaatattaaataaaaattaaaatatctatgcttttaaaaaacaaaagaacgccttanatattcattcgccttanatattcattcgccttanatattcattcgccttanatattcattcgccttaaatattcattcgccttaaatattcattagccttaaatattcattcgccttaaatattca

SEQ ID NO: 2429 - DNA, 6137 bp, Heterodera glycines
atttcaatgcattttttgtgatgggctatagggccaaatgttcacatttttcactttgtgccccatttggccgatttttgcccccctcaatgtccctcccccatttgctcacccatttcggtttaattaccccaagtttgagataaaatttggtggtaatttttctgtgctttctttctgtgcggccccaaatccgaccgttagtcccgtctcgatcgcccccggcccctttgtgctctccctccaacttgtcaaagtcctgcacccaagtgcaggcaattgtcggactccaccgcgcccacacccgcacacaaactcggagtacgataagtggcgaccctggcagggacaaccaagcaacgacaaacagcaacaagtgcgcgacaagccgcggcggtgcactcaacggaaaaggtgtggtgaatttggaaaaattcactcggtgttccaagtgttcgctctccgtggcaaaacttggacacaacaaggaggggggaagcaaaagtgggagttcggggaaatactgatcggtctccgtgccatcagtatttcctaggtcaaattactgctcggtctccgtgccagcagtattttgtcaattactggtcggtctccgtgccgccagtaatcagtaatattactgatcggtctccgtgccatcagtaataggggcaattactggttggtctccgtgccgccagtaatcaagcaaagtactgctcgctctccgtggcaacagtaccggtccttgccaagcaaaggaaggaccgttggcatgaactgctcgctctccgtggcagcagttactccaacccgacgcggacaagtcaaacggtcggaacaacacaagtatactgcttgatctccgtgtcagcagtacttcacgtggaggtggttgtggtattttaatcaaaaatgagatagccttttttgtaaaattttctggtacaaaatttaattgtgaaattttaattattcaattacaaaatctgaaatcaataagatttgcattgatttaccggcctcccaaaaccactttaaaacaaacaaaagaactttttaaatttatacaaacattttggtgtgaaaattataatcttaggagatctaaatttgtcaaatcgagaattggtatggaggcaaggccaaccacacgctataaatcatattggtgaaatattttgcgacttttttaataaatttacatttataaatgccacgaatgagcccactaggggtaaatcatggttggatttgatcttatcagcaaatgataaaattgtaaaacattgtactgttgaaggtggcatattttcatcagatcatttagcacagctttttgtgctgagtgttccagaaataagagcaaagcctaaagaaatttgcctaagacggtttactccgtctaatgtatcacatttaaatgctgtaatttctgctagattaagttctctttctctttcacattttagtataaatgaaaaatgctgtgccttcaatagcgccttgttgaatgccttgaacgagtgtattccaataaaaaaattactaaaaaaagatttagctccaaaatatccacaacatttattggcatccattaaagaaaaggcaaaattatatagacagtgtaaaattgatccaacaaaaaaagcactttatgatagcattactttacatataaaaatccaaaccaaaaaaatacataatttaattgaacataaggctatttcaaagggaaaaaattcaatttttaaatacattcaaaaacacaatgtcaatccctttgaaataccaaatttagtttttgaaaataaatgctatcatgaaagtgaagagaaatcggaattatttgccattttatttgcaaattcatttaataactccgaagttgtcctaaacgatttaagtttggacaactcctatggtaatattcaatgctttatatcggacataaattttaacatcattgagactcaaacactgttaagaaaattgccaaataaaaatggaacttctccggataacatttcttataaagtcctaaaaaattgccatttttcattggcaactgttattactgagttgtttagactatcattagacagtggttctcttccaaacatttggaaggaatcaattgtctttcctctttttaaaaagggggataaattcaatcctgaaaattatagacctatttctttaacctgctcactatgcagagttatggaaagaattctcagcaaaaatatttacaattttctattaaaaaataataaaatttcagagtcccaatttggttttattagaaataggtcaacaacaaatcaattaataacagttgtcgaagattggtatgaagcaattattaatggaaaaaaagttgactgtatttatattgactttcaaaaagcatttgactcggtacctcataatttgcttttatataaattggaaaaaattggtatacggggtaaattgctgaattggataaaagcatttttaatgaacaggacttttcgcgttaaaataggggattctttatcctctattaaaaaagttggctctggcgtcccccaaggctctgtcttgggtcctttattattccttatatatattaacgaccttcctgatgtcataccatcaggagtgaatattaaattatatgctgatgatgttaaaatctatatttgttataaagcaagaacagaaacggaaattatgcataaagcattgcataatttattcgaatgggcaaataaatggcaaataaaagtttcaattcaaaaaacttttgtactttatttgggttcaaaaaacccaaaagaaacttataaatttgatgggaatacaataaatgctgtggatacaattagggatttaggagtaaacattgataacaaattacaattttccgatcatattaatcatataacaaggaatgcgtatttacgtatgcgttccttgttccgaataattaaatccaaatcatctaagatttggattacgttatataaaacttatattaggcctttattggaatacgctccggaggtttggaatccgtctcttcaaaaaaatattaaaaaaatcgaaaagtgtcaaaaatatttcaccaaaagagtattttttaaatgcagccttccgccaattccataccaaaatcgattagaatacctgcaactgccaacacttgagaaaaggcgaaagctatttgatctgttcatggcgcataaaattgtttatggccgaacagatctagatatattaaaaattttcaaaccttctgaacgctttaatgtccccttttataggtttaacacaaaatataaattaggcaaaaaatttattccctttgcggggagggctacaaaattgtggaatcagctggataaagaaatcattaaaataaattctttaaatcaatttaaaactaaaattaaactccttaacgtataaaatgaccggaaaagtgaattatctcttttgattaattaattaaagctatttataattttatatgtgatttggttttattgatcgattgacctcattcttttatttaattttgttgtgatttcttttttttgtttaatttttaatccatattactcgaggacgatttaatctatgacacgtccgcagagtaagtggattactcccttttgtggacttttttctttttttgcataaataaataaataaacaacaatctagaaaaatttctaaaatttgtgcgagttaagaaattcaaaaatacttcccataggattaaaaatgataaataaaactaaaaataatttaaaattttgaagtaacctttttaaatatcataaatgttatcgctcccaacccataaattttgttagtcctgaatttcataattttcaaaaattttcgttaaaagtgaattaaaaaacatctataaaaatagccagcaggtatagatttaagaaaaaataatggttttacgcaactcaaaatcataaatttaaaaatgtaataagaattcaaaatctcaaaaattaaactagaaaatttaataatataagaaaaaatgatagaaatattattcccacacatacatttaattaagttgttttttttcattcaaaattttttcaagaaatttaaacaaaaattgctttaccaataagaaatcaaatcaattaaataacaataaataatatgaaggaaaatgacactaaatgagcaaaatttttatatcattttaaagtcaattgttaatatttcattatatcttacaatggaaaagctaagatttttttgtgaaaatcaaaagatttggtcataaattgtaaaatctaaaattctaacaacggcctttaattgacaccacatcaccaaacttgatcgattgatataaaaaatttatgttaattttttctcaatttaacaatgataatatttacaaaatgcacaaaaataaacgaataaaattagaggaagaaaatttaaatcaaataaatctaacaacaaatatgcatcaacggaaacgaagaattaatcggtaaaacaaaatatttttcacaaatttagtttgaccaaatccaatagataataaactgaagaattaatttttttttggcaaaacaagagaaaaccaaaatttatcaacaaattaaaatccaaattattaccctataactaaatgaaaaaaacataagacaaaactttaaattctataaaattatgagtcaaacgaaaatagcaaaattattaaataaaattttcaacttataggaaatttttttcattaattgatatataaaaaataagaaaatatgataatattttggataactcaaatacaaaaaagaatttttactcaataagtaaattatttatacgatttaaatatttaataaaattcaaattctaaataatttttaaattaaatattttatatttttatcaatttgttgataacaatttattaaaaaatggtcaaaatccccaaaattttaaaatttggggtcggactctgattttaatgccctaacatgcaattcatcaaagttaataaattcaagcattctcaaaaattttcaaaatgttttttggcactaatttgtgtcggtcggtcttttccattccaaataattaaatttattttctgctggtgcagcggatgatggaagaattataaatattatttcttagagaaggcttggatctcctccccttttaaattcgattttctctgtcagtcagcattcaaaaaaaaagttaggatcgaaagaactcaaaaaactttgtttttcgaacattttttgccataactttattgaaacataacgaaattttaaattctaacgccctttattgtgttaacgactcaacaccatggagaagccgtgagatttatacattgatgaaacaataaatgaattattcaaattaaattaatacagtgaaaaaatatttatttaaaattcaaaataaaattgaataattttaaagttatgaaacgggggggggaagtttaggcgccgggaagtttgggcaccaagaagtttgggcaccgtgaagtttgggcaccaggaagcaattttttaataaatcgaaaatatttttcttaatttaaatattatcattgttaattattatgtttatataaaataaaaaataaattatactaaatgaaaaaaaaattaattaaaaagtaaatggctacattattagcatgtattttcttttcattattacataaacaatgtgagataaatactaattaaaataaattgaattggccaacattttgtcaactttttgagatcgttatctttcgtctgcacatctgctgtttacataaacataaacacaaacacaaatgatgaataaaaatattttcataaattacttaagatgggaaattgtccattataatttttttctgtttttgcgtttaattaccaaattttcggtttttacaatttaaatttccttccatcgtcgagcggaagcagcttaacgtgcctaatacaatggcactcctcgaggatggagaatttgtgtcaagcgattcatctgagggggcagcagaaggggcccctcagcacataaattttttggaaattgtttcaaaacgctatggccaggaaggaaaagcgctttta

SEQ ID NO: 2430 - DNA, 4044 bp, Heterodera glycines
  unsure (1)..(4044): unsure at all n locations
cgaactgctaatgcccctgatccaaattccctacatggaattttaaactctaaaaaagccaaaattttaaataccccccaattttcactcatttcttgtagccccaggccatttcattaaaaaattctggcgatttcaaaattctgatttagcatttttggattttccggagatagcgaaaccacaattagagccaaatagtttattatttaatttattttcaaataaaaaaaaattaggcggcactgctcgcggcgctcaatctgcgcgaacggcggtttgacaaatttcgcgaaattgcgaccgaacaattaacggtttacatgcgccaacggattccgaaaatgcccgcggatttgttggaccaacgactgcagttcaaacgacaccatgtggtcaacgggttcatccacacgtcagcctatgctcaacggtctgttcatgaaagtgcgtttattgttagtcagtccttttctaaaatttgttagaggattaaaatgttcgaattttgggttaggggttcggaaattcgtaaaaatagagttaaaattcatgatcagcggccccgaaaacccatggaaacacgtttttatcattaaaaacagaaaaaattttttgcgccgcccgcacccgcgcagctgctcgatgcgccgcccgcgcagccgctcgaagcgccgcccgcgcagccgctcgaagcgccgcctgccaactacgagctcattctacagcaaatgacaatgctgagcgacaccctgcaaaacatgaacgacaattttggaggtaaagaatgtcgtccctaacttcttttttattttgggttaaaatcagtttcctagcgtttttgagagtgatggccacgaatatgaaatcgaatttgccaaattccaaatccctgacccgaattcgaacaaaaaataggtgttaaatgaattcgaagcttttacccaagaaaatgcatctttgaaaaagaatttcactttttcgaattcaggtccggggttcggattgggcaagtccaagttcagattcgtaagcagcaagcaccctcgaaacccctaaaaattatttttgatcccaaaattaaaaaaaaaaaaatttccagatcgaatggacagaatggaagtgcgcaacaccatttccatgtgtgcctccattttggcgatcgtgatcagcggcgcagtttttttttgcaaaaagtgatctgaattttttttttttgatgacaattttgttgtaaaattattttgttttggcttatttatttgtcagttccaaaaagcgtaggatttcgcttttcaatattacaaatatttcattattttatcactgccattgatttctgatttgctaatttgtccgtcctgacgaagaggcatgaaatggtgagtcgaagcgtgaagattcttcagaatgctaaaaccaaacttaggctctttgcatgtggcaacatggagaagaggcactggccaaggcgttggtggcatgtcgcatttacaaaagtttggccaatgaggcagcggaggattacttggaagtggaagtatgtgaggaacttaagacgtatgccgaagtgagcaaaagcattcaactccttaaatcacttgcttaattaacaatttgcacgcttttcaggagtttcggcaactttcactggaattgctcgaccattgctataaagaagatgacgcacaaacgcttcagttgctgacatacgaacttagctattggggccaccagacatgcttgtcactggccgtcattgtgaacaacaagcaattcctggcacacccttggtagcagttcttagcattgattgctgctagtaattgtcatgcctttttagctgccaaattttgttggccgacctttggcacggcggtctccgtattcgaagcaactccaacatcaaagtgctcatgggcattctgtttcctccctcaatctttctgctcgaattcaaatcccgcgaagaattgctgcttcagcctcagaccgcagctgaacatcagaaggacatcaacgaatcgtcgtcgtcctcctcagattcctcctcttcgtcctcgtcttctgacagtgaaaacgacggcgacgagtcggacgcgggcgaaagaggcggtgccacagccgaagagcgccgacgcacgtcgcattcgcacggaagcatgcagtcgttgaacttcacctccgtaaaacactccatttgcttacatatggtttatcttcggttatttttcagatctttaaaagtaagcgcaaacgccgtcgtccttcccactcgcgttcttccaccacggccaaagaggacattgagatgagcaaacagaggaaccgaggttggtggttgcctccgagtggtccaatccccgttcgaccacccacaacttctgcttagattgccaatgccttttagtgacgagtcgcagttggaggctttacacgctgttcaatgtggtctactggacttattacatgttcattgccaagtcgacgacgtgaccatacaccaacaccatcagacaacaaatggcaaattaatacacgaagaaatgaaataaatcattacatatcgaaatccgaattgtgtgcctttttatgaagtgaaaattaaagtgatacaaaaaatggcaaaaaatattaattttttggcgaaaaattttgtaaaatagacccccataattcgggatttcaaaaaaccaaaaatacacccctaaaatcgaatttttgacttcagcccccccccaaagccaagggtctggctacgcccttgaatggttataatacttccatctttcgaaaaacctgatttaattcactaattcctcctttgagggttttttctaacaaaacaaacttaatattaaaaaatggcctacggaatgaaaaccattaatcatatttgggttgatgataatatttttcaaatgtctcgtgatttgaatttgattatctttccgcttttccattctcagcgtccgctgggctgtcgcttttcggcacttccgtctcttccgccggcgcttcgtccgccccttcacagccgacatttggcgggttcagcaacacgctcagttcggcaagcagcgggacgctcttcaaaggctcggcacccgccaaatcttttcggcagtaaatgatccaatggccagtccttctatttgttttttttttgttgctgcatttatcccatcaattcttttgtttcatgtttttactttgcggaatattattgtatcactttaattttcacttcataaaaaggcacacaattcggatttcgatatgtaatgatttatttcatttcttcgtgtattaatttgccatttgttgtctgatggtgttggtgtatggtcacgtcgtcgacttggcaatgaacatgtaataagtccagtagaccacattgaacagcgtgtaaattgctgaatcggactgatcagtgatcacatatccctcgcatatttaatcccaaaatgaccgggaaaggcgattctcgagaaatagtccaatttctcgcaagtgacaaatgcgtccgtttttcgtcttccgccccttttgctcagatttttcatacgaagcgtcgtccgtccctcatttctcatctttttttttgaagtgaaatttaatctccaattattgcccactttaaatgttcgaatttgtgtccgagtttcggagttggccgaatggatgccggatttgtgatcagcgacctaagcttttaaattacataattttttcacaatttcttttaatccttgatttgatgtccaaacttcccccgcgagtaaaactatgtaagtataaaaacggcagaagacaagacaattttatttatcctaacacaaaacattttaacaaattatttggtatagtagtcggaaggcacagtgctgatgcccgagctcgtcccatcatcgcacaaatgcgacttcaccgtgttgcgcacttccatcctgtgcattcgatctggaaattgntaaatcatgatttgggtcattgactttatttaaacacaaaaaaaaattaacattttgagacctatcattt

SEQ ID NO: 2431 - DNA, 2417 bp, Heterodera glycines
atttgtagaagaaactgagtgaaaatgctgaaaaaaaacataatgccaaaacaccacgccaaattaacagaaaaaaatttgaaaagccatgaaagcgcggacacttcaacaatgttttttttcacctcggacgcatccataaaccgcgtcaaggtattttggggtgccaaagcattggtcaccgccaaaactgggcggaaatgtgtccaaattcactggcaacacacacctttgacggtgctcacatctgaatacattttttgcttttttgatacttttaaaaattgcgcgagaaaaataatttttaaattaaatattttttatttaaaaaatttagttttttcattgcaatttaaaatccttaaattaatattttgaaataaccattcatcttttcagttctgctaattatattttgctaacagcgccccttcattaatattttggacaattcccttgagacaaaattttggtgtgagctgctgaaacgaacgcacagcagaactaactaatttaaatttaattagtttgtttacacaatgccaaaatgtttggcacttttacaaaaaaggacaaacaaggattttgcgccttcgtttaattattttcttttacaaattaccattttaaatttttttatcaaatttatttttaaaaatttcaattttacaattttcctttagttggtcccctgggggaaggaaactgtcacattcaaaaaatcccatttacattttaggaaaagctttcggcttatgcaataaagcaatgccatgttggcatggagagatgtcccaggagaagccctaattaggagcaatttgcactttacccacccttccccccgggcatttcccctccaaaatgcattagcgttgtgccattttcgccgccattgcgcggatccgttccaatcggatgggctcaaaggccaaaacatttcgccaaatccattaaaggaattggtgggaaatgtcaaaaagcgataacttaatgatgtgcaatgatgtaaaagtcataaaatggaaagaattatgttcaatttacatgagaaaaagagaaaatttcatagtaaattaaaaaaaaaattcatagattaaaaaaatagataaaatatgaataagttatctgcttaaaatgaaaatggtttttttttggcaatttagaagaagaaattatacgcacggagcaatttaagaacaaaaaattttagatttcattatattttggtgaaacaaaattaagttaaaaattttctctggaaatgtatgaaaaataaatttcaaataaaatatatattttttttatcatttatcatttctatagtttccccaatttccgaacccctagcccaaaattcgaacattttgcgctagttgcaaatagtacctttttgaaatttttcgcaccttttttcggcattttagcctcattcgaaccctggatgcgaattcgaaaataaaagtgaattagaaaattttgaatttccgactttttgtacgaattttgggttaatggtttggaaattcgtcaaatagagttcaaattaatgatcagcggcgaccccgaaaaccactggaaaacatgtttttgtaattaaagacaaatttaagttattatttcgaatgaaaagtcatcaactccaaatttttacctcactttcctccacgtcgagcaaattttttggagccgaaatttgtttctttttttcataacattgggcagattggtcagacattttgttgaataatttcttaattttcgagaagggaattaaacattgagtcaacgaacaaaaaataaaaaacaattggtcaaaagatagtcattccgtacagattaaaatacatttaaatgagaattttgaaagttttgaattttcaattttttcgacttctgtcagggactctgaaaaaaccaaagtgaatgtccgagtcgtgatcagagacccagaaaagccacaaccaaaaaagcaattgttgcgtatgaatgaaaaacagaagaaacaactaatttgccaaacacataaattagagaaagggaaaaagtttgtatattgaagagcagacgaaaaggaagagcgaaaaaatgtgacttacaaattaggaacgaaagtgaaaattttgaattgacttgttcgaattctggtccgggattcgaaattggatctgcgaccctgaaaaccccacaaaaatgttttcacgaatttttataacaaaaaatgattgttatttattaggccttttccggttcttattggtttcttctttcattaagattgtgcacaagtgctccgtgcttttttgaacaatgagaaatgacacggacaaatttttttccgtttttgacagactgcaacattttctggcgatgtgttaaaatgtgaaggtttcaaaaaatatcaaagtgattaaaat

SEQ ID NO: 2432 - DNA, 2275 bp, Heterodera glycines
  unsure (1)..(2275): unsure at all n locations
gtaattatatcggaaatccatatttttttcctcgtttgtgggaggcctgaaacgcacgaaaaacatgtttttagcttggtttgaagcttctaggaaggatttctatatccatattttccatatttttccatatttcgcgatttatgtccatatttccatattttggcatttttcaaaaaaatctctattagaacggccccagcagctaaattagtctttttgagcccaaaacccgaaaaatttttcaaaaaaatcattttttcgccaaaatttctcgagaatattgaataaatttaaattttcttaaaaattaataaatttatgtcaaaaataagcaaaaaagcgaaaatttcgcttttgttgttgattttgcgctaaaaaaattaataaattttagcttttatgttttttttcatttaaaatgattgcacgtaattgccgaaaaaattcgagaccaatttccgaatgttgaccgactaattgcaaaacgaaagccgtctttgtcaaagcgccttaccgagtcaaaaaatttggaaatgtatttcatatgcaatttcaaccaacaaatttgaagaaattttgcactcaattttgaaaaatttatgtccatattttgacatttttgccatttatttccatattttgagatttttgccattttatgtccatattttgcgatttttagtccatattttatggccatatttcgcgattttatatccatatttttaccatccctagtgatcagagacccagaaaagccacaaccaaaaaagcaattgttgcgtatgaatgaaaaacagaagaaacaactaatttgccaaacacataaattagagaaagggaaaaagtttgtatattgaagagcagacgaaaaggaagagcgaaaaaatgtgacttacaaattaggaacgaaagtgaaaattttgaattgacttgttcgaattctggtccgggattcgaaattggatctgcgaccctgaaaaccccacaaaaatgttttcacgaatttttataacaaaaaatgattgttatttattaggccttttccggttcttattggtttcttctttcattaagattgtgcaccagtgctccgtgcttttttgaacaatgagaaatgacacggacaaatttttttccgtttttgacagactgcaacattttctggcgatgtgttaaaatgtgaaggtttcaaaaaatatcaaagtgattaaaattatacaaaaaaacaagtgtcggacgaaacccaactcgtactgcctcaactcgtagtgtttttcgacaaaaaatcatataacttttgttaaagtcgaccaaattaaaaattcttggtatcattcgatagcccttaaagttctccatctacctgcaaaatcaactttagtgccaaaaaatctcgaaatagttaactataaaatagtgggtaaaaatgccaaaatagtggcaaaaagtccgaaatagtgacataattttcagccaaaaattaagcaaagtaatttttattcactggttgcaattgcaaaggagttggactgagatttttaagggaaaaccccaaaaattcttcactgatttttagacttaaactggtccaagagcttttgaatgataccaaatttgtcaaaattttttatttaaaatgcatttttgacttatttggaggcaaattttcgtgatttaaaccggtttaaacgctttgccgcgcaattatggtttatgcgttttcagaactaagaaaacttacaagtgtgttgttatgcaattttgagtctggtacagggaagggggggcgagtgagggacaagggtggaaacattgtgatcaatgagagaccgtcccatattgtttgggcaaatggactccgtttaaaagaaaaaaagaattcaatgctctggtataaaaaataataatttattaaagaaatatacaaaaagaaacacaaaaaacaatgaaaaattgaatgattttttgttacatcccatgcctatgaaagccatccgccgtgggcggaatgcccgaagaagaagaagaccctgactgcgaaaaatgggagggaaaagaatgttgcgccatcatcgattctggtggagtttgatgatgttctgtcgccgtttgatgagagtgcatctgatagaagagaaatgcataataaatcaaccatttgttggttcttcatttatttgcgcctttacttgatgaggctgaaaacccatagggaagaaagntgccggatggcaaagcctcngnncgatgntgtaggcactgaaccgaa

SEQ ID NO: 2433 - DNA, 2212 bp, Heterodera glycines
tttttggccaaaaaatcatttaacttttggttaaagttgcccaaattaaaaattttttgggttcctttggatagcccttaaagtttctccctttccccgccaaaatcaactttagtgccaaaaaattcttgaaattagttaactataaaatagtgggtaaaaatgccaaaataggggcaaaagttccgaaatagtgccataattttcagccaaaaattaacaaaagtaatttttattcactggttgcaattgcaaaggagttggactgagatttttaagggaaaaccccaaaaattcttcactgatttttaggcttaaactggtccaagagctttggaatgataccaaatttgtcaaaattttttatttaaaatgcatttttgacttatttggaggcaaattttcgtgatttaaaccggtttaaacgctttgccgcgcaattatggtttatgcgttttcagaactaagaaaacttacaagtgtgttgttatgcagttttgagtctggtacagggaagggggggcgagtgagggacaagggtggaaacattgtgatcaatgagagaccgtcccatattgtttgggcaaatggactccatttaaaagaaaaaaagaattcaatgctctggtataaaaaacaataatttattaaagaaatatacaaaaagaaatacaaaaaacaatgaaaaaattgaatgattttttgttacatcccatgcctatgaaagccatccgccgtgggcggaatgcccgaagaagaagaagaccctgactgcgaaaaatgggagggaaaagaatgttgcgccatcatcgattctggtggagtttgatgatgttctgtcgccgtttgatgagagtgcatctgatagaagagaaatccataaacatttattgtctcttcatttatttgcgcctttacttgatgaggctgaaaacccatagggaagaaagtgccggatggcaaagcctcggccgatgtgttaggcactgaaccgaatgaaattggcacgccgccagaggccatttggtgctgttgcagcatttgttgatgttgttgttgttggaattggactgatgagaccatttgttgttggtgatgaagcggcggagctgcgtgtgaatgcacaaccatcgacggattttgcggaaaggaggaggccgaagcggacggaccagcagaagaggcaggaaaagcagcatgagaagggacttaacaggaaataacgacagttagtaaaagaaatatgttcattcggggagagagtactcataactcagagacgggatgagcaagaaaacttactgggcccaacgggtgcttccgacatggccatcggatgcatttggtagggaggcggcggcggaacgccttggtgttgtggatgatgggaaatgaattgcagtggagtggaaggatcaactggggaagaagtggacgggcaggaaaacggaaccatcaaatggggagagagggcagcagaagagacagacgacacggacaagggggcaggcgtggactgctgagcgaacgaaaaagacatgcgaacggaaagcaacgccaaacgacctgttgctgttggtttgcggttgtgttgcttccagcggtgcccatttgttccacttgctgttggttgatttgttgctgcatttgcccagcttggttttgtcgtgattggtgctgctgttgctgcccctcgtcctcgcgactttgcctctgaaacattccgatcaatgccgccggctgctgttgttgttgttgctgttgtgaatggtggaggggcagtacttgttgttgttgatgtgttgctgattccatgggaaatgaaagctgctgacccgccgaagaaaggggagggaatgcgccggaagagaaatggggcggatgggcacctggcggaaggagtacaccgccgctcatcagattgccctgggactgttggtggtgctaaaggggaagggaaattggacataatttggcaaaagcaaatcacggccacgcaaatcctcaaaatttgcaaacatctcccaagttttcggcaccgcctaaaccacaactccgtcaatacaaaaaagtcggacaatcatcatcaaaaatgtggagacaaaatcgaaattcgtgtccgtttccactgaatttccaaagaatggacaagtcaaaaactgaattcacaaatacaaaaccacttaaaacaattttcgcatttcccaacgaa

SEQ ID NO: 2434 - DNA, 3515 bp, Heterodera glycines
tgcgttggggccgcctacgctaacgcggtaccagcactctagtcgctggtacctggcacgggccacacagttggtgaaccagtaggcgctgccaacacacaaggccgccaaggcacccgcgtgcgcctgccatcccgcggcctcaacgcggtggccgtcacccgtgcgcagcacacagttcgtcacgggaagaggcccagctggcgtctgctgtgaagcgcggtgctcaatcgaaacgacgatcaggcacagcgggctaaaaaaactcaacacaatttaatatcgattgattggtaatattaaacatacgtcaatggctgccccaactgggaaacacatccattcaaaaattgaatgttgtgcgtgccatccgtacagaaaggctgctgaaatggcaatttttaaattttaataatgttaaataagaagaaagcaccgcaaaatgctgttgggccgcgtttacgagcattggttccaccaattgagcaacctttaaacaatttaagttatttattatatttatttatttttatttaattattacttggccaaaaggtggcattgaccccaaaagattttgttgttgttgttcagccataacaataaagtacaatttaaattttttcgctgtaaaaaaaagcaatatattaataattatgtatggaataaaagtttgcttttcgtttctttgcttggcttttccttttcatttcttaacttttaaatttctttttcttttgtaaggcttttcatttattttctttttaatactgcagtgtttttcttttgttagctttaaaattatttttattttttatggcttttcgtttaatttgttttctttttaaaactgtgctgtttttcttttcttaacttttaaatttctttttcatggcttttcgtttcctattctttttaatattcgcctacatttcatttcttgactttaaaattatttttatttttcatgacttttcttttcttaacttttaaatttatttttattgttcatggcttttcgttttcattgcttggcttttcgttttattttctttttaatagttcgatgcttttcatttattaacttttaaatcttttttcattgcttggcttttcgtttctttttttaatactctcgctagtttttcttttcttaacttttaaatttctttttcatggcttttcgtttcctattctttttaatattcgcctacatttcatttcttgactttaaaattatttttatttttcatgacttttcttttcttaacttttaaatttatttttattgttcatggcttttcgttttcattgcttggcttttcgttttattttctttttaatagttcgatgcttttcatttattaacttttaaatcttttttcattgcttggcttttcgtttcttttttaatactctcgctagtttttcttttcttaacttttaaatttctttttcatggcttttcgtttcctattctttttaatattcgccgacatttcatttcatgactttaaaattatttttatttttcatggcctttcttttcttaacttataaattttttttattattaatggcttttcgttttcattgcttggcttttcgtttcttttttttaatactctcttggtttttcttttcttgacttaaaagttttttttcatggcttttcgttccttgcttggcttttcgttgtttatcttttttcgctgcttttctttaattagcttaaaatatctttttcatttcttttcgttgcctatcttttttcacctgcttatcttttcctagcgtttaaatttctttttctttttcatggcttttctttcattgattttcttttctttatttttgtttgcttttctttgttaattaattaatttgttagcgagttataataagcaaaaataattaacaaatataaaaatattggacaggacaaataaattaaacggacaacaaatcaatacaaaatggagaaatggaaatgaaaatgatgggttggtggagaacggacagttgcagatgaacaaaagataagaatctaacggatgggaggggaccgcgtcgctgtgcacagtgaagtgagaacagggggggggcatttgaatcgttggagaagttcagacggcacattaggtcgtcaatccaacaccccctaagctgaatggcgaaagaatttcgcctcaggcaccattttgagcgaagttttcccgacgccccgccccctcgcgcacccccgagacctgcgcagtaaaactcgcgcacccctagtccgattgacttcaaatttaacggcccgtcattccaccatcccctaagctgaacggcgaaagaatttcgcctctggcgccattttaagcagtacaatcccgacgccccgccccctcgcgcaccccgagacttgcgcaccaaaactcgcgcaccacttgtccgattcacttcaaattttacgggccgtcattctaccatcccctaagctgaacggcgaaagaatttcgcctcaggcaccagtttgagcggagttttcccgacgcccctccccctcgcgcacccccgagactcgcgcagcaaaactcgcgcaccccttgtccgattcacttcaaattttacggcccgtcattccaccatcccctaagctgaacggcgaaaaaatttcgtctctagcaccatttcgagcagtactttcccgacgccccgccccctccccccatgcgcagcaaaactcgcgcaccacttgtccgattgacttcaaatttaacggcccgtcattccaccatcccctaagttgaacggcaaaagaatttcgcctcaggcaccagtttgagcggagttttcccgacgccccgccccctccccccatgcgcagcaaaactcgcgcaccccttgtccgattcacttcaaattttacggcccgtcattccaccatcccctaagctgaacggcgaaaaaatttcgtctctagcgccatttcgagcagtactttcccgacgccccgccccctccccccatgcgcagcaaaactcgcgcaccacttgtccgattcacttcaaactttacaggccgtcaattcaccaccccctaagctgaacggcgaaaaatttcgcctctggcaccatttcaagcagtacaatcccgacgccccgccccctcccccatgcgcagcaaaactcgcgcgccccttgtccttcgacttcaaattttaaaggccgtcaatcgacaaggcacaaagcggaacggcggggaggggtccgtggaaggagggggtccgcgccgacggacggtgaaatagtggggaggggtccgcggcagtagagaggaggtccgcggcagtggagaggggctcctcgccgtcagtgagaggggctcggcggcgatggagggaagggtccgtggaagggagaggggtccgcggcggtactcatggactttgtatccacattttttttttttcgcatttttcaattttttttacttttttattgtcactaattactttaaatatcaaataa

SEQ ID NO: 2435 - DNA, 1258 bp, Heterodera glycines
ctccctatgactcctccgctcctttgtccccgctctcgtctctacctctttgtcaaagagggatcaaagacattaatgtgcttatggaggatgcggcggtaggtccaacagtccgccgaaaagggaaggatttgaccctcctcgaaacggaggccaaagaggtctccgaacggagacctcctacatgttctcagtgtggagaactgggccacagaaaaggcacaaaaaagtgccccctttacgggaggggttctctgaccccagtcgttcaggagaacgtcccgaaattggagaagtgtggccgaggtgcgcctcggcttcagatcgccgcgagaaagccatctccggtttcgccatctccggtttcggaggtggcaaccacggaatcaagcctcccaggtcttcacacctccggcagcgcggagacaaatccgaaaaaaggttttgcgcgacccaatttgactgaaatgaccgaattatccaatcgatcagtcttagtgaaaccggacctctccggttttacgaggatctccacggaagggagagctggcacgagtgggtacggagtgccgggcgcaactttttccatcgtggaggcagtgcgggcactgcaatcaacagtggacactttggccacaacagtccgtggaagagttgcgggtgttggaggtgcgtgggtgccaatttctcccgttaaaaaggagagaatggacattcttcctccctttttgacgggggggaacaccgaaccactggggcgaagaaagaggtgctgctgccgttgccacaatcactcaccgtcgccatcttcctcatcagatgagccgaagaaacgccgacaccgcaagcattgacggcccccggaatttgtcgccaaagcgaccaaaaattgattaaccgatcaattttgttttgaaataatatttatttgtgatgattcatcccctctcccgcctcctccggggttcgcttataaaaggcagccctagcattcattcggctaatgtaaatgaacaagcagttaatcgatattgttaagcaaaatttgtccctttttccctttgcatttttatgtttttaatttaattttcaaataaatttggattagaatttccctttttgtaagggaattaaggaaagattctttttccttaaaaagcccttttggcttggtccgaactcctggcttttctgggacagaaattctttaaaaatttcccccagttgttgggaaaaacaaattttttgcggcttattt

SEQ ID NO: 2436 - DNA, 6995 bp, Heterodera glycines
atgaagtcacacccccaaggggaagacttgcttatgctatataagcatagtgccatggggcagaggacaattcgccctcccccactcaaaatggacaattcttccccgtccccacgatcaccaagcgaaggagacacgactccctatgactcctccgctcctttgtccccgctctcgcctctccctctttgtcaaagagggatcaaagacattaatgtggaaatggaggatgcggcggtaggtccaacagtccgccgaaaagggaaggatttgaccctcctcgaaacggaggccaaagaggtctccgaacggagacctccaacatgttctcagtgtggggaaccgggccacagaaaaggcacaaaaaagtgccccctttacgggaggggttctctgaccccggtcgttcaggagaacgtcccgaaattggagaagcgtggccgaggtgtgcctcggcttcagatcgccgcgagaaagccatctccggtttcgccatctccggtttcggaggtggcaaccacggaatcaagcctcccgggtcttcacacctccggcagcgcggagacaaaaccgaaaaaaggttttgcgcgccccaatttgactgaaatgaccgaattatccaatcgatcagtcttagtgaaaccggacctctccggttttaccaggatctccacggaagggagagctggcacgagtgggtacggagtgccgggcgccactttttccatcgtggaggcagtgcgggcactgcaatcaacagtggacactttggccacaacagtccgtggaagagctgcgggtgttggaggtgcgtgggtgccaatttctcccgttaaaaaggagagaatggacactcctcctccctttttgactggggggaacaccgaaccactggggcgaagaaagaggtgctgctgccgttgccacaatcactcgtcatcgccatcttcctcatcagatgagccgaagaaacgccgacaccgcaagcattgacggcccccggaatttgtcgccaaagcgaccaaaaattgattaaccgatcaattttgttttgaaataatatttatttgtgatgattcatcccctctcccgcctcctccggggttcgcttataaaaggcagccctaacattcattcaaaaaatgtaaatgaataagcagttaatcgatattgttaagcaaaatttgtcccttttttcccattgcatttttatgttttaaatttaattttcaaataaatttggattagaatttccctttttgtaagggaattaaggaaagattctttttccttaaaaagcctttttggtttggtcgaacttctgtcttttctggacagaaattcttaaaacttccccagtcgttgggaagagcaaatttttgcggcctatttgtcgacaattatgtttgcctcgattttgaaagaaaactcatttggccattgacttttggactttttaagccatattgggccttcccaccataatggatgtgataataattcttcaggggtacatcctctacttccaacatctgctgggttttcttctgtgggtacggctatccgacatttgcggatttaacatttgcggacccgacatttgcggacccgacatttgcggaacccgacatttgcggactcgacacttgcgggcccgacaattgcggataaccccgacatttgcggacccgacatttgcggaacccgacatttgcggacccgacaattgcggataaccccgacatttgcggacccgacacttgcggacccgacaattgcggactcgacacttgggaatcacctttttaataaaatcgtgttaaaataattagaaaaatcatttttgaattcaaaaaaaaattattttttaattaaattaatttaatatggacttttcaaggcaacaaagtcgttgattctttatttgaaaaaaagaaaatgcctttcccaagggccaacgggaaatatcataaaaaatgaaacagaggcagtcgaagatttccagcctcctgaatcaggggcagtcgaagatttccagccgtccttggcttcgggttgcataaagtaaaagaagccccatgtcttcatcactttttttaatctttcgagtcgtttccgaaggagaagctgaatttattatatctttctataataatttaaaccaatttaaaacaaaccaaagcaaaattgctgaacattccggcctagcttttgaaattttttcaaaaatgttgtcgggtgtaaattcctccactgacacagagaactcgtacgagttcaggacgaaggttatgggaaagaaatcttttaacagatcgccacatctgcaatctataatttagaaaataaataagttctaaatatttaaaaacaatatctcacgtttgagcttaacatatacagcgagagacaatgttgtaaatgctgttatcattgatgctgttaatataactccggtgtgcgctaataaatacgccttcaattgtgctaaggcgccaatcaatgcaattgtcactaaggctcttttctgatgcggcttttcattggtgggagagatcagaagaagcaaaacaaatagtttaataaatttgtttaccatcattctgcattaaaatatttatttaatgcatcaaaaaattatcgaaaagaggaatgtaaaaatagaaaaaacgttttcattttatgtcatcgtcaaaatactttttgtgttgtgtaagaattaagaatttaaagtaatgctgaagtgaaaaacaaacggcgcgtgcggctggcacatctttcggaaagcaaaggcgccggctgttttggcaaagtgaaaaacaaacggcgcgtgcggctggcacatctttcggaaagcaaaggcgccggctgttttggcaaagtgaaaaacaaacggcgcgtgcggctggcacatctttcggaaagcaaaggcgccggctgttttggcaaagtgaaaaacaaacggcgcgtgcggctggcacatctttcggaaagcaaaggcgccggtggccttcgccgtttaagaacttaccgtgattgggcttctgatggcaccttcaaaggtagtaactcgtcctgaattagttttaaagctgaagtaaaattgcaaatatttgtttatgagtttttttgacagtcgcatcgcgaaattttctacaagtctatacgattaattgcttgattgaccatagcagtgtcccagctgtgtttgcacttatggcaaataaagccgaagatacttatatccgagttcttcaggtacttattgtttgtattttaatctgaccatgcaataattaacattcaattttaatttaaatttgctattaaaaataggccttggatgcttcacttggtattgcccctaacagtgttatgttagattttgaaagaggtaaataaagttttttgctgagatcgttgcaataccgactgatgcgaaatgattttgaaaattgggatgggcccgatgtggagtaattaactacattttcccgttggcccttgggaaaggcattttctttttttcaaataaagaatcaacgactttgttgccttgaaaagtccatattaaattaatttaattaaaaaataatttttttttgaattcaaaaatgatttttctaattattttaacacgattttattaaaaaggtgattcccaagtgtcgagtccgcaattgtcgggtccgcaagtgtcgggtccgcaaatgtcggggttatccgcaattgtcgggtccgcaagtgtcgagtccgcaaatgtcgggttccgcaaatgtcgggtccgcaaatgtcgggtccgcaagtgtcgggtccgcaaatgtcggggttatccgcaattgtcgggtccgcaagtgtcgagtccgcaaatgtcgggttccgcaaatgtcgggtccgcaaatgtcgggtccgcaagtgtcgggtccgcaaatgtcggggttatccgcaattgtcgggtccgcaaatgtcgggtccgcaaatgtcgggtccgcaaatgtcaaatccgcaaacgtcgcgccacggtgggtacatatcggaattctaaatcttggtattctcgaatttctcttagtctgttttctacaaatcttggctgatcatcctttgatttaatccagaataatactggttttgagtcgcaccataaaatcttttcttttatttctatttttaactccttttccacgtacttaattgctctagtgcctaataatactcccaataattccattcttggaatagtgatttgcacttttcttggttttaatctgcttctcgcatatagcaaattaatttggtttgtatatgattcgattttcaaataaacgcatgccgcatatgcatctttagaggcatcaacaaaaacatgtaaatctgctttttcatatttctctggcacaattctgcgattgcatttgattaccatatttttcaatgacttggtaattaatttccattcactttgtttttcttctgatatttggtcgtcccattttcgatcttcttcccacaaactttggaagaataatttagcaggtaataaacacggagctaaccaaccgcaagggtcaaaaactgagtttaattcttttaaaacttttcttctgctcaaattttcattgtcgataatttttggaaactttataatatatttgtcggtatttatttcccaattcacaccgagtaccttcgggttttccttgattaaacgatcatttttgggtatttctttgtttactttttcagagtttgatatgaattctcttatattcattcgtgcctttttaaatagttcttttaaatttttatatttttcaattgcttcctcaaaattattgcatcccacaaaaacattatcaacaaatgtattatttttgacttcttttgccaaatctgagggttcgttttctaagtgatgtctcaccgttgcccccaataaaaatggtgatgatataacaccaaatggtactcttttaaatcgaaaaacgcataaattgtctttagagattggtttttcgacatctctgacccataggaatttagcataatttctatcattttcttgtaattccaacgtccaaaaggctctttgaatatcaccccaaagagcaattctaggtagtcttgacctcattaataagcctggtaattctggcatataaattggccctctaaatagcatgtcatttaatgattttttgccctttatttttgccgacgcatcatatactactcttgtctttttttcttcaactaatacacaatggtgaggtaaggtaagaagtgttcattgtgaccttttatttcagtttcttccacaatatcttcttttaattgctctttgaaaatttcatcgtattgttttaaaaattcttttgatttctttaatttttcaattattccaatcattcttcggtatgccagaccgaagtttgttggtaattcatcaattggacttttccatggccagctgactacataacgtccgtcttttctgtacacggattctttgaacattttgagtgcaacttcatcatccttttctataggattgtccttaattccaatcatttctaaattccataatttttcgggctccttgtcttctttttctataatcattgcagttagggggcatatatttttcccttttgtaactgtttcgccacaaattattgttccaaaaactgtttctactttaacgagtccttcactgaatggttcaactttttgaaagaatctccaaaattctcttattccgatcaaaatgtcaggtctttcttcgacaaactcaacttttcctgaaataatgttagctctttttattttctttgttataaaatcaatacggcttacaatgatttcttcacatttgccatccaatctctctaattttattacgtatttaggtgagtttaggcgtaccggattgtcttttcgaataggtaatatttctaagtttccttcactaattttttctgggttaattttcttaatcaattcatccgtaattaaagagatttgacttccgttgtcaaaaaatactagaattcttaaatattttgttccatttataattttcacgcgtattgtcattagtaatgcttccttttcactgcccatttctccgatggcagttgctattaaacttgaaatctgcgcttgtctttcgtttcttgagctatttatgaagcgatttgctgctactttttgaatgggttttgaacaaattaatttgttatggtttccgtcgcaattgtaacacatttttcccgtacaatttcgtatttcatgtccttttttcaagcaacgatgacaacgtgcctaatcctccattatttttattcgggtttctctgttcattatctgtttacaatttgaggcccaatgcggcccgtcacataaaaaacatttaggatcaaacggatttgaccgaccatttggtttatttcgcgtttcttgcgccaaaaaaactctctgatgatttctatcgtattaatcaattgttcgacattccattctatggcactatctttttctgcctttaatgcttctaagataattgttcttggaaatttatttttaattgtcatcatcacaaaatctttgtctcccacaaatcctaaattatttaattgtctgacgactctttctatatcttctaagcatactcgaagtgagaaagctgattcattggcctgtggcaaattcaataattcattttggagtgcctcctttatcactttttcattgccaaataatcgctttagagcgtttactaccaattataattttctgcagttggttggtagcctttcattgaacgtgccgcttttccttttagacttaaaagtaaatatgtgcatttttgagcatcagatatcggcttttcgcccatgtttgcttggaatgcctgccaagatactgggcaagctaatggatctccaaaaaatttggccacgggagttttggaaatatactgatggtacttcaac

SEQ ID NO: 2437 - DNA, 2902 bp, Heterodera glycines
acattaagcattcattcacctctttttgccgctccgtttccctttccgtttttgcatttgctgattggatttgaatcttttaaattttgacaatttggccttacgtttggcgttctgttgtccctgccttggtctgtcctcctcatcctccccaatttcttcctccaccgaattgtccattaaacttttgtgcagttcgaattcttggtccaccaactcggggcccggcactctcatcacatatttttgcgtttcgcccattgacgggtccatttggggggcccattttgaggtgctggccgagttgggattgagctgaatatgagcgtgtcctgctgttttgggcttgtcgatgttcgcccaccacttccacaattgtgtctgccgtgctgctctcgcgcattgtgccgcactcgtcgctgtgcgccgggcttggcctcctcctcctccgccacgcattctcttccttttcttcttcctcctcctcctcctcctcttcttcccttccatcccgtcccaactgcacttcttcccctctcctcatcattaaatttgttggtggcaatggccattccgtctcttcgtcgtccaccgattcggtgaaacttcggatggcaaattgctggcgtcgcaactcgtccaagtccatctcatctggccaatgagtgaactaagccgagtcaaagtttgaaattctcaaaaatacaaaaatgagccaaattaagaaacccgaattttaatttaaactttctttaaaacaatggcaatcgatacgaatgagtggacggcagagaaaacaaaagacgaagctaactcaatgggagtgcggcaaagtcccaatttgtggccactgtctttggcttggccaaccaaccaatgtttattattccggcgaagccaagggacacggagagaaggcataaattgaaaataaattccctttttgaggataattggtcaaaacaggcaaaaaatggcagaagattcttcaaagcttttggcattgatttcattagaaaacagaaggaaaagcaggataaatatttgaaaataaaattttaaggaagctgttttgacattatttgagaatgtgctcacaatgtctttttaatttatacccccaattttatttttctcggcaaatgccctcgagggatttctgccgaagggaatgaaagggggggggggagaagagactccgtttcacattttgcgggaaagtcctcaaaattcgcaggaagaatgccacaaataaatgccatggctaacaatttttgctgagaatgaaaaagttgtgccgaattcgcaccgatggccaaaggggcggagaatgagttcgatataaaaatgccattgctacgcactttcctttttaaaactcacccaaatcttttgagatttgccgcgctttttcagacatttgcctaaattaattaagggattttcattttgtttgtgttaatttgcttttattgcttcttttcctccatttgacctgaatgcgtttctgcccgcatgaatatcaaaattctttgccgcttttccatttccatccgcaaaatgcccatttgaatttgtttttttaattttcttatttttgttggaatttgttgacattttttacatatttttaattaataaaaggcaaatattttctgaaagaaaaggtaaatgattttaagcaaataaattcaattaaatgcactgaatatttttaattgatatattcaattattttttagtttattatacgataagaaaatgaaataaaaatttgtttgttggaaaatttaaaaaaaaattttaaatttagttgaactaacggacaaaggaatttgccttttataggaattatacccccgcctatttgtcattgccttccccaccccattttcttgcatttcatctcatttcctttcaaattgggacagtgaaatgaatctcgacgagggacgagagtcgagaattggcacagaagggggggggaaggggagaatgcatggcccttggaactcggaatggattttcttcgcttaatgaaaggaaatggagaatgcggggggggggggaatattattccccttctcaatggaccccccttttccgacagaatttgtcaaatggcaccaatggaaggggaaatgccaaaaagggaatgggcgagggaatcagaggcaaaattcaaacatttaataattatggaaaaagtcaaatcattgaatattatcctcaaatatcaacttcacatttctcatatgtgcgtcattattattggctttcatttgaggatttgtcctttcttccgtccctctctttgttggctaatttttattggcccttgcccgggggcacttcgtttttttccatttttccgtggggtgccaaagcgaacaaatcgattcatttcgaagccaccgaatgttttgtgtgccctcccccgactttttgtgcccttttcactttcagctaataataaagcatagaaaagcagaaaattatcaaagttcgtgacgaaagttgcgaaaagagactttctttgtctaaagccaacgaatctctgaagagattgtccaatgaaagcacacaaaaagcgagaaaagggagagaaaggccatttagagtaataaaaggacgtaaatgggcggaaaagcgaagcgaacgaattccgccccgggcgacgaatttaatgtgaatattttacatataagcagaaaaatttcattgcggaaaaactcatttaacgatttgaaatttggcattacgaaatgccattttctgtggcttttctttcccttttgttttaggggccaaataaataaattgaattgacaagcaaaaaaaagtgttggcattagctggtgaaaaaagttcaattgcctttttttgtcccttttataataaa

SEQ ID NO: 2438 - DNA, 1575 bp, Heterodera glycines
ggcaaagggaaaataaacggcacgggaaaaaggggggggggcaaaagccaaaagtgggccaaaaggcactcattgttgtatcataatatcacatgcgcattctttcttctcttcctctcctcttccttctttcgctccatttgtttctcttttcccatatttaactttctttctccctccctctctccctttttctctctctctataattccttttctcttccaccctttttccctccatctgtctctctcctatttacctctctctctctctgtctttcccctatctctctcttccctctctcgctcttttctttcctcacaattcatctctgtcctctttcatcttcgtctctgacttttctgcgttctcttcgccttcttttgccatacattgtcctccttcttcattgctttcattgcttttgctgcactgtccctctccctcttccttttcttcttcgccctctccttctttctcagctgccttttcatcttcttcctctttctcttcctcctcctcttcttccaattgttcttcaccttctctcatttcttcctcttcttcttcacccattcctcccattaaatcgttcaaatttccgagattcatctgcttaaacatttctttcatctgtgccattatgccatcctcattcagctcctctttcgtggcatttttttctgtaattatttttgatttacatatattttcccccccccctccccctcttctaccctgcattatctttaccttccttcctctctaatcgcttctttatcattccttccattccttccctctccgatctatgctttatcctctctctctctctctctccatctttccctctctgattattactccttcgcaccccccccccctccccaattattattctttctatttgttcattaattaattacccttttccattgtctgaatttgctgttccgcatttttgtaccattctccagcccaatccaagaatgttcggttggccattaatttgctcatcactgtgttcatcaacggatacgcgtcgaacaaactcagcgtcagattcgttttcgcgtcgttgggaaggcgtacaaatgggcccacaacttggcgaacaaaccaatgccaaccgctgtatttcacctatttatgtataaatgaatatttaactcaaataaatgttctgttcccacgcttcaccttctccatgtactgcttcgcctcgtcgtttagcattccgttgaattttgcccaccgttttttgatctgtgcccacgcgtcttcgagcagttcagccgttttaggcgccttttttttcagctcacgccaaacttggtcgccgctttccatgcgttcggcgccggcgtataattcgacgatggcgccgccttcacttgtcattgctttgatcagtttgagtaacaaatctttgggcaatagagctggaaaagatgtttcgccaaaaccagtaaagacattcgtttaacacctcgaaaatgtcagggagccaattagcgataaatgtgtcacattttcgggctaaataaatcagccaaaataccctcctctcctaaa

SEQ ID NO: 2439 - DNA, 3328 bp, Heterodera glycines
ccccccccctccccaattattattctttctatttgttcattaattaattacccttttccattgtctgaatttgctgttccgcatttttgtaccattctccagcccaatccaagaatgttcggttggccattaatttgctcatcactgtgttcatcaacggatacgcgtcgaacaaactcagcgtcagattcgttttcgcgtcgttgggaaggcgtacaaatgggcccacaacttggcgaacaaaccaatgccaaccgctgtctttcacctatttatatatttaactcaaataaatgttctgttcccacgcttcaccttctccatgtactgcttcgcctcgtcgtttagcattccgttgaattttgcccaccgttttttgatctgtgcccacgcgtcttcgagcagttcagccgttttaggcgccttttttttcagctcacgccaaacttggtcgccgctttccatgcgttcggcgccggcgtataattcggcgatggcgccgccttcacttgtcattgctttgatcagtttgagtaacaaatctttgggcaatagagctggaaaaaattgtttcgccaaaaccaggaaagacaattcgtttaacacctcgaaaatgttcagggagccaattagcgataaattgtgtcacattttcgggcttaattagatcagccaaattaccctcctctcctaaattgcaatatttgaattattttacataaataggagggaatgctaatttttgactaaattctcacccatttgcttttgtatctcttctgcccatccgtccttaatccccgctgagaatgcgtccgcgtggctttggaattgctttcggatgtgctcgtccacctcggggtcgggcccatccaacggaatttcatcacaacgaattggcggaattgcgagcagaaacagaaaaataaataataaaaatggcacaaattccatcgcgcaaaaagagcaaaaaaaaaaaaaataaaattgaatcgattaaatgaaataaaatcggagaaagaaatggcagaatgaatgagtaaatgaatgagtgtggaaacagaggccgacttggccaaacattcgccgattatttgttggcccggcacgcgcttcacaaaaggctgacgacgcttcgaaaatgccattggatggccaattttccacaaaaaatatagagaaaatcctataataaatgagaataatattgtatgtacgtttgtattcagctgccataagcatacaaaatgccgcgatgaaaaggcgctttatccacgcataaatttttttgggtgtttaacttaaataagatctttcaaaagttagttttttatctttaaatgaaaaaatgaattaaatttatttaaagtgacaaaagtcgtttaaagtgataaaaacaataataattaaagtaaattatcaaattaataataaaatgaatgaataattgaaaagagatcaaaaaatatacaaacaattaattatttaaaaaatgtccattcatctgcaaaaccgacgttcaacttcacggcggcaaatatcacctgtagagaaaccgatttttaaattaaaatgaaattcatttttaaatattttaattaaatacttaaaattgcgacggaattcgatgggttcgtctcacccccccccccctccccgttttaattcccatgtcatcgcatacatttcacatcgcaacaccacacaaatttgcatcggcacggctcctgtcggatttcgtgccgcgtttcccaccccctgccacagcacaactgttggcattcgatttgtgaaaaactgtcaaaagaaaaccgacataaaagtgccaaaaaagaataatggtaaattgccattctctgccgcttgtcccactgattgttttctgtccattttctgcgtaaagcgaacaataatcaggcgaacgaacctgaaaacaattgaaatgatgcgatgagaaaatgttcaaattttgccagataaacgaggtcagttctgctgggttgagggggcggaaaatgatggggctgatacgactgggcggaggaggcaaagcgatcggagcggacggaagtggcagcggggagggggtcgggcggaggcaaacccaacacgagaagggcactgtccagggccaatgccacctgtgaaacggatgacaaatggtggcgcaattggggaagaaaaagtgccgaaaatgaatgaatattgagtcgattagtgggggatggcatttcaaaatgccaaacaatcccaggcttaatcacccctccccatggcaacttcatcattcccaaccctttctctttgttcacttgtttggcatttgtgtatttctgtttcaaaagtgccgcaaattcttccatcgtcggcaccgttttccaacatgtttttgtcacgcatgaactaaactactcaaatagcctcattaaagtaataaaacattcttcaaacccgctgacgccgtggcatttgcactttttgcgcatatttgtggccaaaaggcgccgtcccacgcgattattgtgcaggttcatcaatgagctaaaagtaaataaaactaaattttaattgatccttggctaattcctaataaatgatcatttttatacagtatctcacccttaccccttttacagtactcccccttcgtagaagaataatcctctcgtttatgtacataattctccccattttgtatcatttcctacagtatctccattcgtttttaccacagtaccccccccccccccctttttccgtttttcataaattgtcccccatttgtttgatttatccccatttttggtcgaatgaataaaagaataatcgtcgacacacaaaaatgggagatggcgtgtgaaaggtcattctcattcctttcattctttcttcaaactttgttcagtttggtgacagcgaatgtcactggccaaataattttaaaaattttgcattttaaatattttaaaattatttttcaattttaccgcgcatcgcttcgctttttttcggcagtgtcaataaatttacgcgtaaactaaaaaaacggtggaatttttacagaatgaaaaatcctcggttcacttgattcccaaagcgaatgttgtcagaacaaccggcccaaatgaacttaacaaatatgtgttcaattataattaattagcgatattaatgaattaattaattattattaaatgcctgctgagggtccgctccggaaaggccttcaacgtctggagaattgatcacctggtaaataaatgctcaataattatgaaaatgtcccttttaaataataataatattttttccaaccgagtacccctcc

SEQ ID NO: 2440 - DNA, 1433 bp, Heterodera glycines
cccccccccccctcccaccgtttgttcccctcccccacagccacactcggggatttccccttgggcgcatgccctcgccacggcggccgaagcaccggccgaagaaatggcgaaaacataagctgtttcaggcgtagaatctaaaagcgaaaacggaatttttggaagattttccattggtatttcgcaccttcttccgaggggactccgacgttaaaagtggcggagcaattccatcgttcctttaattagttcacattatataatttgtactgaaaaggaataattaattaattaccctttcaaattgggcgtggcattcgtcaatcgccgctcgtaggccatctgacaatgggacggatttgtagaaacttcgatttgctcctactgtgttaccgtaccgctaattgatcgcatggcggacggatgtcggacgcaaatgtcgcgttggcgccgtgtcaatcccggctgcatttggcaattgtaatagtcgggcgaggatagagccgaggctaattgagcggccattagccttaattacacaataataacaaaaaacgaaattggagaaatgggcaaaaagacaacacaacaattaccattttatgttatgtgattaggagtgttttaagcttcttaaaattaattagcaattgtcaacatccctttatattttaaatatttttggtatttttaaattattttccctttttaatttattttttgcttttcccatttttttcatgcgcactttcccccccccccccccgtccaatttgtcttgcccataattccgtcccccccaattcacataaatataaattattccatagtgtcgtcgtcgtcttcgaccggctgctgcttccccgctgtgattgcatgttctttacgcacttttcattcaaaacaaacgcataatttgcggtattttaatccaaaagagaaaattgtttaatggcaatgcgcggattaattttaaaaaataagaataaaaacttagtgaattaatttagactcaaaaataaaagttgaattgttagagaggtaaatttttaaaataaaataacaatttgaatgtttattaaaagatggaattataggaagaagaaaacttagacggcataagaaaaaaggagcgatgggggagggggggggatttaagaataacaacacctgacacacttgtcagttcttttgttacaagaataataaatataaataatagaaaaaatataattttttcacaaaaatgcatgtcagattttgatccccaacaagggaattgttctacattctcacaagaattaattcaatatggaggatacaatattattcgtgatgtaccatatcagcgcggtgctggtatccggtcagtatttaaaagcttaatgagatttcttttaccgataggaaaacaaattgaatcttcaatt

SEQ ID NO: 2441 - DNA, 2233 bp, Heterodera glycines
  unsure (1)..(2233): unsure at all n locations
agcagattggtggagcgtgtgttcttctgtttaagctcagtgccgccatttgntggcgtttcgtcggcgggtgccgtcgattccgagctgaacaattgccgaaccccggacaaatggggcgcagtggcaccgcccgtggtgcgcaaatagtccggcatcgcatccatcagaccgttggctgtgcggtcgtcgaaatgactgaaaatgatcaaataattattgcgttttgaagagtgtattcaatttaaataatccgttgctttttgtgtgccatccgccgttaattacctggcaaaaaatgtgctggcactcctcggcaaatgcggccgtccaccgtcgtaaagggagccgaagctgtgcttgggcatgtatctgaaggtgccggtgtcgaacagttgggaagtgacggacaacgagcagcagatggcccaaacggagaacataaaagtaagcggcagcggagaccaattcgaaagtggcgaagaaattggcgaaatgtcccgaaaactcatttttaaaagtatctcctgcaaaatatgtaaatcaagcaaacaaaaacgggagggaaaagaatgggtaggcaaatgaaagtgttgtgttaatttttgtccattgcaaaatgccaaatgcttccgatttacgcattttgggcaatttaaacgaagtgcttacgttaatgaatggttataccctcgcctcattacgaatatcgtccatttgtgagttttaaatgaaatgccattaaaataatgagttggctaatcgcactgctttggtgaccattaaagcgaactgatttaatgggacactaatcggaatgtgcacaattcaattgaacggcactttgggtgacaaaccgactgaagcatttcgaagaacaccaaaaattttatttctcgggtaattaaatttcattctatgaaactttattatttttttataaattttaaactgtttaaatgaatttttaggtgatttaatttaatttaatttcgaacaagccaaaggcacaaagagcctaatccttaagtttataaagaaaataaattagcaaataatttttgcataaatattttctccaaaaaaggaataataaaagtgaagtttcgtgaaggctctatttaaatagaaaatttcgcttttaaaatgccaaattaaagctaaattaacaattgattctgaaaatggcacgcaattgaaattcacatcacttttagcggtattaaaagaaattgtgaaattacattaacgtaagtaagtagcaaaagaaaagaaaagtggcatttgtaattgcaaatttggcacacaaaaaagagcataaaaaccaagaaaaatgaaagaatttaaaaaattaaaaagtacgaaaagaaaaaaacgaaaaaagaatgccgaaaataaattaagagaatgaaatttaaaaaaaaacgaaagaaagaatgccaatgccaatgtcaccaacggatcattggaaatggacaaattaattaaggctactgacgaaacttgtttgtttttcgtgggttttaatcattttttcattatttcgaaagttccggtaaaagttgttgtgtgtcttcgttttgtcttcgtgccaattattactcaaaagagtgccatttgcccggaggggggggggggagtttattggccatccgctgacgaaaagcgaaatgatttgtggggattactcaaaagagctgcgggggggagggcaatggcaaataaaccatagggacgaaaagcggcaaaatgggtaattatccaagtgattgtggcggattagcgttgacatttggggaggaaaaacaatggaaaagccaaaaagtgacgggaaaaaatgaggaaaaagaaaggaatattagcatattttgaataatgactatgtaatatgaaaaagaaaagggaatatttggtgaaattacccaatgtttatttttgtaattacggaaaatcattgggcaattaattcgctcggattggcaaattaagggcccttttggcaatttgcggaaaggaatctccgacggataaaccattcaaagatcgcaaagcatcagtcgtaatgggaataaaaaatgcaaaaatgatgaataaaaaattacttactattaacagacagaaaaaaggcaacgaaagggacggaaaacgcaaaggaaaataaacggggaaaatgcaaggaaaataactttggcactttttgttgagttttgctgttgttccttttcgaattttt

SEQ ID NO: 2442 - DNA, 1860 bp, Heterodera glycines
atctgctaattctaaattattcgttgtgtttttatactgtaaatcgcgacagtttagagtaactcgcctgtataattcatttcacgatcgtaatccaacgcctctgcgtatggtttatttataataaattagaaatatttatattttattatgatatcatatttatcaagttgaaatagtttaaatcctgttatagataatttaggtgcattatttttttttattgcacatttctcttcttcatttcttttttttttatttagtatttaattaatagaattttttatataaaatttttattcgtttttttgtttaacttatatttttttaagaataatgaatttgttttttcatttatttgtgaacaataatcataaatttttaagtattattgtcatttgagctaactttgcgtagtattttcattatattgatattaacatatgtattgcatgtaaattgcaacttttgcttgtggtccatcttgaagtagtgtgattagctttctcaaaattaaataagttctgaaattgaagtaatgattaaaatgtttaaaaattagtttctgtttagaactcaaattcggcctagaatttgtcatcaacggttttaaaaaatataaataaacagaaataaactaattccaattgttgatctgttcttgaagactaccttttttaaattttatattgctttttaaatagaacttttaaattacaaattttatctgaagatcaaaataaaaaattttgaaacaacgaagatttaaaactttttaagtttaagtaaatgaaattatttaaaaatattataaggttgttcttaattaaagattaaataaataagggcataaaaattgcgaaataatgcgaaaaatggtaaaataggagcgaaaatttgaaaatcagtgcgttttttcaatgaaattaaattaaaatcgatgaaaataacttattgagaaaattaattacaaaggaattgaatttcattcttttttcgaagcaaaaaaataattggggtttctaaagaaaattctttttttcagttttttgttagtttgtattcttaatcattttttcatatctttgatgaacctattcaatgttaagattttaatggttaaaaattgaatgtcaatctttgtgactagtaattttttcgaattttcaattagttatttttgccgatggcttatagttttagtaaaacttattgataatagtggaatttttatgaatataatatttttgacagcgcggcgcaaaagtccatttttgctgggcggcgcaaatgtcgcggcgcaaatggcgcggcgcaaatgtctcatcacgttcaaaaccacaatttttatattttagaagaataaagatatttttaaatttacacctaaaagaatataaaattctataatatggaaattctttatttcatgttgtaaaaagaaacaatggtaacagaaaaataacggacaaatgcgctttatttttaaatattaaccaaattaatcttttgaaatttaaaaacgttttacagaaaaactatcaaagcccgcttcaaaagccagaaatcttttattacataaaataaactagccggctccgagggcatgcgcggttcagtttagccagccgcgccctagccgttcgaggcgtagccagtaacggggtagatgcgccaggttgttagtgcagtagcagctcaggcgcagatgcgtgtctggatgttcgtgcagcagcagctaccggcacatgcgcgtggcacccgtgctcagttgaatgagcatgcgtggcgcccgtgctcagttggaacctgtgagcagttggaatgggcatgcgtggcacccgtgaacagttgaaaccc

SEQ ID NO: 2443 - DNA, 4787 bp, Heterodera glycines
gttcgaggcgtagccagtaatggggtgcacagtccaggttgttagtgcagtagcaactcaggcgcagatgcgtgtctggatgttcgtgcagcagcagctaccggcacatgcgcgtggcgcccgtgctcagttggaacccgtgagcagttggaatgggcatgcgtggcacccgttagcagttggaacccgaaagcttggcgaatgggcatgcgtggcacccttgagcagtcggaacacgagggtttggcgaatgagcatgcgtgtaccggaacttggggtgctaacttatccgatatgtacatggtatacaagaataggtcattctggctgggcagtagcatcaaccggaatatgccttatggcaaactgctactccctgttcttcaagttcattttaagagacttttggcttccctgtttaagcacaaacaggtactaacgcctcacaccagcgcgaatgtagtctctactcgtgaggcaaccctcacctgaacgaacacgttcaggatcacagggcgaagaagttataggaacatgcgtgaaacatgctcagatgacaaactgctaccggctgttcgtaagagcaaaaatgacaacgcttggaatcgtaatgtctatacgatggctgttcgtaagagcaaaaggaaaacgctgggcagcgtaatgtctatacgatggctgttcgtaagatcaaaaatgacaacgctcggaatcgtaatgtctatacgatggctgttcgtaagatcaaaaatgacaacgctcggaatcgtaatgtctatacgatggctgttcgtaagatcaaaaatgacaacgctcggaagcgtaatgtccatacgatggctgttagtaagagtaaaaatgacaacgcagggcagtgtattgtctatacgatggctgttcgtaagatcaaacgacaacactgggcagcgtaccgtccaacaccaattcccttgtggtaaacggtttctccatgttcttcatgttcatgttaagagacttttggcttccctgtttgagcacaacaggtactaacgcctcacaccagcgcgaaggtagtctctactcgtgaggcaaccctcacctgaacgaacacgttcaggatcacggggcgaaataatagtgcggcaaaaatacatgagaatgatctctttatttaaacaaaaaccaaaaacacaaacaggtctcagatccttcgctcatcactcgagcagaatttctttgtcggtacaaattcttctgcaaattcttcctctttcatggcaacagaaggccctgcgagagatggcccgacatccatagcatccttaacagatgcgctggagtcatgtactgctggttcgtcacgatgttatgtgcagcagggtagttcagctgttcaggaccctgaaacaccaaatgaactgagctccaattgacatatactgagaaactgaccaagattgtttggaagtggttgagtccattgtaccatatcaaaaccgggttctgtacctgcctttgttgaccttgatggccatgtacagtgaagttttgcagctgatcatgtggaaagtcttgctccattctctgtttttaaaccaatatgaggtaggacttgaaaatatttgtcaccatatgattgccgtctgggaaaaacactccaattgtatggcgaacggtgtcgtcataaaagctcgtagcacggcggacattgtcaggatctacaggtgacacgacaacaattgtctgaccgagtaagacggccgcgatcagagcatcaaatgcgtctgcccaagcagttgcgccttcccgacttgcgatgtaagcgtcaaagttgttgatttgatcgtccaaaaggagtgcttcaataaattgcatgaaacgcgcgcgattggcatagaagcctcgcgggaaacagtttgggtcgtcaacaaattgtcgcaaaagagtaaacatttgctgacgcaagttgaatgcgatgttgacatcgtcacggccaacaatggcgaacacaatggccctacataatggtaacttgtaatttggtagtgcattaatatattcaccggaagaagcaagctccatcgcctcgtacatcaacaattcggacgcgacgctgctgttgaattggaaagtgggggaccggggcgcgactcgttgtaggagtcatggctaggtcgattcgctcaaccgattccgacagcagcgatgttgtcggggaaagctattataacaaacatacaaatgagccttttatcatatacacaccattggaatgcgtaaaggcgtctgcaacgatgttttgggcgttggacgtttgccagcgttcatttggcgtttgacctacgaaaaaaaaaattagaaacgaacatgattgcttatttattactcgttcgcgaatctccttgtacaatttaaagtcgtcgtcactaaatgcgaccaagcggacttcatcgattgccggtgcatccgctggttggtccgcaagccaattcagaattgctctaatggcaatgtgcgcggcatccacacgggggaaattgaaagccccggtggaaatgcttgggaatgcctataattgatggaaagataagtcaacgaataaattccaattgcactaacaattgatctcggctgggggtttgctatatccatgtgcatgctcgcaagatggtccaatgcattggtgtagcactttgccagggacctgcggtggtgctcattgagcgctgcactgacttttggaccgacagcatgcaaaatgtctacaaaatgtgggactaagactaacacgcgattagcactggcatacattggacgttgttggccaagtctccaaacgcgggcgtgtccacgaccccgccgtccgcaattggtccaccatttgacaaaatcttgatgttgagcagttgtttgagctctttttgacgaggagaacacgcgcgatggattgcgtcgtctactccaccgcctttgaccaaatccgagttggcggcattgacgatcatccaaatttgttgtttggtgatgtcgcctttcaccaccgtcaacttgtccagatgttgtttggacactgtgttatccaactcaattggcgttgtctttgggtgctgtgcccttgtggatggcgtgggtgttttgaacaccgcctcattcggcatcccaattggcttgtcatcatcgggttcactgtccgccggtggatggcgtggaaacttgaaaaatttcttcaaaaaatccctttattcaaatcataccggatcgcttgggtcatcgggcagcgccgccaacgccatttcctcctcctcttcgtccaggagctcccgaatcacgacattcttcacacgaaggtcactgcgtgtggtgcagactctgatgttgtccgagtctcgcaccctcgacaaagcgacgtaaagttggccgtgagcgaagcactgagaggtgtccaacagcactccgactcgcgcaagcgtctgacctgcaatcaaaaaacactatacaaaagaaggaaaaggaacaattctgaccctgcgatttattaatcgtcatcacgctgccaggacgaagcgggtattggatccgctcgcacttgatcgggccctcgtgcggtgccttcgggtcaccaccaaagacgaagcgggcggcatggaggtcgtgttcattgccaacatgggtgccggtcagaatgcggcaccggatgatgttgtcgaagagttccatgacttgaactcgggtgccgttgcacaggccctcttccagagagatgttcctggtgaccatcatgaccgcgcccacccgaacacgaagaatgtgttcagggactcctggtggagtcatcctgcacaagttctcatggttggcgtcggcggcgatgttctccaagtccgcttcgcctgtcttgtccaccacggggagagttaccgcgtggtaaactcgttccaccgttgtcagccggtcctttaagaagaaaaataggattctcgtttgacaataatatccctttaccatgatggtctcgttcagttgaagcgtgtccctgttcagagggcaaagaattgcgcgctccgacagctgctgccaactcgcaagcgggttgttcagtagctcggcagggaaaatttcctcgatgagcgcacaacggctcggctgaaccatcatgggcggcagcttgacgcggctttccatgttgttcagcgcgccaataccgatgcgtttaagaaacgcacggtagtgctgctggccggacttcagtctgtgattcgcccgcaaccgcactgttttgaagtcggcaaacaacggcgaatttttgacagacgcctcgagttgttctcgatcggctccaccagggatgaccggtgccagctgtttccagtcgccaccaattatgacaacctattgcaaaaagttcaaacgttgaaaaagcaatgatcaaatttagccaccttcccagcaaaaggcaagtccttgaactgttgcgtggcaacagaacgcagaagccggtcgacaaactcgaggacatccctgtgctgcatgctgatctcgtcgatcaggatgccgtggatgttgcggagcatgttggcaaagttgctctcgttgtcaacattcggcgacgttgacgaatcgacttgcttaagtcggcaaagccgcttgtgcacagtctgaccttcgtacaacagttcggcagcaatgccggtcgaagccatgggaaggaagttgatgccagcggacttggcgcgagcaatgatcttctacaaaggaaaaggaattagtgtggaaaaataaggaagtgatctcacattatacgtgaa

SEQ ID NO: 2444 - DNA, 1712 bp, Heterodera glycines
ttccagtcgccaccaatgatgacaacctattgcaaaaagttcaaacgttgaaaaagcaatgatcaaatttagccaccttcccagcaaaagacaagtccttgaactgttgcgtggcaacagaacgcagcagccgatcgacaaactcgagcacgtccctgtgctgcatgctgatctcgtcgatcaggatgccgtggatgttgcggagcatgttggcaaagttgctctcgttgtcaacattgggcgaagttgatgaatcaacttgcttaagccggcaaagccgcttgtgcacagtctggccctcgtacagcagttcggcagcaatgccggtcgacgccatgggcaggaagttgatgccagcggacttggcgcgagcaatgatcttctacaaagaaaaaggaatttatgtggaaaaataaggatgagatctcacattatacgtaaacgttttgcccgcgccaccttcaccggtgaccatgaagagacgctggatgtctggcgaaaagtctgggcattgtccatcgatgacttgttggacgtgctccagtgcagtttgcacagcatcaatcagctgttgttgctcttcattgggcttgggaccggagatgtacttttgaaggtagtcttgtcgcattgcaccgcgtcgttgaccgtccggaaggaagtccacatgaagatgctcgttaagcgcatcatcacggaagaaggcaagctaataaaggcatatggttttcacataattggtaacagtttcagtaccttcatgaaaatgtccttgctgagcacaaggccctgaggacgtggcagaccaatgtgttcgcaagcggactcataggtgccatcctccctcggctccgagtcgggcgttatgccattggcgagcaggaaccattccatggcattcaggacgtattgcttctgctcttcggccgaggctctctctacgcttgtgtgcaccagccacttgtccgcagttacaagaaccttgtccaaaattgtgcaaggactggcgaggttcgctgtcgcaaagaagactgcaagccatcgaatgcgctgccggatggacttcttcattctgaacgcatcatcgatggtcttcatccagaggtcttcgtcagtgaggagaccacgtgctcccgcagcttcaacaaaggtagggaacacgttgccgttgacggtgcgcaatgactcccatccctttgggtcaagcacaaccaacagaagcagtcgaattgcctgtaatagaaaaaatgatcaaattggtaatgtgcttggcgttctaccaagagttcgcggttgctgggcgaaacggtcttgagccggcagaacttaggcactggcgcatcaacattcagcttccactgcttcttggctcggtcatagcgcaacttcttgtagcagttggcatacgaaaggccaattggcgggttcgcttcgttgtacgcgaagtatgcggtcagctgagtgacgcgctcttcgcccctttgccttcgctcttcttcggcctgggccgcctcgcaaatggcgttcaaattttcctcttcgtccttgaagccctgctcaacggcaatccggtgaccgctcggaccgtgcacgtccaattcgtccaccttaaatgagcaatcccataacatgtgggtgtaataaccaaactccgtacctcatgagagcgtcccacaagctttgtgccccaaagcgagaggatcgcttccatg

SEQ ID NO: 2445 - DNA, 1577 bp, Heterodera glycines
ctttttcctctcttcgtttgctttttttaatatttgttttgccttttccgatcggtttcatttttcgctttttctctcattttaatttttttcgctaatttaatttcacttggcccaccatttccatttaagtgcataaaaagtttaagtctctgatgagaaagggcaaacattctctcgtcccccccccctccctcaaattgcattatttcgcttattacgcctacggcatggaaatccaaatgaaatcccagaataaaatatagagccattaggggaagaaaattagcggccatctcaaattgcgtgcaaataaataaataaacgcttttacgatatctccacgccccaaaataaattgaaatttctgataattatctcaaaatggacacttttcagaatgttcccatttggctctttctaatttgttttctcttttcaaagatgcgttttctcactgtggacgaactcaacagaaaatgcccccgggagggattggcaatggcaccatttgccaaaaatggcaacggcagcacaacggaggagcaacgacggtggctgaaccaaccgttcgacgaaacttgcattagggtgggagaaggggaaggaaacccagcgattgattatgctcatgctttgatcatatgaagctcttttttaatccatctctctctctaatccactttatccgcttatccttttcctccctctatttcatcctttttcacttctctctctctctctcgctctcgctctctctctctcgctctctctctctctctcatcccttttcacgcttcatccctctctctcatcctctttatcctattatcctttttcattcctctccctctatttaacccttttcactcctttctcttctctctctctctctcttatccgcttcatccctcactctcatcggctttatccgcttatcttttttcattcctctatttcatcccctttcattcccctctctctctctcgctctctctctctctcgctctctctctctctctcatcccttttcacgcttcatccctctctctcatcctctttatcctattatcctttttcattcctctccctctatttaacccttttcactcctttctcttctctctctctctctcttatccgcttcatccctcactctcatcggctttatccgcttatcttttttcattcctctatttcatcccctttcattcccctctctctctctctcttatcacattttattctctcctcattattcgttcagtctttcttcctcggactgagtgcccaattgcgtcgttatgagccttgggaagagtggttctacactgtcatgtacacgctgatctctgcgctcgctctgctcggcaatggaatggttattcttgcggtgattcgtaagcgcggcatgcgaactgcgcgaaatgttctgatcgtcaacttggcactttccaatctgatgttggcactgacaacggtcagttgctgatcggctgtttctgatcttttcctccacttttaatgcttttcctcactttgaggtgccattcctttggctaccatccatcgatttc

SEQ ID NO: 2446 - DNA, 1856 bp, Heterodera glycines
ccatcatccccccccccctcctttcttcaggtcatggccattgatcgctattactccgtccgttccctcaacatcaattccccttccggccgatcgggccaatgccttcgtgccgtgctcatttccctgctcatttgggttggcatttgtttaattgcttccgcccttctttcattaacttttctctttcagcttttctcctttttgctttcatttcctttgcttgtttattatcgggtccatgtgctctatgtgattaaagtacattaattacaacatttttaattaatccgaatttaataaatttgacaattaaggatatttatgtgcacgaagaaatcgcgtgggcaaaggaaacgaatgccgatttgattgtattgcgcagttacgggtggcgacagtgtcggctcagtaccggccaatttgaggagggaaaagcacaaattgaaatggttgaagggaggaaggctggggtgtcctttcaaatattataattacccctcgggcattggtttgggcattgtcttttcccttaattaacagtttggctttggtttggctattaatcactttattaacccattagggtattggttcgttatctgatcgtcgtctattaaacccttaaaggcttccccagcaaatgcacaaaattcgtcctctctgatcgctgtcgacgatcgcatggtccaacttggcatggccgcgatgcaaggggcgatgctttacgctgttccgcttgtcgtcctttccattttcaatgtcattttgtgtttggaatttttgaaaaacccttacaatgaagatgaaactgacgcgattcctgaagatgaacaccaaacagctgaaacacaatacggaaagagaaggggacagcgtaattgtgacgacggaacgacgacagaggggcgggtcgaagacatcgtcgatgggaggagtcactcaacgggtacaacagacgaacggggggattaattagccaaatgaggagaatggggaaaggaaacgggaaaacaaaagttgaaaggggtaattagggagaggcaattaattagacaaatgaggacaattggtcaaggggaagcgatttgcaaagagaagttcgaacttattggttccgtttgttcagtccagcatcgccactgccgatttgatgctgccccggcaagtgtccattgttacggtcggaacttcgacgagggcagcggaaaagcgcaggaaccgaacgacagtgagcaaatgccaatgccaaattgcaaattggcatgcgatcgcgcccttcccctccttcttgaggtgcttctgatcgccatggccggctcctacgccgtcctttggcttccctttacgttcgtttccattctgatcgacttggattggcttggcgtggtccgtccctttgcttcaaaaagtgaccgattaacagcaacacttttcaggagagtggctctccaattgtcgaacgcattgatcaaacttgcaaattggtaggcattcgctgaatctgatcagttgggtttccgcttctcttctccttcagttgtccatcacctcaatttgcgtcaatccctttctgtacggctttttgaacaccaatttccggcacgaattcaatgagattttcctttattgcttcgcttggcttcccgcggtgaaggaaagacggcaaagtgaaatttcaagtgggaaaaccaaaatacgatgggatttgataaagtgcgattgatgggccgagtttaggctcactcggcggcggtgggggaagccatcggagaagcattccgcaatattcggcaattgtcagtacgtaagtggcaaaaacaacgacaaactccccaatgtataaaggcaaaacg

SEQ ID NO: 2447 - DNA, 3898 bp, Heterodera glycines
ataatatttaaatgaaaaatttaaattttactcaattttcttgtttttttcatcataataaatttgcacatatttacaattgtaaaattaaaaaagcaaataaaatgagtgttgcctggcaatttccccgattcgaacttacagacccgggaaaccagaggctcgaaacagatcgaatgccgtcgtaatgattcaataagtgaagaaaaatgggaaagttcaaacccgacagcgaaaagtgacaaaagaggggggggggtgaaccaatttaattaatggaggataaatgacgaaagagttaattaagtgagtgatttgacggaatggcattggaagtgtaataagaaatgtaaaaaataatggaaaatgccaatgggacaataccataacgagacaaacccaaaatggcaattatttcccgaggaatgtcagccgatttgtcaattgaaatgtgtttgctgaagtgtgaagaaagcgggtgccgtcggttccgcggcggatgtcttccgctgggcctttgtctcttcccgcgtgccccgcggcacattcttccgcggtgacgcgctgttccgcgaattggcctccgccgcttctctcgcgcccctcgccggcgcccctccccgcctcccgttatccctcgcgccctctctcgtcgtctgcttgtcctcactcgtccccactctgtttttcctcccttcctctctcgtcgccgtcccattttccaaattcaccgaaagtcttttcgccacttttgctgctgttctcaatggtgacgaacttttggtccggcttttcctcttctccttttgctggttatttctgcgtcgcttttcctctttcccattgccgctgaaatcagcgaacatccacaaattttcactaattaattacccaaaattcggcgccgaatggtcccccatttgcgttgctaattgacccgtggattggttctgttgttgctctcgaaaacgcctttccctccgttccgctcgcgcaattcgtcgttcttcccttcggagtaaaaatcgctgataatcgatttgacgggccaaacattgggagagaaacacggccatacactgaacaaaactaagcgttggaatgcacaaaacaacgtcagtaactgacaaatcattaagactcacgagaagagaagaacgaattaatcgaattaaatttgactgaccacgggcaaaaccaccgacacaacggcaaatccgatatgaaacgcgtggtcgtcgaaaagtgttcggagcggttggagacatccggcgacgtaaatgtcctcaaaacgaattaatcacttcaatgattagtcttagtcagcatagacaaacggcaaaccgagtcgagctgttgctcacgcttcttctgtgcattttgccaacattgaagcgatcgaatggcaggcacaagcggattctgaccaccattggcaccgccggcgacagaacggcgacagcacgaaaaagggacaccgcaactgatcagagggacaaaaagcaataaaccaaaaaaggaaatggacgtcaaatagaagagacggaaaacgagcggaaaatgggaaaagcaatggccaatgatcaaaatggaaaaggaaagcaatgtgcaaacaaacgcccaccgttcgggatacggattggaggaattgcatttgaactgctcgctgatgttccaatctctgaaggatgtgctgccacaacactcaagctaaacaaatgtcaaaagaatgatgcttcggatgaaattcagctgccatttcacctgttcctgcatataatccacgaaatccgcgatgtttcgattgatgtgataacggcggatggaataacggagaagaaactgagcggaaatgccttaacgtacgatgggtaatcggataaaaaggacgggcatttgcccaatctgatcagatcggtcattagctaaaacaacagccaattatttaattattttgcctttttcgtccccggaggcgtcggaataaaaaaggaggaacagaaaacaggtgaacaccaccagaacgaggtaagagaggaagacgaacagagcgaactgaacgaagagaaggggtgaatttggaggggaaaagccgggcaaaaaaggggggaggggaaaagcgaaccaatttgagaagacaaacgttgtccctgagggcgccgaaaaggccgaaaagggcgacggtgcccgagaagagaccggcggaagtgagcagcacagccgggttgagcaaaacgtcgacaaactcatcgatgggacgagggtcggtcagaaagagataaacgccaagcgcaaggcaagcgacggaagcgagctggcaagaacttggggattatgatgaccaggaatatcgtaaaagattatgcgactgactgagctaaggccgtcccttttagagcccccgccccatatcctttatcccatttatcccactttttatccgttatcccattttttgccacactaattccaacgggaagagagtgtcagataaaatttgggatataaaattattattacaattaatgcagaagatgtcacttttcttgctggaattaatccttcagtcatttccctccccagcgccccaaattatttgttaattaatcattcatccgctgattggctctgattgtcattttgtcatatatctatttgttcctgctgctcgcattaacatcgcttatcaatcaaaatcctttgccttggggaggaaaattaaggccatcagagaggggggggggggggggggataattggggattaggaggatttggtgaagatttgtcgtcagtttccatttgggaagagaaagcccattcattatttactgtccatttcaaggacaaatgctaattatggataagcaaatgaaaaatatgattttcatttgagtgttttgggtgcattttctgtgccaattttctaacaaagtaagccaaaatgtgaacaaaaacaaaaagtcaaactcacaaaaatgaaaaaattgacggcgaaacagagccatttcaggggcccacagatttcctggcgcggcttttccccccgccgtggtgccattcgctgtccatttctcgtcggtcctcaaaagtaccaatggattcacaatcgttccccattttatttcattgcttcacctccaattttgatggctatttcgccgacttttctcgccgtttgttcggcatttgctgctcggccggtcgcattttggcgaatgccaccggccggtcgatgggcaaccatcgccccggggatttggggttaaaaggcacaacgaaacaaaaaatggctgaattatctgtaggatggcattaataaaattattgacaaagaaggcttaaaatagaaccatattaaaataccaatatcaatcagttgcccattaaaaatacaaagaaagtgacactatcgaacaataaatgccaccgcagtcgcttaataattatcgctaattgccctttccaatcaatactttatgaatgggaatgaatgaatggattaattggattaatggctttgatcgccccccttttttccatttcattcattcttttcaatccgttcttcgtccgccccttctgctgctctggtcagatcactcataataaaagaaacattgcccaatgtgttgtcttatcgcgcgaaaagaaaaacgaacgaatgaatgggcgacaatcgttgcgcgacggagtcggaaaagaatggaaaacagcgaatgatcaaaagcggaggagagattggtgaaagatggcacaaaaagcggaataatacagaagaagaaagaagaagcaaaaggaagacgaaaaggagaggaagggaaagaagggaaagaaggaagaaaagagaaaagagaaaaaggagagcaaaagataaggggaggaagagaagagagaaa

SEQ ID NO: 2448 - DNA, 1344 bp, Heterodera glycines
caaagttacggttcaaaatgtcttctgtcgacgtttcggccgacgacgttttggggtgccccggcagcagaacgcgtcggttgggcatttggattctcccccccccccccccccataaaccatttatggcggcggaggatcacttccataaaaccactggtacattctgatcgtgttcaccttttcaaatgacatttgccagtgaaaagagcgaaatgggaaacattgggggaaatcgagcacaacgaaagcgaatttccggttttgcatctgtcagaggaaaaggaaatgaaagcgaattgatggaagagacaacggataaaagcggcgagaaaaaaagaaaaagcgaattgaattgaaagggataaatacggcggaagagaaatgtcaaaaaagggaaggcaagcggaaaaaaaaaattcggaaagtaaagcatttgatagtgctgagaaatggacaaagaaaggggatgggtacagggaggggaagagggaacagaggaaaaaggaggtatagaggagaaagacagggaaaaggaggagaggaagagaacaaggtgaaaaaggaaggaaagagagacaaagggaagaggaaaatgggcacaggggaaaaaggaagagagaggagacgaatagaggaaaagggcaaaggaggaacgggaaggaacacagagagaagctaaagtagagaaagggaagagaaggtatcataattcactcgctgcgcaaaacactccaaaattgcacttaacctccaccttaccccctccccctccccatatctctctctctctctatatctctatctctctaatctcttctctctcttgtctctctctctctctctttttctctgcgaggaaaagcatagaaatggaaaacatttggagaaggaatcggagattagtgcaaatgtatggtaatttgacttttaaattgcaataaattcaatttagataatttaaataaatgaattatttttgatgctaaatgaagggatttgagttggtatttggtccgaaatattctcaactgcaaattaacggatcaaaagaattatcagcgcaagaaaattggagccgaatgaattgagcgcatgagcaaattttgctccctgctgctgttgcttgagttgatggtcatcgttgcccattttcattttcctgaataaatttccgtagccgtggcaaccaatggaaagaagagagaaaagcagaagagagaaagagaggagtaagatagtgggtatgagaagaaagagaagagagagaaagagaggagtaagatagtgggtatgagaagaaagagaagagagagagagagagagagagagagcggagaggga

SEQ ID NO: 2449 - DNA, 856 bp, Heterodera glycines
gggggaaggggaggtcaatcactcctaaattcggaagaagcgggggcgggggggggtgaaaggagccgaaaacggaattctccaaatatggtggaggacgaagaaaaatgtgatgacggatgaaaagggaagggcggaagagaacggaggagaaagagaagaaacgaatgagagaaggaagggaagcatagacagagagagaagagagagagagaaaagaaggagagagatggagagagaggagagggcgagagacaacgagagttttctcttatttattagccaattttctgtcaaattgcgttaatcaaaacgaggaacatttgtgggcagtgtctctctttcgcgcaattttcagctttctctttcggtcgccacctttcacaaaatgatcagcaaagtgtctgttctgctactgcttttggtggctgatttgtgagcgggggattcctttcgattggctttgtgttgatgaccctcctcttcccccctccccctctcttcccaaggtcattcccagcgaatggccggggggcggacggagttttgctctgttgggcattcttttgcttaaataagccgccctttttcggctttgttttctttttagcataaaaatatttaatagggaacgaaaaccgaaagaagcaaaagacgaacgaagcagcataagtaagtaccagcaatgaccttattttattccgtgtgccttatttgtgaacactcaaacggtttaatgggattacaaaaccgagcgaattagcaaagaatggagagagaataaattcgtggtattgggggggggggatgaagagtcttttgttaagacaaatttggcgttgagaaggataaaagt

SEQ ID NO: 2450 - DNA, 3863 bp, Heterodera glycines
aatacgagaaaatcttagaaaaatcaaaaaagaaaatttcaagaaaattcaaggaaataaaatcgatccctgtttaatccaatggtatataacacatacgcatttccgatttccagttcgggtgggtccattgttagattttcaaaaaagataaaatagtgttttttctttaaatgttttaatttttttggcggcggcgttatgtcccggcgtcgttttgtcggggatgtgattgtcctgttccggagccctccttaaatttttaaataaaaatctccgccccttcccccgcggcggaatttccatgccccgggcggtggcattctcagaaaaccttccagcgccctttgcccctctgctgccatcccaaaggatttgtttgcctctctctctctctctccgctgtctttggcacaattcgccccattcttttcccgccctttcgctcgataagtgaattccaaatttggcaccaccaattgctattcattgcgacacgaacggacaaatgtgggcaacacgcggacagacaaatcggaggaacagaagcaacacatttgtcaaaaaggacatccaattgtcataccaatcattagcactaattacatttaatttcgatcatttatttcattaatttggacagagcaatcaattaaagggggaacacaaaagggatgaaaaatgtcaattgaatggtttaaagagcagaaaagcgagcacaaatgatgaatgagttggaatgccgaatcggtttatcaattatggtaaaagcacagaaacagctaaattggaaacacaaaagagtcacgtgcgacccaaagagcggaaaaaagccattggcagaagaccatggaaaacgaattatcatggaaaagacaacgggtacaaaggccgcccatttgtggtcatttctgaaggaaatgtcagcaggcgaaaaggccacgccattcaaagtgaagtgaaaatgttttcccaattaaattttaatttgctttttaattattcaatgttttgttaaagtgaaaacaaattgacactttaaatttaattttatcacttcgccgtgcccattttccagcaaaagcgtcggccattcgccgcccccgcaggcgctgcccaaaggaaaagagcgatggaaaacggaggggggggggacgggggatcgatggaccgagtgacttttgccccttcttttgcctcatttcattcttttattccacgcattcattatctgctcctgctgcaacatatccacctctttttggctctaagttcagtttaggcatccaatcaatgagaccatctttagtttctttgcccataatttttatggtattcaattgattgtgcttctcatgcgactaccaatagaaaaaaataaacatgcaaaaatgtaaaaacataaaatctgtgcctaatttcttttttaaatttaaatattagtacgtaaattaatttgtgctctttttggcgcgaaatttaaatgaaataaaataaaacataattcgattgcgttgcctttcctttcatttttctttcattttcgttttcttaattattacgcttttctttttttattcgaatcaaaaacaattgtgtatgcttttgcctttgcttcattcatcgttctctccccccccccctttttttcggatcgatgcaccgaaattccatcgaattgctaaaacaaacattttgtttattttttttgatttgaacatcattcgctttctcttcctttcacagtcatttctctgttccctttcccatctttattttgccttaaattttacccttcgaaatgcaaataaaaaatgttgcccctttccattccccttcctttccaatctctttggctgtaatggctttgttatgtatttcatccattgaccttttccaccatttcattctttgccgtgtagccattagtcttttattacaagagcattcactccctccctaccttttgctgtttatttgcagattttataaaaaaacaagagctactgcattttacgcgtaatcaatgaccatcatcagttttttaggccataatctttccatacctggtcaaagcataagtaggacttcattcagctgaaaccactaggcatttaccaagtaagaaaacctaaggaaactcaggatgatcatttgttggacgcgtaaacagcagtagagccaaaataaaaatgtttcttacctaattcatagagatcatcatttattttcatatttacagtaaaaatgagcttcacttttcctggtggtgccaggcggccggtcatcgacatcaatagtgaaaatctgatgttcgtttggaaccttccaagatggatcgatatcggtgaaattaagaggtcggttacattttatccaatttgtcttttttgctaaacatttcattaatttttcagaagcctgcagccaaaatatggaagggttcgtccttttgaccgtattcaaaatacttagacaaagcgtttctcattctgttactttttcagatcaaatttgtggagacgtttgaggcgtggagagaggggaggcgcatgggacaaatcattctcgacttcggcacgtacagttctctctcagcgttcactaaggcactctccaacaaggaggagttcaactacgagggcgtcgagttcatgtgttttgattcgaaagtgatttgattgccatgccctatttttcatttgctttttcccttttcagattggtcagaagccgtttttcaacttcgtccgtcagcagaccggggtcgacttgttggcatgcgaaggagtgccgccaacattcgaatacaagcgaaaggtcagcctgatcagaatcgagtgatttgctccaccaacttccgcactgtttcttatttatattccttttctgaagtgctcaaataaattcttatttttcttttctccgttttgtctttgtttttccattctttacaattagtgcgactttttctagggatcttccttcgaaagagaacagcaaaaccccaacaccatttctctgcgacctcgtgttagggacagggatagtccgaggggcaccgaacgcagtcgctacaaccgtgacgacgacgacggcaacaacggacgacccaatggtgcggcacaggccgtgccttctctgcggggtgtgggccgtggatttggacagattggctcccgatttggcaaccgcgaattgccaccgccatcggacgaatcgaagcgaacggcggcatttgagaagattggctcccgatttggcaaccgcgaattgccaccgccatcggacgaatcgaagcgaacggcggcatttgagaagattggctcccgatttggcaaccgcgaattgccaccgccatcggacgaatcgaagcgaacggcggcatttgagaagattggctcccgatttggcaaccgcgaattgccaccgccatcggacgaatcgaagcgaacggcggcagacgaaaatgagtctgagcagagaaatggaaggggcgacgagaatcgtcgcgttcattcgattgttgaacagggaaatgataaagtcgaagatgaacaaactcaccggaccgattcgccgcttggagacttcggaagtaatccaccgagtcgaaactttgcccggcgaatcagtcgcccgaagccgtcatttctcggcgaaaaacgctcggagggattctttgctgctggtaaaattagcgggacgcggaagcgtcgagcaattcgaaattgaatttgggttttagttgacggaatcgaagaaaatggaggccatgtcgagaaagtcacacaatcagaaacaaccgccgtggatgacactttgttgggaatggacgaagactgtacggaagatgccgaagt

SEQ ID NO: 2451 - DNA, 2370 bp, Heterodera glycines
  unsure (1)..(2370): unsure at all n locations
gcatttggagggcccaatgaggagaatgacgacgaaattggacaagaaaatgacgatgaagttggacaagagcagcagcagggaaaggaggagggtgaagagagagacgatggcaaggggacgccatcagccgacgacgacggggagggcgcgaacaaatcggacggacgcaccacggactcgtctttcacacagtacagggagaagtcgcggtcgcgcgaggactccgtttctgaggatcgggacggacatggcggcgccggggtgaaaaacacgctgaaaataacgcaggcgagtgacatggggaggggaaaggaataaaccacaacactccacggttcagctggacttcggttttgacatttcgaagattctcgaagcactgcaaactgtcggggaagtcgtccgcttcgaacgccttgggaaagttggtaccttttgaatttccgacaagcaatttcacgtacaatcagtgtcttcccttttcagactagcgccgctttcactttcgacgacgcggctgaggcggccaacgcgagtgttttggtggtggacgacttggcggcaccgaatgcctattttcaactgatgacagccgaagaggcgtaccaataccaataatgaaggcaaagtcggaaaaagggtcaccgatttgatttgtgtcttcgccatgccttttatgtatttgcttttgagtatttgttgatcatttttgcctttatttgcatttgcatgtctctctctttctttgcttcgctctgaatgcgttctcaccaatctctctcacaatcttacattttatatggtctcagccctaaattgttttttgttttcaaagtttacgcacaaaaggtttgtattctgaatttatatgataaataacaccgagctgctctctcttttcgactatgtcttctcattttgcaaaattcgcgtggattaaacataaatttaatggacaaatcaattttttgtgatggaaaatttgtaataaattaaaaatggtttaaaacaattaacaattcgcttggggaagggaagcaagtgaaaaattcacagctcaaatatcatcacaacaattgaaagcgatcggtcagttaagccgatggaggaggggcggcagaaggatgatatgctcattataataattaattgattttgattgagaaagcaaattgggggtaattaaagggaaaggaaaggaatgatttgctttaatatcacagagagtgaaggcattgctcatcaacagaaagggtagagggggggagagatatgtatggacagacaaataaacaaaagaaagagaaaaggcaaataatgggagatagagtggggaaaaggaagagacggacagagagagaatgggaaaaaagggagacggatagagagagaaaagggacgagagagtggggaaaagaagagccggatagagagagaaaagggacgagagagtggggaaaagaagagccggatagagagagaaaagggacgagagagtggggaaaagaagagccggatagagagagaaaagggacgagagagtggggaaaagaagagccggatagagaaaagggcactgtttttgttttggcactttcgcttttcgctttttttttcttttcgtctcgctttgaggagagaggaggagcaagaatcctatgcgctttgtattgccaccatttctcacgtcgattgttgcgcaattgccgccgccgctccgatttccgtcggtccgaccgtcgccgagggcgtgaaactgaccaccgccggcgccgtgccgttcgctgtgatcgaatgcgccggcgcgccgccattgacgaacggcgccaacgaatggtggcgatgggcgaagggcagtagaggtgcgggcggggcggcgaacgacggcgccgcaagtgcggcggcgccgtttcgcagtgcggcaaagttgcgcagccaaaagtcggcggggagtgccgaatgggcggcggacgcgtcggagggcggcgggaaaagttgggcgagctgaaaaacgcggacaaattcgatggcggaacgatcagcggaaggaaaaggcatcattctcacgtggccggcgaactgtccgggaacggtgacaaacacatggccaagcgacgggtcaccgccgctggtggtggacacggcgacgggcgaagggaatgggaagaattgnggcggcatgggaaaagcggccaaaagcggcgaatgggacggaagggcggcggacacgacggggttcagcgcagttggaatggaaaaactggggaattgtggggtgaatttgaaaagaatgtggcgaaatgtcctccccctctcacagtgccggcggtgcgcccgtcggagtcagcggcggcggtggcagcaaac

SEQ ID NO: 2452 - DNA, 2228 bp, Heterodera glycines
acaaacggaaggaagtaattggacggaccacagaaaatgggcacaattcggccattccatcggttgtgccaaatcacttgcgcctaatcgctacgaaactttcccccctctcttttcccctttgcttccccccccctttcctccttctccccttttttcctcctttctctcccccattcacttcctttgcccacccaccgtctctttttgcccaattccatgtatttgttgtgcatttcttgcgccgcgttggccgccgcctgttcactgtccatttgaatgaacgcttcgccgctcggatgacccgccgaattgtaaatcatatggacaccctggaaaatttggaattctagcaaaaaaaagtgggacttttccttttacctgaaacatcactcgctgcgcgtgggggcccaaaaattcgatgacctaaaaattgggaaaataaactcaaaaaaggagtgaaatgtgaaataatgggcagcaaattatgcaaatggacacaaaaatggacaaagtgacgaaaaaaagtgagcaaaaaaagggacaaatcaccgcaaaataatttatgcgattcgacggagataacgcggccaattaaataaatatattctctttttgcaattccaaaccaaaggaatttggtcagcagcaaaagcaaacacggaaaacattatgtaatattttctaaatcaccgactgattttttttgtaattttatgccaaaagactcatttattactgtattacagtatataagacagttttggcatgccacctgctgcacttgcgcctcatagggcagtccgcgcagtctcagacagtccctttgccgctgtgccgcccgttgttgcagcggcgggtgggcggcggcgacggcgccgcccgaattcgccagcggcgtcagaacggcgccgttggcggtggtgggcgaaccgggcgacaaaacattctgacaaatgagagcacaggggaattcgacttttgcatcgtaattgatcaaaattatgcaaagttgatcaaattgcctgtggcactgtcgtcaacggaccgacggcaccgcccaatttgttaattgtcagtgccgcggcgacggccgcgttttgttgagcaactcgcgcattgaacagttgcagaacttcatgctgcattttgaaaaatcataatcaacaaatcaaacgcaaacgaaagatcttttgcgggaggaaattcgaattcggcgactcaaaagccaaacaacaaaatgccaatgccaatgtaatttaaataatttattcccccccggcattgaactgctccgacctgtgtggtcctgaacagttcgatgtatcgtccgcccattcgattgcggttttttgtgatcagcgccttccgtgcgctttgctcgtcgccgaacagcacgaaagcgtcgccggaggggcgcccgtcggggcggtggaggaaaaggatggagccgggctgatccaacagtccgctggactgtccgtcggcgtaggagaaaaagtcacgcacctaagaggagaaaaggacggaaaatggacgaacaaaaccgcaaaattcagtacaaaagaatgcgtaataattgtggaaaagatttttgaattttaattaaatattttaaatgggaaatgcaaatgttataaaaatatagaattaatcgaaattcgtgccatttatcggcctccaccgcaacaataatttgttcacctgctgttcagttgctgtgaaggggaggccgcgcattcgcataatcattgccatcgcactttccgctcgaagggcaaaacgaaccgattgactgtcagtgcctggaaaaccagaagagaattcgataggaattggaaaaagtgccaatggaaggaatggccaagggaatgccaaaaagcaaaaacacaaaaaagtgaagggaagaggaagaagggatcggaataaaggcaatttgaaattaatcaatggaaaaatgaggtaatccactaacaatggcatctgagcaattggcgggggggggaagtgagtggggggagtaggagaaggagacgacggcattgggggcggggggggggaggagaggcaaacaacgcttggcaataggcgatcatctgcagccgatcacttgggggaggggcatcagagaaaacgagaagaataagtaaaagcaatgggtgggcgtggggcaacaatgccaaaattggagtgaatggacaaagaaagatacggcagtgaatgggcgt

SEQ ID NO: 2453 - DNA, 1778 bp, Heterodera glycines
  unsure (1)..(1778): unsure at all n locations
caagagttcaacgatattnttcaattggtgcggcggcctaaacaaacgaagccgctccggggcgaatttggacggcacgtcatttaaaaatttaaatttaaaagcgaaagcaaagaaaaaaaaaagagaagaattttgggccataaaaatgctaataaaaaagaattccttaattatttattcatttcgttgtccaaaaatcgatctgtgagcatttatttcccttttgagaataagcaaagcaattttaactttgaattggaggaaattcaggcgaagtcccaaaaaaaacaaaaaacaaacaaaaagaaacaatttaatgaattaattggttttgctaatttgccaattccctttcctttttccctcactcaccgacggcgtgtttcacaaattcgtcccccgaggcgcggtacacttcgatgtaccgcgcgtgcaaatgccgccggtggcgttgcagtgccaagtcgcgttggtccgcgcgcgcgaagcgcaccaacgcttcgccactgcgccgtccttccggccccaaacagagggcgacgccaccgctggaaaggggaaaggcaccgaaatcagaaggatacggtaatacggggtggaagaggtacggtgggatgtcgaggccggcgaaaaacatcgccacgtccaagtccgagacgtgccaaggcaacccgcgggctcgcaccacacagcgtgagtcgacgtgcaactcggaactatttttggtccatcgattagccgcttcaaagcgtctcgccccccgctttttctaccaaactgccggagcatagccttgggcgatgcgctccaaccgtgacaaaatggccacggcactctctgaaatagcctttggcactcaaaaggcgtctgcgctcgccccgccgctcaaaaggcgcgctgacctcccttctcgcacagtttgccgtacatccgtcgcactctctcctccaactgtctgcgcacctcgccgtctccgccgctgtccattggctctgtcggcgtctcttctcctccgctccattcggcaccattggcggacaccgcgtgggatgacgacacagcgccgccgggagaagagaaagggacaaacgcgtggaaaaggggcggcagcggaagacgggcggagaacagttgcggctgacaaagcaatggacggacataattcaagaccaactcttgacttcccttaagcacttttctcccgccgttcttccctccttgctcccctcgctctcttttatatttctctctctctcacactccctctctccccaactttgtctctctcccctttcacctctctctcatctctgttgcccctctcccccctctccccatctctctcctctctcgtcccctctccacctccccatatctctctctttctcccatctctctcctctctcttcctctccctctctctctcccccatctctcttcctctccctctctctctcctctccccctctccgcatatcttctcttctctccacctgtacgtcttgcgcttgttgccccatttcgccgcatcggtccgtttcctccgccgccatttgcgcaatcatcgcattagcacacagcggataaatggactggcggattgcctcgcgagagcagaacaaaacgccacgtggtgggacagaattggccacctgcgtagggtgggaaaaacaaccaatggggattccccaaaaattaaaaaaaaaatcaaaaattcccgaaaaatctcccgcttttgtcggtctcttttgcccccccctccttttcccaccttt

SEQ ID NO: 2454 - DNA, 2303 bp, Heterodera glycines
cagatataaggactgcctcgctgcttcccggtatgccctttcctctgatgcatggaaagagactcagccgtttcatattccttcacacaaatttctccgtcgtccaacggcaaaccgacttaacaaatgagcctatcattaacaaaatttaatgaacaaaattttacgcatacaatgtgaatgtgttcctccgccatttttaagcagacgtaatttttgtgcgctaaaaaaggaaaacaaaaaaaaatacaaaagaaattaatcaaaatagacacatcaaattaaaaatgattgtaatgcatatattacgaaaatgaacaaaattatcgtcaaaattatcaagaaaaaggaattaaaatatttgtcattgtaaggattagagaccggcgcaggacaggatgctgcgcaggattttgcaggatcccagtccgcaatcctgcatattttggaaaatacaggatttgcaggattcgcaggatttgcaggattaatcctggatcctgtcctgcaaaaaattttcaattccaatcctgcaacaggacccgcaaatttgatttttatgcaggattcagcaggatcctgcattgattttttgaaaatttttaaaaatagaatgccaaatattcagaaactttcttttttcaaaaatttttttcttaataaaaatttttcgtttaaaaacttatccttattcgaaaaaagtttatacaattgaattttttatgtgttttgctacctaaaaagcgttaataaaattttttttttgctattttcgtgcctattttaggatttttctgcctttttaagtgcctatttcgccattttttgtgcctaaaaatcccatccctattcataatggattatggcttttttgcaaagaaatttaaataaaaattattttactttaatttaagctattattatgagccacccaatttggcaaatcggtcttttaaaacgcattaaagaagattcagtcgattgcttggagtgcaagcaaaaaaacattattaatttttcatcttcatcattttttggtttaaaaatatatttgaatacttttttatactttgaaagacttttttattaatacagaattttttgaaatttcctaaaatccgcaatcctgcgcaggatcctgcagattttaaatgcaggattgcaggattaatcctgccggatcctgtcctgtaaaaaattttgaattccaatcctgcaacaggatccgcaaatttgaaatttccggtctctagtcccactgcgggattggaattcaaaaattttcacgggctgggatcccgtgagattacctaatcccgtaaatcacgcatttaatttgcgggatcccgcgcagaattaaggaattttgaaagctcgaaaaatatgactaaaatttagttaagaaagagatattttttttatctcgttttggtgtactattttcatatcttaaccaatgaaaaatattattttcctggtttttattttggctgtaagtatacgaaatcattttgatcggatcggggtcgcttcgtcgcgtccaaatcgccgctgagccaactcgccgccacttcgccatatctgctttgtgcctgctgtcgaatcagctcccgaaaattcaataaatttccataaaacgtttcccgttttcatataatttctcttgttttattaaaaaaatggacgtttttctcgttaacctaagcacatccatcgaaaacagtgaattaaattggttgttttgataattgagggaaaagtgaaagaatttgtgacggcagagaaatacaaaacggcgagaatcgcccagcagaaaatgctaatcactttcccccacagtgagaataatcgtcggtacatttcactctatttccaccgcccctcacgcgcccaccgcacaaagcagcaaaagattattgggggtttggactcgtactgtcgctacagcccaaaataaaatcaaatcatttcaattgttgtgatttggctggttaatttcactttggtcatttgtgtgttttatcgcttctaatgattaattattgtttcatttactacagtttttttctgagtgtttttccactaattgcatcaatttgattattaattagaccaattcctcaactggttttatgatatgcttttgattggttagagtgattgatcagttttgagcacaaacaaacatttattgtccgactcggcttcatcagcacattccatcacataacaaataaaatcaaaaagaccaccggcagaataaaaaattggttttttgaactcattcgtccgttcgttgcccc

SEQ ID NO: 2455 - DNA, 1963 bp, Heterodera glycines
tcggatcaaatcgaatgcgacgcgttgttctctgctggtgctcgacgaagagagcgtccaatggtagcgaaacgcactcattttcaaatatttcacgcttttaggttcaaagagcgaaatgtgcctttgtctaatgagggcatcggatcattggcggcaaccctttccaaaaatgggggccaaatcacaggagaggtggggatatgttggggcgcggggagtagagtgaaagaggggagagagagcgaggtgagagggggagagagcgagggagggtgagagagaatgagagagacagaaaagggagggaagtagggagcaagaggatgggagaggaagagggatcaggaggatagaaaggaagaagtgatttagcggtgggaagagagaatagagcgaggcgagagatgatcgatcggacatcagatcatgttcattaattagaattgtaaaaaggagaagccccaatcgaatgaggaaagtagctcctgtcgaagcgcaagtgacgcgtcggtcgccgacccgacgcctttccccgcggcacaaatcatcgcccaatcgcaggaagaggtaggaaaggatttgttttttgatacgtcaaattgtgtttcttagggctcccataataaaattttatgaagcctaattaatttaaaattattcaaacgtaaaatcgcatggaaagggaaggaatagaaaaagaaatacccaacaccaaacaaatacatgcaaatgaccttctccatttccaatattttctgtttgatattttataatttgtgaaacattagaaatgccggggttaattagagaaacgtttatggaattaattaacgcagaaaaagaaaaaaggctgattaaactgaccctttgaatagattcactgtttattattttcttttcctcccgctcactctcttccctctccccactctctctctctctctgtccgtccgctgtctccaatctctcccctttaatctgtccccctcccccttttttctcatccctcccaatgctctttacgcttcttccaaatgcaaattccctttggacagtccaacaaatatttattgtaaatacaatgtcgacacattcattcattctcctctttcggcccttctctttccaaatattttgtttatgctaaacctttaaaaaataataaataaaaattaattaaaatttgctcagcttttcctttcttccgcttcttctctctttgcctttcgtttgttcagcatttgcttttccttttcttcgcttttccttttatccgcttttcccttgccattgttttgctttttcactttgccaatttgaacaattcttcgccctcccccgacaaaacaaatcacttttttgtaaaatgatttcccactaatttacgcatggaaacgaacgatcgatgggcgatttcttcagttgctcattttcaatatttcttattaaatgttcagcttcgactgctggacaaaataaccttttattaccgtatcactttctctctctctttattttgtctcttcgatcgaattaatgccgcggatttgtcaatattaatcacattcaatcattattatctgctacctactaaatggtttttttaactttttccgagtattttcttttttacttggcttttcctccatcgttttatgcttctcatctcatttaatttgtaccccctccctcccttttctcctcatatttatttctaaacttctcctttactctccccctgtaaagccattgcattgggcgcactatttgatattattacataatattccctcattttttatatattttttgtccatcattctttcgtctgtctcaaccaaagtccattttcaccatcgtgcgaattggattcaatttattgaatgaatggatggatgggcattccccccccccccccccccgtggacagaaatggtgagatgagcgaggaggggggggg

SEQ ID NO: 2456 - DNA, 4345 bp, Heterodera glycines
  unsure (1)..(4345): unsure at all n locations
tgctctttacgcttcttccaaatgcaaattccctttggacagtccaacaaatatntattgtaaatacaatgtcgacacattcattcattctcctctttcggcccttctctttccaaatattttgcttatgctaaacctttaaaaaataataaataaaaattaattaaaataattgctcagcttttcctttcttccgcttcttctctctttgcctttcgtttgttcagcatttgcttttccttttcttcgcttttccttttcttcgcttttccttttcttcgcttttccttttatccgcttttcccttgccattgttttgctttttcactttgccaatttgaacaattcttcgccctccccccccccccgacaaaacaaatcacttttttgtaaaaatgatttcccactaatttacgcgtggaaacgaacgatcgatgggcgatttcttcgagttgctcattttcaatatttcttattaaatgttcagcttcgactgctggacaaaataaccttttattaccgtatcactttctctctctctctttattttgtctcttcgatcggattaatgccgcggatttgtcaatattaatcacgattcaatcgattattatctgctacctactaaatggtttttttaactttttccgagtattttcttttttacttggcttttcctccgatcgttttatgcttctcgatctcgatttaatttgtaccccctccctcccttttctcctcatatttatttctaaacttctcctttactctccccctgtaaagccattgcattgggcgcactatttgatattattacatattccctcattttttatatcttttttgtccatcattctttcgtctgtctcaaccaaagtccattttcaccatcgtgcgaattggattcaatttattgaatgaatggatggatgggcattcccccccccccgtggacagaaatggtgagatgagcgaggagggggggggagggtgttgcgtaaaagcgtaaaatctgcgggataaatttcggtcgagtatcgatcccctccatccattgaaagttcgcatcagccgcctttcccaaaaaaggccaaaaaagcatgttttccaattggaaaatggcaaatgatgcgaaaggacagcggagtttctgccgaagagagtttattctaatggccttcaatgctttcttcctttcttctgtgtctccttggtgaggagagattgaaagagccgtgccaacaaaagttgggggcgggggggggacgcggaatttgtctccccggcacggcacagccgcacttaaagtgccgaccgacggatgagctttgtgatcgcaattggcattttttttttattcttttctcattttgttaacaattttgtttgaccaatttttagtcgctttgtctttcgtttgttaatcttttttaattaattttatttaatttttagtccttcccctccgaatattcctcgccttcacccctcctccccgtgctttcctctgctgctaatttcagtacggcaacaattccgcgccatcaccaaactccaattgaggcaccaacttcagcacagcttaaggtcctaaaaataaaggccataatttaataaatgaattaacaataattaggccgccggaccgaagccgcgactttgcgcacttatcaaaaaaaggtgaaattggagtgaatctgacaatgaaagagtttcgaattcatttgtcacggccaatgtttgcttttgaagcaacagtttaatttgctctccttcagtcccattgacgaattcggcttcaatttgcacgccgaaaggggcaaaggtcacttcgtcggtgccgttgacaaaggcggcatcgccgatgagttcgtccaattgactgtttccgttctttgcgttttattcgatttgttcagtgccggcctcgaaacggggcaaagaattgtcggcgttaacggccgtttggtgtccgcgcaaacgccacataaggtgaactcggaaaagcaacaaaaacccaacgatcggacaatcccaaaacaggaaatagtgaaattgatcaaaagcgacccattgaaaaccgttttattggtggcctccgaagaagcggacagattttatgccgaaaaaggacttggtgaagcgactgacaaagctggcattttgaaaaagcatttttattttcagcattttcctatgatcatttgctcgtgttcgatcattctccgcaaaatggccgaaattggacgaattccgacgcattaaaagtgggggggggcaaaaggcaaccaatcggccatcgttttattatcgcccctttcctttgctcaatttgtccatttattcaataaaattgggggggggaggtgcagaaaatgtaattctttcgagaatcccgtacaatttaattgatcgaaatttgcacaaattaataattaaagagcccatcgcaaaggctgtcgaatatgcgccaacggaaggaatttgtgacggagcagcaacaaaaagtgggtgccaaaggaggaggaaggggaaacagagaatgaatttagctataaaatgatattttgatagttttggctcttgaccatcttgggggggggggggtgaactcggtacgaattcgtttagtaatttaaaggacggagtgccggggttggcactgagcagtcgcccgcccactccaaccagtacttatacggtcggtgttaacaaaccgagtctcggaattgcagttttcgatccttctctttgctaattcgttctcctttcactccgttcgttctgtctgtttctctgcgctttccacccattcactcttttcgttttttttcgttttgcacaatgccaacgcccttaggcatttccgtcgcctgcggtggccgttcaaatcaaagtccgcgcggacaatcggacggacatccaaatcaaagaggcattttgtgagcagaaaaccaatgaaatggcaatgccaaaagtggaacattatgccgaacattcgtccgccgatgttttttccaccgacggaaagcaaacatttggccaaaatgagtcggaaaagcgacagaatggggtaaaagccgaaattgcatttgtttttttttgctttttttttgcgctttcactttctttgagttccttcctaatggaatgaataattgtcgccaaatgtccttttacgcctttccttttcagaagtacgttttgtccggcctttcccccgaaatttccccgccgccgtaccaaaaaatggcaattgaaaattgaaaagcaaattcaaataattcaaattcagaatatgtcacactcttcacgaacaaattcacccgaagaacaaaaaggcaacaaacacattggaattgtttagccttttaacaattttttaaggaaatttccacgagattttcgcgctgagtgcgcaagaggcgcgccaacggatgaaggggaggaaaagggacccgcggaaggagggcaaaatgacattgggtggggcaaaggggggaagacaaattgtgccaaaggagggggagggggcgaaacttcgaaacgcggaaaagtgtcagcagttttttaccattctatttttttggaaattattaattagggaaagcattcgtcccatttaggggggattcattttgaaattaaaaagatttcactttaagaagagaagcaccggcttatactgaacttataagcagtttattcaacaatccgtccgaacttcttcccgttgctgtccaagtcaaacattctcactagtccactctctctccctccctctctctcttttagtccactctctcatccgattttctctccctccctctctctcttttagtccactctctcatccgattttctctccctccctctctctcttttagtccactctctcatccgattttctctccctccctctctctcttttagtccactctctctccctccctctctctcttttagtccactctctctccctccctctctctcttttagtccactctctctccctccctctctctcttttagtccactctctctccctccctctctctcttttagtccactctctctccctccctctctctcttttagtccactctctcatccgattttctctccctccctctctctcttttagttcactctcttttctctacatctctctctctctctctccctttttaattcctttgaaaatactttgttttacttttcccgaaatttaaatattttcattttatttgagaaattattttagttttgcaaaatattatgtataaaaaantaaattcaaaagtatggcgattattttgaccataaattaaaatttgtttattaa

SEQ ID NO: 2457 - DNA, 3398 bp, Heterodera glycines
ttttctctccctccctctctctcttttagtccactctctcatccgattttctctccctccctctctctcttttagtccactctctctccctccctctcccccctttatctcactctctctacctccttttatctcatttagttctacctttccccaaacttaaatatcttcattttatttcacaaattattttatttttgcaaaatattatgtataaaaaataaattcaaaagtatggcaattattttgaccataaattaaaatttgtttattaaactgtcaaagtgtcaaccttactgcaaaattaataaaatcacagaaatgctcaattggtaaaggacaaaaagacatttccgaggacaaaattaacaacgaatgaataggcatgtgatttcatcaaaaataataatttcatataaaaagatacgatactcgttgtagataatactgtattttgaaaattaaaaaatcggtgggagagcccgcagtatgtccaattgggtgaagtagagctggttgaggcgagaagcgatcacaataaagagcgagcggatgggagagagcgatagacagagagacaacacagagagagagagagagaaacagagagagaaagcacccctaaccgccggagggggggggcaagggttggtttttggaattcatttgaaaaacttcatggataactttttttgaagcataatcaattttttaaaattttacatactttgggctaatttgttttctcaatttgatcaaaccgaattttcgcattgtttttagaatgaattaattgggtcaaaagacggcgagtgaaggataaaaccaattttaaaaaagaaaaaggactaaatggaggagaagggcaaacgccgagaagagaacggcacaacggagaagtgccaagtcggccgttgtcgccccgggcgattcgcagcttcgactccgaattgggcacaattccgaaggaacgccgctaaaaaaggcaattcaattgctccatcgctttcactcactttctcctccttttacgaatgcgacccttttgaactcttccaaaagttcgctgttggcattccatcctaaaataaattataaattttagaaggaaaaaatgagaagggcacgacttttcaggcattttcagccaacacgaagaggaggagcacagacagcaatggctgatggagaaagagcaggaggaggaggagagcggagagtggcagaaagagtccccccggggcattctctgtaaagttcgaaaattgaccgaaattgggaggatgagtccgaccagaactggctttggcacagcaggcaaagtgcggaatcttacgcaatttttggtgcctttttgcgactttgccaatgtgcaattcgcacgactcaaagcggacgaccaaaaaagcggcgaattgcgcgataaatcagctaaattcctcttaagtattataaaacgcgttaaactgctgtctgaccatggcattgctcgtcgccttcggcgggggaggacaattgttcccgagaagtaaaggcaccgccagcagaagtgccgagttggaagtaagggaccaatgcaagacaattgccgctgctaattgccaaattaaccgaaaaactcaaaggaaaggcacacttcggttgttttgtcgaaacatttctcggagttttcggcgcgacaagcacaggaatttgcgatttttggcgcaattttaaacttttgtccattggcttgagaaaggccgaggcgctgcaaaagtttaagacgaaatcctcttcagcacatttcgaagtgacagaacaaatcgccggcgggggcgaagacaaagtccgaatgccctccggagatccctcgcggcaaaggcgggagcagtgccgacaaagggcgaaatcggcagggaaatctgccgaggatggcacctcttcttgcccattttcgcaattttgctccgactttctcagcttcttcaatccccatttgctcttcctccgaccaatcctcgtgcctttggaaatgccatttccaattgactcccttcgattgtgccaatgtttcttttctctcctccaaccgtttgctctcttcggactccgttttggttgcgtattgcttttgtctgcttaaacctttgtcttttcatttgtttttgttattttcaatgctttgcctctgtccgtcccgtggccaatgccatgcgatccgacgctgagctgaacacactgcgggctcttccattttttggaatttgatgggcattttgggaatgttgctgatgtgggaagagaatggcactccgtgcaattgaattgcgacgaattctaaaaaattgagaaatgatggggacataggaagaatccatattgacaacaaaagtaaacggaaaaaggtaaagcaatgttggcattggcttgtcatttcgcatgcctttcccttttttccgtttgatctcagcccatttcagtcctggcggtcgccttaccccgaggctgacccgggccggccaccgttggaagcgcgtcgatgggtcagcacgggaattcgagaggcatccaacacaatccgttgcgggtccgaaacggacgaagcgcggggggaagagacggaggggcgggggaaatcagacgaaacggaggggaaaaagagaagagaatggaaagtgagcctaaacaaaggcaaattgaaaaagtattcaaacacaacaatcatttacaagttttcgcagccaaatcgaagcatttcctcgtgaattctcagctcgggcggcgattttggcgaatcgacggaatgtttttgcccaattttgggcctttgtcggcccaatctctggcgaagctgtgccattgagcacagctcagaagcacaggtcggacgtcgcaaaaagggaaaggcaatctgagaaaggaaagtgaattgccaacggcacctttcgcccttttctttggcattttgtccttccgtccgtcccttccccaccggtcttttcagttccaatggcacttttgtggtttgtccctcagtggctgagtatatgttttgctgttcgtcatcctccggaaccgatgggccataactgccgccgttgctgctcccgaggcctgagtcgaccattgccgcttgagggttcggactcaatgccaaattaagccgatcaattgtactaaaattgactgatttgccaaaaatataaacacaggtgaaaatgttgaccgttttccagcaattccatcggatgaaagtgtactgctcgaagtgcccgggtggccttggcccctcaggcgccactgctgctcgccctcgtcaaagttggcttctcttcgaacatattccgccactgccgacggcacgaaactgtcgatgatcagccatttcagtgccaactctttgttcatctccaaca

SEQ ID NO: 2458 - DNA, 6661 bp, Heterodera glycines
  unsure (1)..(6661): unsure at all n locations
ttgggcttttcacgtgtcggaaatccgaacgcccatttcaatttgttgctggattgggacatatatcaaatgtcctttcatacggaatttcgattttcctccactgcattcgattgtgcagtttgtgtcgatttccgcctggtcaaaggataatatcacgttctgatcttccgcttttgaccggcatggtaccgtgaaacgtgttccatcaacacagtagacatctgccaatgctgaaccgtattccgtccaacatctaagcttcaattgggctcccgactgacacttataacaacctttaagtgtttttgtttgtgcccaacacttggtgaagtcttcctcgatgccaagacggagaccctcgaattgcaccatcacttgtattggtgtgtagtgggtttccgagaaaatttcgccatctttgtatcggatattcaaattgcgcagacttaacggtagccttttttccgggttgttgaattccttctcaaggattgagtcgcggcattggcaatcaactctctgggcctcttcatcgacccaacatttcgggcacgcttctttcgacaaagtacagccggaaaaattgcttgctatttctctatcttggcagagaagatttgtattaacttggtccaccattgagaaagatgttccatctgacaggaacttatgccctaagataggaactggtgcttgtgataccgcaactggtgtcagtttcacctccttccatttgaaggtaatccctggtatcaacgacatctccatttcacccttaaagtttcctccggattcggctttaagtttcgcattgattcgatactcccacgttggacacgaaattaattcgtatataattttcgactcaggcacagcgtgtactctgtagaatatgcaactcgcagtcggaagtttgcatccacagttccaaaatgaacacgattctcggcaacttgtaaatccaggacctttttgaacacttcccagttcttgtacaaatgcactgtatcctttcatgtaatcctcatgcactctctggcaaaatttgccaaagcaactgccttctcgtgggcagctcttcactgatgtggtccgaacggtatatgaccgtaaccatctctcagtttttgggatacatacaatgctgagtgacagtaatttcatctcaacgactcccatgactcgctcttccgggtctctaaggataagtcgaactggttgtcctactggcagtagagtgacatctgtcgagctttcaatccggcattccgagccatttgcctttctcagacagttttctgctactgcgcttatcgaaacaacacgggctgagcctgcagcatgctcaattagcagtgagcttgccgccaatgcgagtaagctcatgcccattttcgaaagttttttggctctgttcggggtcatcttccgcttattcggttccctttggactactctggcatcatctctttgtagcctttttccaatgccttggatgaccatttttattggagttatgatgatccatcgaataagccaaaatagatttgaggtaacttgccgcagtattgaaagtatcctacagagtgcgattatcccagtgaaagtgaacaatccatacactcctgtggacacatctggacggcagtccgggttggctatcctttcaatacaaaaccaacagtcaatcaatgtgcatgggtcctgtggtgggcattccacttctccaatgttgacttttccatctcttagccaatacgttgccccgcactggtaatccgcgattagttgctctcgaggcagctcataaataagtttatccggagtatatcggtgtaccaaacagctgctggttgcaccacaacatacttcgaatttggtcacttttcttggtacagtgactttaatgcctctctcagcacactctaacttgcacattttacaaggaggaaattgtcttcccctatgtaacttcgggatatccggtgggtttggaacaaatcgagtttctacaaatgttgtccaaatcaccagcatgaacattaatcccaagatggaagctgctttcgtcatggaccgggtcaccattccgtggtttctgatctgtccttgttggacatctctcggtctttccgcctgcttcccatccttttttgggattggcccttgaagtcctatttttccgttcggaacttcttcttcttcttggtcttcagactcgtcaacttttggtacttcgagcctatacagacggtttatcggacgcgaaatttcacgccatgaaattcgctcgccatttgcctttggtattttgagtttggcacttcgcacaatattgtccgatccttggagttcaacaattctgcccaacggccagcagttcctcggagttttttcttcttcgataattactacctctccgatttttggttggtccgccaggcaacttcttggtcctttatgctcccattgtaatctgttccggagcattaacaggtactcttttttccatctggtccagaattcatccaatgtggctagagtaccttcccagcgcatctgcaattgcttctggagatttttaggttcattttcgaactccgtgtccgacgattgttggttcctccggacatccaaactcaatatggcctttggcattatgaaatcgaccggtctcaatggctggacagcatttggtccttcatcaacgtaggtgatcggtctttgatttattgtcgcttcaacttctgcgacaaacgttctcaattggtcatagggcaaaattcgacgcccaaggactcttttgaaggccgcttttactccagcgacttggcgttcaagaaatccattactccaaggtcttagtgatggattaaatcgccatttgattccttcgttggccaggtgctcttcgagcggacatgtgggtgtcttcccagcttctaatgctgcaactactttagctgccagtacaaattgtgtgccattgtcagtgatgattctttttggagttcctctcctactagtgaatcgacggaacacttgaaggaatgcctcagcgcttaagtcaagcactggttccaaataaatagccctcgtacttaggcaagtgaacaaagcaatccatgccttctgaagcttaccattaattttggtattcgttggtccaagataatcgatcccaatgctttcaaatggtgccgtccgcctcacgcggtcctcaggaagaggaggcatcgttggcaatttatatgccgggcattggatcctgcgacaacgaccgcatgctcgaatgaccttctttatggtcagtctcgctctgggtgtccaatattttcccataaattctgtcaaagtggattcaactccagaatgggcaagggactcatgtaccgactgtgcaattagtcgggttattggacaattctcaggaaggataatgggattaaccatatcttctgatgcattgctcattgcgagccgtgttgacagtcggacaagaccatctttcctcgatgtctttacaagttcttgtgattgctttttccacattggccaacatttttgtgccatttttacaagtaagatctcggcgtactggtaatcttcactgctcataggaacaccctctgaaatctcgaatattcgagtcttcctcatcttgtttattgcacggagaaaccaaaccacagtgcggcgtagtttagtccaactgctaaatcgacaagggtcaatccatggattgtcttcactcgttgttgctggcactgcaactacattgtccaattctgaactttcttgtccatcattcatggctccctttggggtgacctcgaagtcgatcggccaacttttcattggttctcggagccatgttggtccattccaccaaagatgatgggatctcagctcttctggagtgcatcctcttgatgctacatccgctggattttcgtgcgttctgatatgcagaaatctggcattttctgatatcctccggatttctctcaaccgattctccacaaatctgggctgggaatcttttgactcaatccagctcaagacgggttttgaatctccccaaataaatttttcatttattgggattctcagctgattttccgcaaatttcagcatcctcgccccaattagcattgccaagagttccattcttggaattgttacttcagctttccggggcttgattctactctttgcatagagtaactgtacattggtttcttctcctttctgagaccttatgaaaagtgccgctgcataagcgtccttgctcgcgtccacaaatgcatggagttggaccatttcaccttgcagcacggatcgtctcggaaatttgaatggttcggtcttccattctctgatgacagcaaaccattctgctgtttcatcagctggtaaaatttcgtcccatccaagggttctgtcccacaatcgttgtaggaacaattttgcttggagaaggcaaggtgcgaccattcccaatgggtcaaatatgcttgctaatgttttcaaaacaatgcgttttgaaatcttcccggcttcattcgtcggtgggaatccaatgctcaattcgtccttttgaatgtcccaagggatgccaagtactttagtccctggtttattaagccggtcctcttcgggaatttgctccatcgctttcattgagttgcaaataaattccctcaggttcatttgtgcttcagcaaacaatgctttcccttctcgatacttctttaagacttctccagcgtctttgcatgaagtcattagattgtctacaaaggcattcccagcgaattccaacgccaagggggaagctttctccttcagatgcttctggacaactgcagccaaaataaatggcgaagaaattactccgaacggaaggaatctgagcccaacggaagatctgtaaattgtctgtcgacaatttcttcttagggtctttcacccaaaggaatttcacaaattccctgtcttcattgtccaaagatatggcattggaggccttttctaagtccgcccataatgcaattattgggagacgaaatcttagaaggattctcacgagatcgggaatcatcacgggtcctctgaacatacactcgttcaaagatttctctccccgtgggtgtgctgaagcatcaaaaacaattcgaagtttatgagttactactccatgatgtggcaggaagtgttcaggaaaaccctcccttctttcgccaagttcaaagaatccgagattgaactctctcgagattgactcgtggtatttgtccaataactcgggagtcttgcgcagtttttcaaggaggttgaccaatctcctatatgccatattgtaattcgatggcaaatcgggcgggaactctttccatggccatcccgaactataacgtccatcagcgagtctcttggctttcttttcgaagatttccatcgctgtgtcgtcatcattttcttttgggtcgtcttttattcctatcagttgtaggtcccaaaagttttttgcagtgtcgatgcctgtttctgcaaattcacaatcagcttttgcttacatgactgcgcaaatttgtctcgtttctccgatttcctgtgggatatcttttccacatacgataggtcccactgaagtgtaaatgcggaataagttccgatttatctgttcgcaccgctggaaaaatcgccagaattcggccataccaatgagtaaatcgggttcctcatcggttatttccacatttccggtcttccattcggctcgacggatagatttgactatccaatctgcccgataagctactattttttcagatttgccgttttccaatgcgacatgtagctcatactgcggggcatccagcctgaccggtgaatcgatgtggaaaccgctaacttctagctgcccatctttcaatttatataagcttaaggctcgcactacagcacttttgatcatggttacttgcgaacctgggtcaaagaagaccaaaatcctaattttctttgtaggatttcttctggagaaaattgtgacgtatttcgccattaggagcactctttttgttttttttggcataatataataattgcaatttgcagtaaaaatatccccttttttgattttagacaccttttttaatagtaatttttgtaggtttattttattttttaaaaattaatgcaaaatatcgtgaaattaatgaacagaatttgcaagtatttaattagttcgattaagaaaaaattttctttttctttttactcaagaataggctatttagatattcattaaattgctaatgctttaaaaaatatatatttttaatttttttctcccaatttccgtcaatatttaccattcacaaatcagaccccccccattcctgccaatgcttgtttttctcgcttccggtttgggaatttagattcctgtcgtagtgaattatttaaaattaaatttataaaaattataataatataaagaaccttaaataaattttgttttttccagctctcaaaccgcgtcaccgaaaaaagaaattgttggagaaggaaatatacacgtgatattttaaaaaagggtcaagtctaaattatcaaaattttttagatacttnggaccgacttaactgac

SEQ ID NO: 2459 - DNA, 2990 bp, Heterodera glycines
gatgcgatttttaggcacaaaaatcgcgaaataggcacctaaaaaggcagaaaaaatatgtagcatccctattcattactctattatattttaccaaaattgttttgatcttgtctctgttccacccgcaggaatggagtattcatcaataacaatcattctatttttcccgtttgacgcacatttgaacaaactgacaaattattatagaaggtgaccacccgcaagaaagaaaaaaaaagttaagaaaattgttcgagttcgggttcgggattcgaaaaatgaatgttcggcacatatccgacaaatttcagtcctaaacaggcactcacgcgaaaacggccctcacgcgaaaaggccacgcgaaaacgtcctggcccgacaatatttggcaaaatatcgtaattttttcaattcaaaagcttttaaatttaaaaatgttttccttacaaggtgactgaacatttgttctggtcgccattgtttttgctttattatactattaatgcaaatttcattggtttttcgaccataatgttgtgagattttcccaaaaaataatggcctggaaggctttcactccagctttaacaagcgattttcggctcctaatccacctatggcaacgtaatttagataaaaataccaaaacagaaaaaaattaaagatttattagtcgaatcaaagatgaagatgagaaccaacgaaatcggatgataccccatgaacttgatccaactaggcctatatctgaagtatctcgttctaaaaaatatcttgaaaaagaccgtgcaattcgagacttggttgtccgttttgatgagcaagatccaaatgatcgcaatgaacagcattggctacgacatctccacgcaatttcatttcgtctgacaacgaaaggaattgataattagattgaataaacaaaacaatcatattaatctcccgttagcccttgggaaaggcaaatttcatgaatacattttttttgttcacaatcgggccgcaaatgcaaggggcgcaaatgtatggggcgcaaatgtaggggcgcaaatgtaggggcgcaaatgtttggggcgcaaatgtaggggcgcaaatgtaggggcgcaaatgtaggggcgcaaatgtaggggcacaaatgtaggggcgcaaatgtaggggcgcaaatgtaggggggcaaatgtttggggcgcaaatgtaggggcgcaaatgtagcagcaccccttacaaaggaaggtccccaggtgtccgtgggagttccgaatgaagccaaagttttttaatgaataaacaaatggaataattgttgttcggttacgtcgtcacagtggtgcagaggtagtgcgccagtcaccgtttcttaagccccaggttcgattcccctgcatgcaattttttttgctttttatgccaaagtaaattataaaaagttgtttataatacaagactttatttttaatttttttaaattcatactcaataaaaatattagataaaaatatttattttcaaattgacatgatatttagtgtatctattgcatcgcatctttatattaatttattttttaaattttaactcaataaaattaaaaattttacaccattagatgcctgtaatatagcgaaagaattgtttcttttcattaattataaaaagctaaaaagtttggcacgttataactcggcactcgtgcttatttggcagaaaataaaaacatttttcttaagaacccatgggtgctctatcaaccgaccaagtttcattcggaaatcccacggacatctgggcaccttcctttgttagcaaattgatgcattttgatgtttattaaaatccaaaagttaaagctaaattaattaattaatgaaaattttcaaatcaaattttcttcaattatttcaaacaattaaccattttgggctaaatgatcgaacttcaacaattaaaaggctgattcttgtgattagtatccctcaatttgtacggattttctttaaaaattatttaaaaaatgtgtcacttaaaaaagaatatgtaaggactaatattttgtcaataggaaacccatgaataaaaataaaattaaaatatttttgtttctgtagagggatcaaaccatgggaaagaagaagggaaagtcaaggagactagccactaggccatttgcacaattgtcagtgttactttattgttatatttaattattatttctaaattttttcctttcactccaattttctcactaatttttgcactcagaaccccattcttaccagtgcttgtttttcccggttcccctaccgggaccgggaaatatattttcaaaatccgggaaccgggacctcggaggaccgggaattcccgtcccggtcccgctctactctagtatgttcaattaatacacaaaatattattttttaaatacatattaaaagaagtaatccgttcaagaaacattttcatcaaaatcttttcaaaaaaatcccaaaatttcattacccaaacttttgaacaaatcgaaaaatttgccatatttaccctttaatcggaaaaatgctaaatctttgcaggatcctggtccaggaattttgaaattccgttctctgatcgccccacttttgcttctctaatgtccttctgtctgcttaccccatggtatttcagtcgctggatccattccaacggcactttgcgcaccgaaatgtcgtaggttttgcagctgggttggtgaagaaccacgtacgtcttggccgtggtgattgttttgaatgtgtgcggtttgaagccgtggcattgcacctcaacaaagtaaacattctcctcctccttcggaaggggcggctcaatttgaagtaggaaatgtttgcgcagtgaaatttgaaaattctccgcgtttcctttcgattcgcacacaaaataggcaatgggacgacccaagagctgaaatgggacaaaaaaacatttgggcaaaaaaggaaatcgcatta

SEQ ID NO: 2460 - DNA, 999 bp, Heterodera glycines
cccccatttttgtggcggtatttttttacattttaaataatatttattttttaatatttaaaagcattgaaatgcgcttttgggtcaacggagttaaggtcgttcctttcgaagtcagagaatgcaaatcatcactttattgtctcaggagcaattgttcagccggtaaaagcactttcaaatccgtgccgggggaccttccataaaaatcgaggacattggcttttcattaacctgtcacttttctaaattcatttttattaattttgaaacatttagtaaaaaaatgaaaaacataaacataataatactgtaattgaatactgtgcgtttattcgcataccttgtcccgggtcatccgaatccagaatcccaactcgatatttttctcgtcccggaacaacgctgatgccgcgcactttcaaattggccccttacaaattagcctcgaaaaaaaacaataaaatattgaattttattttcatttagcttcaaccaatgaacactactttgttttgggctgcaccttaacgaacaatgaaacaattaacaaggaatggctgattagtgattatatcaagccaaattctagcaccaaagattggaagtgccatttcgaattcggcaaacgcgaccagccaatgccattcccattgcctgaaggtgcaattttgccaaaaactgaaaatactcaaccttggcaataaattacaaaaatttcaaagcttaattaatttaatttaggtataaaaaacggaaaaaaaatattataaaaagataacaattaatttgtgcattttaatttgttttgcattgtttttgagcagaatatctcaatgtaaattaaaaatattctaccaattaagtgaaaaacttttcattttaatttagaaaatccattcattaattaggtaatttgagaatttggttccttattttaaactactttccaaaggccagcaggccttaacaaattaaaaattttcaatttaatccatt

SEQ ID NO: 2461 - DNA, 938 bp, Heterodera glycines
aaataatagagagctcaggaaaaatagataaaaaactaaaaattgcatctccatttatgacttcgccattccacctcctcaaagataaataaatgtttaaaaattacgggaaataaggcggctgggcataagcactggcagtttttcatgcaacaatctattggccaataaaaagtagtgccaaaattaggggcactcgaaaattggctaaattttgaaatttatcacaaaaaaataacatgagagtgtttatcaaacattcaaaatgggactttgataaggagagtctaaggattaagtaaatcattcaaaacgaaaaatacctttgaatatattttatattcataatcaattgggtccgaaatctgccattttccaattgcgcttcaatcgatcatttaaaaaaataatttttattcattttaatttaataaaaatttaattaattaaatttaatgtaatgccaacataaacagtaccttcctatcatacgagcctaattaaagtttaaaaacaaaacaattgcgtgctgaatgagcaaaagtcgcttctaaacgtgcataaattagtgaacgtacggctgaattcactcctttctctctctgttacctttttgcgcacgcgttttgttaattttagaaaaattaattaattgaatctggaccatagcaggaaattaccaataaaactactcaatgagctgaacaattcgagaatttttagttttattaatttagtttttctttttttggcatgccattggaatttctattaaaaaaatttcatttgtttctattgcttcattcataatcaaaatttaaggcttccaattcgctagtggatttcaaatatcgatggatatatccgatggggttgtacctttacaggatttccctatctgtgctcctttgttgccattcgtcccattaaaatgcatt

SEQ ID NO: 2462 - DNA, 1132 bp, Heterodera glycines
aaaaaccgaagattattttttgcggcgatttttcaaaaaaacttttggagaacaagggggccggcggtgccgatagacgccgctgggagaaattttgcgatttttaatacgatttgttaacagatttgtctacaagaatggccaaaaacaacatgccaacttatcaaaataatcaaaatttaaaaaatctgacgaattttccacaaaaacatcaaaaatcttcaaaatttctcaaaagaccacaaaaagcctcaaagcctcattttccaaaaaaaaaacctcattgacctacaaaaaaccacaaaatgaggctaaagtctcacatctgggagccctggggccttatgctcgtctcgcggtttagtaaaccacggttaacgcattaaccacggtttcgttaaccgtggttaacgaccgaccttaaccggtatgctcgtctttaaccatggttaagtaaaccatggttaactcaaccgtggttaagagaatttatcttgaaattgaaaaataattaatattaaaaaaatataattaaattattataataattattttttgtttatattatcaatattagcatagattttattaaaaaaccccgaaaaactattaaatcaagaattggttttctaaaaatttttggccataacttttttaaacacagcaattttttttttaattttgcaaattaatagaggactcttggggctatagaatgataccaagaatgtttaatttggatgcttcaagaaaaagtttgctgcattaaaattgtcaaattatttttttatggccgtgtgaactgcaatggagccaacatttcttggtaatagtgcattacaaacaattacgttgttatgcaacatgctacaaacagcagcaattgagtcggggtcgttttggcgcccacgttttggcgccgacgttttggcgcccacgttttggcgccaaggtcgttttggcgcccacgttttggcgccagggtcaggtttttaaattttgtctatgtttgaataaatgaaaatatgtattcttcagttttctgaatccctaatcacgaatattgtattcatcttgacaattgctaaccccggactcaatttaatggaatacaatttttgaacatattaga

SEQ ID NO: 2463 - DNA, 2977 bp, Heterodera glycines
  unsure (1)..(2977): unsure at all n locations
ccagattcaaacagtagttgtacagtgtaaaaaaacggcctgtccctaaattttttcaccttttttaaaagctattttagcggtttgggcgtgtggcaaaatttttgatgaaataacactaatccgtcaataatttatatcatagacaaaaataaaagtcagattctttttctgcatgtaaaattaccctagaaaaaatgtatttatttattttactatttaaattattaaataaatttacgttaaccacaactcgagttgtggttaagattccttaagaaagattaaaccacggttagatgagcataccggttggaaataaaccacggttaacttgcgttaaccgtggttaagaagggagtaaaccacggttaactcaaccgtggtttatccttaaccacggttaaaaagggaaggacgagcataccggttaaggatttttaaccacggttaacgccgttaaccgtggtttagctctaaaccgcgagacgagcataaggcccctgggtaattcgcctgtccacctttgcatttctttctttctctgcctttgaatttttgtgtcttgcgtttgtgcacttttcttttttcttttctctgccgcacaaaaaaaaagagcaaagaaaaaaaaaatgtttttcctttgaattttcgtgggtccgaaacatgaaatgtttgatcctcccttttgtacattacatgcgcattttattgtattaatttgtttgctattgactcggcggaataaaattttcaaatgactataataataaaaaaaaacaatttttattgtattttgaaaagcaaaaatcccaaaatttaccgccatagttttcagatttttttcccactaaaatggtgtcacacatggatgaggaactttcatttgaagatgaggaacaagaacctactccgaacggtgcgccggccggttcagtgtctgtcacaatgtcggaagacaatgtaaaaacattcaaaacttgggacaattcaaatcgcttaaaatgaccaagggggtaccaagttgagaggccagcatttggtctttaaagtcttggtaacaaaaaacgaattcagaaccaaccgattccatggaaaaattgcaaatttttgccattttcaattgcaaaattgtttttttaggattttgacgacatcaatgagaagctgcaacagatgagcaagaggcgcaaaaaattcgtgaaatgcaaaacgaaatggagaagcaattccagtccggcactgccgtgaccggcaccggcagtccggtgataccgaatccgatgtccctggaggagaagcaattggtggacgcacgttccatttacgttggcaatgtatgtaatgggtttgtgagtggcgccccaaaactgaacaattttcatatctttggtacattaaaatttgtcagcaaaattggggttagtccttttgaagccgcactttcaaaaatgtgccgccattaattccgaaaaatcaaattgcatttgtttttctttcatgagtcaaatttgtctaatgggttatgtttagttagacttttggtaatattttcggatgcaaatgaacaccctctaatataaaaggatcgaaaattggtaggacaatttcaaattgaattttcatcacccggaaatcgcttaggaccgacacctgcaaaatttttcatttttttttttttttgctcatttaagtgcgaggttcttttttttgaacagtttatcctattatacgaataaaagtattcttataccatctatcaatcttgtggttttgatgactaaaaaaatgtgtaaaatcttcgaaaaatattcaaaaaattataggtattgcaaaatagcaattgtcccaacaacaatttatacaggtggactacagcgcaacaccggaccaattggaggaacacttccgcggttgcggtgccatcgaacgcgtgaccattctgacagacaaattcactggccatcccaaggggtaattaattgctgttttcttggtccattcactcttaccaagaaagggagaggagattaaagttacatataaacaaaaatttttccatttttttaccgttggatttcgcatttttgcgcttttaagagtcaacaattttcattattcaaaagctcattgtgagatcgaaaattgatacaaaagagttaaaaatgagacctaagacgttcgacaaaatttatcgagttcaaaaaccgggacgcaaaaaaaattttaaaaaagttttaaatttcgggaagtgggggaaccgcgggggttggtaactgattgtgagtcttgaaacatatatcttaaaaacgaagtacatcccattttctaacacattttgctattttctggcttcattcactcttgccaagaagggtatggaagagccatgagttcgcataaaaaaacaagaattcccccacttttcaaccgtttggtttcgctttttgcgactttgaaagttgaaaaagtttcgaattttcgagacctgattatgaggcagagaattgacaccaataatcttaaacgagacatcgcccgtgaaatttctcgagtcaaaacccgaaacgaattttttttttttttgaaaaatttctgaaatttttttttaaattttcggggaagaaaagcggaagggggcgggcgggactgattataataatgagaggggtacattactaattatagcccttttgctaacacattttcatatgtttgccacatttcctccagtttcgcgtacatccaattcgcggacgtggacgcggtgaacacgtccacctcgttgaacgactcgctgttcctgggccgtcagatcaaggtggtgccgaagcgtaccaatgtgcccgggctgtcctccaccaatcggcccccgcgcggcatgcgcggcggccgtggcagcgggcgcgcgcgtgtgattgtcaagtncatttattcggaaaggcgctcgcgcggacgcccgcccaggtggcagaca

SEQ ID NO: 2464 - DNA, 5082 bp, Heterodera glycines
ttcaatcccggggaaaaatcaccagggatttatagcccgtttttttttagaaaaacttaagttttggagtcaaattttcaaaaagaaaatagggtaaatggggccagatggggtgagagttttgaaaattttaatgaaatttgttgagggaatttcatgaaaattttgcccctccttggttacatgggcctaaaggaattgatcagcaggggctttacagtgggcatgatcaacgaaatcgatccatgactcgtcagtgaatttctcgagatgtatcagtcccgggcagcttcttctcgagtgtactatgtgccgggtcgtcttcagagcgagcagatgctctctcccattcaacggattccttggtcgcggacagtcatgacaacgtgctatatccaatcacggcaaattttcgccggttttccaacccctttcggggaaggacaagcacgctgattttgccagtgtagcgcgcgtgcacccccggacatctaagggcatcacaggcctgttattgctcaatttcgtgcggctgagcgccgacactccctctaagaagttgtgcccacagaagcaatgagccagctatttagtaggctagagtctcgctcgttatcggaataagccagacaactcgctccacgcactaagatcggccatgcaccaccatcctccgaatcatgaaaaagctatcaatctgtcaatccttacggtgtccgggccgggtgagtttcgcccgtgttgagtcaaattaatccgcaggctccactcctggtggccctcctttttttcgagaaaatttttttaagaaaatcacaccccccccccctccaaaaaaatcttgaaaaattttttagtgattttttttttcattttttgaaacaaaaaaacttaaattcattatcttaccattagatatagtactgtatcttcattaattgtataattctattcttttaatgtcattttttaaaaacaaatttaattttttatttttctccgtgttaagacggcgcggtggcttctacacgccctactgatgcggagcagaggagggaggagtaggaggaagaagtgtgaaccgcgcgcaccaatcggagcggatgctattgaaaaaaaattgttggacgggcggatggatggattgatcttttcttttttgcttaaatttatttggttgtttttaaattggaagccgtttttttcgcttgtcccgccaatttgatttgccataaaagtgaattttattagaaaaaaaattaaaaaaaaaaatttatggcacaatttgctggacaaccgatggcattttgatcgatttccgcctgtgttctctctctgttctgtttttgcgaaacttcgtccatggcattcattatttactacacatacacacacactaagccggagaagataaaaaaaaagtggcaaattgttggaaaaaaaataaagaaaaaaagtaaatgaaaagaaaataaaaagagaaaaaaaaataaagaaaaaaaaattgtttatttatttgttgcaataacaatttgattctcttctttttacttaacgataaaattttacatttattatgtgaacttatttctgttttgggttttggagtttatataatatttttttgccatatttgctaaaacaaaggcccagaaatatttaggtcaaactaatcattaggaaagtagtcaggctttgtttcttaatcgcaaaaacaaaaatattctaagggcgtgggggtccaaccttattagcagggatgggaattatatggatattaaatcgcaaaatatttccataaaatatgcaccaaaaatcgcgaatggacataaattttccgaatagagggtgtaatttcttcaaattcattaaatttagtaaaataggtacaaagtttgcggaatacagaattaaaatttgtttagaataacttttcgatttatggttgggtttttttattcaaagaaaccacttaaaatgacacatacatatgattatggaatacaacaaaataacacgcaggatcattcacttctgaacataacatttacgctgaccatttgggtcgcttggatcagcagaagtgccatcgataagactaaaaccaaaaaaatgggaaatttcaatggcaatctttcgttcattggtcggtcccgaatttttttttcaaataaaattctggacacacattgttaaggctaatttgagccgcgagtacgaatatgaccaccttttcgaccaatttcgaactcgaacatttaaaaaaaaaatttaaatttcatcaaataagtacgcctggatgtccggacaacgcgccaattgttgcccagttatttggacgaagatatatggcgatagttcaacggaaaaaaaagttgtcagtgcttattgctaggcgtgcatatgtaagcatttttggattgaaatttttgaattttttaaatgttcgaattcgggactcgaaattggtcaaaaaggtggtcagattcgtactcagcagctcaaaatagccttagaatgcgtttccataattttgtttaaaaagaaaattcggagccaatgaaccgaaagattgccaatttcaagctgaccattctccggtttcttcctcaacaattgcaatttcaattatgttccattggtcccaaaatctcaactcaagcgcttccttctcccaatttgtccatttgttctcatctcgtgaaatcggacaacgaatcaacaaataatgtctgtacttgtttttggcagtattcagcgtcaatcgctccccagtcaattcattggtcaaattaaacggcacattgaaagcatcaatagcagacgaataggcaatgccaatgatgaaattaacaggagatgaagcagtggaaaatgcctaaaaaaagtgaaaaaaaaacattgtgaatcccaaaatgagctggttttaattaccgctattagtccattgatttttgtcgaccattgctcctcatcaaattcaaatgagcacttgagcaccttcggcacagcgtccggacgaggcaaaaaaagccatttggccaacgcttggccatccgacgcatcggcacaatcatcgggcggaaatttgaggtaaacgccgagataggaaaagatgtctcgtaattgggaaatatgcccccaaatttgactcaaactttggacggcaaaatcacgagaatttattgtcactgagtaaaaatgggaaaaaggtgtgagcgataaaaattcatgaagtcagcagcaaaaaaccaaggaatggcgaaaagcgatcgccgcacgacatcatcccaacgaacggggcggggcggggggatattaatataccacacgaagtgatcattggaagcgggggagagcgtgcgaaaatccggccaagctgatggctggtgattgtggcaaaagaacaatactgggaaattgtgaaatgtttggttgaggaaaaatttgggaatgggaggggggattcatgggataactttcgcaaattgcgacactccgcgcggcggaggacttcgggggagaatcgaatctgatcgagtttaatggcactggacttccttcgatttgtcgcgcgattttcttccatccggttcgctgagtgctcattggaaagtgctgcaattggccatgcgatccgactctggtacgagagatgatgcgaggacgacgaggacgagcacggcgagcaattgtgggagaatgaaagggggggggcgccggacttttcgacagcggacctttcgacagaaggacttttcgacagcggacttttcgacagtaaaggacttttcgacagaaaaaatttttgtttaaggggaggacttttcgacagtggacttttcgacagtaaatggtagttttaaaaaagacaatgctatttcatttagtaagcaaaataattatttttgtttcgaattatttccgtttttatggaaaagttaaattgggtccggcattcgataggccacagctcttaaatattggtagggatggcgctgttcacgtgtgttgtaaagcgcgagcaaattttcgtcttgttcaacataaatttgccaagctgaactgacatgcactctcccagggcaatacggggggcgattgatacagcgccaaaattcgatccctaatttggggtttggacaaaaaattccaagttttgcaccttcttgaagtccgctgtccgcttcaaaggcatattcaaaaccgccgcttctgattaactctcggccacgcttgctttctgcttgaaaaaattggacaagaccagctggttcctctgcttcttcaaaggcttcatttgcaaagagttcggccccaatttcaccttcttcgggaccactagaaccagaagacatttttcacagcaattcaaaaatattttcagtaatagttatgaatggcatggtcactcttttttgggccggtcgagaaacggaggtcaaacaaataaattatttattattgataagaaaaccattcatgagaactccaaaaatgcagtgcaataaactaaaatgccttcttaaaccccgctaaattaagatattttataaaccagtaatttataaaaatatattttttaattaaaaattcttatttcacaaataataaaataaaaaaacaagattaattattagaaattatttgtttttaatgaaaaatttgatttgttagtgtactgtcgaaaagtccttcactgtcgaaaagtcctttacagtcgaaaagtccttctgtcgaaaggtccgctgtcgaaaagtccttcactgtcgaaaagtcctttacagtcgaaaagtccgctgtcgaaaagtccttctgtcgaaaggtccgctgtcgaaaagtccttcactgtcgaaaagtcctttacagtcgaaaagtccttctgtcgaaaggtccgctgtcgaaaagtccttcactgtcgaaaagtcctttacagtcgaaaagtccgctgtcgaaaagtccttctgtcgaaaggtccgctgtcgaaaagtccttcactgtcgaaaagtcctttacagtcgaaaagtccgctgtcgaaaagtccttctgtcgaaaggtccgctgtcgaaaagtcctagcgcc

SEQ ID NO: 2465 - DNA, 2946 bp, Heterodera glycines
  unsure (1)..(2946): unsure at all n locations
tagagatcggaccggtcggttttttttcggtttcggtttttgaccgaaaaaaccgaccgggagaaatttttgactttttcggtttttttcgggtttttaaccgaaaccgaccgaccgaaataatcaaaaaaccgaaacaaccgaccgacttttatgaaaaaccgaaaaaaaccgaatcaaattggagcgatataacctgttaataataataaatttattgcttttttgtgctctttttcattttgaagaattttttgtaaaatattttctgctattttgaaaaaaattattaacaaaaatgcaataaaaacgaaaaatacacccctgagaaatggaaaattttatcaaacaaaattctcttaacaaattatactcattttcaaaaattttcccgacggcgcctatcggcaccgccggacacccccctccccaaccccaagttttcaaaaagtttttgaaaagccgtcgtaacacacagaaaggcttcggcggtgaattggcgagaagaagcaattaccgcacacacaattagccaaatggggatggagaattgtatcccgaatccaaaatccaaacaatttacttttacaattaaagtccgaggcagcaaattaaattcacagcagaaaacaaaaacgaataatatcataaaacaaaaaccgaatggaatgagaagggaatgacgtggctgctggtcagcagcagaaacacaatcgatattacagtaatatagaattggcgggaaatacaaattcaaagcaaagggagatgaaaaattgagaaggaaacaaccaaattaaataagtcaaaaatgggaaataaataaattaattatataagcacatcttcgccctttgaaaagcgatgtccacagagcttgcttggcgaatcgggagtgcaattggcttcacgaaaggcgatggcgaggtcaagatcaacggcgatcagctccaaaacgagaacgactcggaaaggactgcgcgaactgacggcgatacgggtggtgctggtgaacatgctgagctccacgcgaccctgactggttgaactgtccacgtcctcttccaattctgcttgtccctccatttggcccctcttcactcttctttttcggttctgactcttcttttttgtcctcctttggcatccctttgatttgggacatgacccaggccctcaaaaccaataagcccttttccgtcattttgccatcgtttgacacatggtcggtattgaaaccggagccatagcgccacagttccagcactgatcgtcccgccggcgttgtcgttttacaaatttgacattgccttgtgccgtcccaaaatgttccttcattcgtatgatcagttcttcgtattcaatcattttctctttgatgaaaggaggtcgcagccaaaacacaggggcatggctaaagcgcttcaacagctgttcgagtcgccccacacgttccagcacattttcgatcgtttcttcacctctgatcgaatctcttccgatcatcacaatgacggccttcacttttgatgatagaattgcgccataaaaagctctgatcacttcggtgattgtgccttcttcagtgccaatgaattgggattttggccacatttttaacaattgtttggccgatgagtcgcctacgatgactcttggcttctcgacgaacaatggcttgcggtggatcgtcgttgcgcgtacttttcctagtacgaagctggccttctttagcacctcgttccatccgagtttttccgattccggcaattcggcaacgacatttggcattggcacttcgatcggagtgtagccagtcttcagcaatttgtcccttgtcactgcgcatctttcgacccacgccgtaaaggcactttcgatgtcattttccgttgggaaattgccgattttcacttggtcttcgcgtgcgccggagtaagtgatcagttcaaagccaaccggagcactgacgatcagctgtgtcaatttccgaccgccggcgactgatgaaacggcattcgattttagcaagaaattgctaagaagggctttcattggggtgccgatcaccttaaaatcgccacattcatccccattttggatctttttccattttctgatcactttgaggccaagaccggctctttcaagcactgggtcgaggtcggctgctgtcatttgtacgcagtttcggtgttcgatgccgagtccaccgcattgcgtgtcccaaagcaaaggcccgcagctgttttccgtctccatcacttttccaccaactgaatttgcaattgtcctcaattgcccaattaaatgacggcccaagtgttccaatttttgagaattgcccaaatttgtggtttcattttcggtttcccgatctttgatcttttccatggccgcactttttccacacggttcattttccatttcgcgactgatcaaacacacgacacttatcagcgcatttaactgatttttgaaggggtttttaccccggggaagtgtactaatgtttggtacaccttcaggcacttttacaaggcgttctattgggacctttataggctcaaaattcggtttatcgattggtatgactgacgctgtcgaatcagtgagatccaaaattttaaatgggccaaagtgattccaaagaagtttccggtgagctgaacgggtattaactcccggataaatgaccattgctaaaaatcgatatanttggtgggagaaaagcctgcagagatgaagacagaaaagaaggatttctatatccatatttttccatatttcgcgatttatgtccatatttccatattttggcattttggtccatattttatgtccatattttggcatttttcaaaaaaccctctattagaaacgcccccagcagctaaattagcctttttgagcccaaacccgaaaaattttcaaaaaatcattttt

SEQ ID NO: 2466 - DNA, 6063 bp, Heterodera glycines
acctatgattcccttcccccagactcattccaaaatcttttaatgtctgataatggtccccacccttcatttaacacacttacattctctgaccaagtccaacaacccgttactgcctcaccatctcaaatcaaagaacagctcgtgtgctctggctcagctgataagcaaccaaatctcacggatgctttaaaatccgaaccaaagcctgtttcccccactcctattgtcacaaattgggaaccacacccgcgcagctcaaatttttcaatagctccctttctaactcgttttaattttatcttgtgtatcattactctttctctaagtgcttctttggtatcatcctctcacagtcaatcatccttaaaagtcctccctatggtttgtcagacacacgttgagggcacaatttggtctcttcccatttggctaccatgtccaaaattaaagcatactccttctgacaccccgatcaaacaacctattcgccttttccgaccgaacccattcgaacaaaaatccaaggcatgggtgtgcaggaaggtaaagaaatccctgattgagtacaccaatccatggaatgatgtaatcattaagcaactcccgtccgaaaatctcccagtattattagatgaatgtaagcaaatggttcaggaaaagtcatgttccgaagggattctaatccaaagtggggagctccttttctccaataatccaatcagctatgaaaaacggtatcccttccttggctggtcctggaaagcacacaattccacaaattgtttcgcttttcaaactgagatttttgtgcatcattccgaagatcatatcagaacatctctaggacacccaaattgtaaatatacagcagggaattgccgcctcgacgataattccatcctcatgtggattccctctcccaagaaactctgtcaattcattaacctcggaaaatttttaggaacttttctgtccaacatttgggttgcagaagaaaatgatcttgctctttcctttccccaaaccaaaactttgatcgaggactgtaatcaaactctctctctctcatatcaaaattttgccgttcaatttcttcccacggatcaacctcgttcaaagagaagtgctgacagtcttgtcaccacatctcaattagcttctcaactcacttttcttgaccatgaagttaagacttctctcatttttcaattttcccattccctcacccagctatgtaactttattgatgaaaataaacactggacctcttctgccctcctctcaaatccaactgctctagcacgcagtattttctcaaatccctacctttttgccaaacaattaacaattgactcaatcaaaatatggccctgcgtaccaataaacagctctagctaccaatttaaggcaactgagcttcaaacttgttttgatcttctcccaatccaattttccactaattctggcccaaaatcagcatttttaaaccccatttcaatgattgtcactccagaggcccgaactgctccctgctctgagtaccgcaacattcccattcttatcaacggctccctagtccaagtggaccaaattactgggtccgtcactcctctcaaagttaacaatcttccactagaatctaattcattgtttgaaattcccaaaatcaaaactcatgcatttcatcacttagcacttaccaatttgtctgacattatttcccattctttcgcagcaaatattttccaggttagtaaacttacttacctgattgaatttgatgactccaaagtgaagggagtcctctcctctgactggaaagaagttagagatgaaatggtcaaacaaataactggagattggtcccaattaagggattggtttattctaattatttgtgccctctctgcctgtgatattcttattcgtatccttgcacttgttttggaaaagtattttaacaatctttccttattacaaaccttctttggtcttacaacaaataacacaaatcaatcacgccctccgcctccccctcctcctccttccccttccaatacgtgctctgtgcaatcacccaatttttcgaatcatcatgttgttcttgaattaggtgaaacatctgaaggaaacccaacccaatggcctccctcaattacccgcttttctctccttcccaaatttgagtcaaataattcccctaggcttctcaatgctatgtttccattaaattccaaatcctttgtcacaacaattcccgcccacgcagatacaattcctctcattgcattaattgactctgctgcctcttcttccattgctccgattaaacttaaggacaaattcatctgtcaaaatcttaactcatcggaagtttctatcactactgccgttgggatcccaatacctgtcacgggctcagtcccgttctccttacacatggcaaatatgctgtgcagtgcacatgttcatttcgctcccgattatttggatatttgggatatttgtgatatcattatagggactgaaactcttgaaagattcccaccaattctcttcgattttcataataaattcctaacctttggctatggtcctcctactcttttccaatcaaaatcacaaaacatttctgactgtcaatcttccccttcaaagaaccttctcatctatcaaaacaaagttcattttcatccacatattccttctcaaatcaattcctcaatttctccgtgcatactttcacaaacttgtgaaaactctcaacatttcaacgttccacctccatccagtaatttttgggctgatattaaccctccctcttcattatgccattactgcaaaaaggacaaacatcatataacggaatgtccctttgttcccaaactctcaaaaccaaccatattcagaaattcttataaaaagtccattatgcctacccttcttcttcttatagcgctattcccctctgtacatgcttcattatccaacgaaaatgttaacaattttgaacagtattctcccatatctttcattagcatttcatttatattcactctcatggtcatttcaattataattattctgttcatctatccattacaaatattttttcctcctggaacatcatttcgtagctttaaaaaacaagtaactcaaagccctcctttcccagtcatccaacttaaagtcaactctgttttaattaactgcaaaattgacctaaaatctgacatctcatttactcatgtccgaatggcatgttatcaaaagtccaaattttactccttccccaaacccctatgtgttggtgtgtctttccttccattgcaaactatcggcgaaatttcaactaacattgaaatagcgtctcaaactcactccttaaaattactcatcacagaagaagactcatgggtctcggaaaataactttgatgttgtattgggttctgactttctttccaaattcccagcaatcttatttgatcctcttctttttaacatacaaatcggtgaccataattatcccatgatctcgtccaaccgagattatattttcacacaatataacccacataaaccgaaacttgacgcaataatctctgcctccctcaattccgttgagctccgctctcttgtagacacgggagcaacgctcacagctgcccctatctcccttgctgagacaattgggtgctctcctagaaaaaccaatcttcgagctataagcgcctcgggtcaccaaatccccataattgcacaagccgaggccttcttgtctattggtaccataaaagaaaaagttttaataaattttgttgatgattctcgcttcatcagacccgactatgccctcattattggttgtgattctcttgcctgtcttcctcctgtaactttcaactttcagaatctcactctttcccttgccaacatttcagtccctatgggaaaattttccaaactccaatcgaatattccaatttttgccttacgttctataacattagcccctggctcgcaaacaattgtccccataaaaattacaactctcccaaaaatacgttttgcagtaattgactcattaaataacagactcaccagagatgacttgggctggaacccaactcttatcgaacccattaatggcatttctgccatcccaatttccaatccctcacaatccccaaaaactatttttgctaatatgacaatagccacagctaatgaggtgagtgaagaccctgacttacatttcttttatgaggacccagaccatgctctcttcagtatttccccccaaagtgatgaaggtataatccctgacccctcattcaaaattgacttttctaaatcttccgttagtggacctgatcttcaaaatctcaaaaatttatgtgaagagttctctgacattttcagcaaatctcaatatgatctggggtccagcacagctggagcccatgaaattgtcacctcaacgcaggaacctattacctgtaagccacatagaacccctttcaaatatcgggatgagctcaaaaagcacatagaacaactccttaagtctggtgtcatggtccaatctgacactccgtgggtgtctaacatcgttcttgtccagaagaaagatggtggactctgtccatgcattgatttccggaagctcaatgaaataactatccctgaccattatctccttccccgtctcgacacaattatggagaaaattggccactgccatttttactcttctcttgacctttcttccggttatttccaaatccccctcacaaaagaagcctcacgaaaatgtggactaatcatagaagaaggtgttttccaaatgacacatctcccttttggtcttagaaatgccacttctgcttttgccagaaccatggcccatgtcctctccggacttgatgggtttgtcgttgcctacgtggatgacattcttgtcttcaccaaacccccctcattttctgaccatctctccgcccttcaaaccatttttgaaagatttcaacgattcaatctaaaactctctcccaaaaaatgtacttttgctgcctcttccatgaactttcttggtcatactgtctcatcaaaaggttactccccatcactctcacgcatcgaagtgatcaaaaatattcccactccccaaaatctaaaacaagtaaaacgaattgttggcatggccagcttttatcgtcgtcacattcccaatttttcaactattgttgagcccttaacttctctcaccaaaaaagaaaagaaatttatttgggacaaggcacaagaagatgctttgaccagaattaaggaacttctctctcaaaatcccattctcacttttccggattattctcaaccttttcacattttcactgacgcatcagtcattggtcaaggcgctgctctcatgcaaaagaaaaatgatctattttctgctgtagcatatgcctctcgcactctatcagcccccgaacgtcggtggccccctgtccaaatcgaactcggagctattgtctatgccctcagaactttcaaaccatatatttatatgtctgaaattgagctccacactgaccaccgtcctttggcatacctccaagcaaaggcacaacaacatgcccacctggcccgttggctaatagaactccaaaattttaacattaaaattgttcatatttccggtaagaaaaacgcacttgctgatgctctttctagactttccgaatctgatcctcctcagattccaagtgactctcaagagttacaagacatcattgaatttcctgtatgtctctctcttgtcccttttgatcgcattgtccataactttgacccaattctatcttcccttactattcgtaccaaggatggtattcctcataaagtagaccttttttcagaacaaagaaatgacccccaagttctttctcacattaaatttttagtagatggttctcatccagatctctctgaaactgatttacaaaaaatttctttcagaatcaaaaacatttagttatctcttccgacatactat

SEQ ID NO: 2467 - DNA, 2078 bp, Heterodera glycines
  unsure (1)..(2078): unsure at all n locations
tcccnttccgtccatctaccactccctcacaatgacttagctgagttcaaaaccctccttgtcctttccctaagaaaagcctggaattctgcagctgactcaattaaataggctcaaaataaatcaaaagtgcaatatgataagaaatttaggaatcctaacatttccattggagaccgtgttctgttacggaattatactggaaaaccgggcacttcccaaaaatttcacaatccatggaagggcgttttcagagttattaacatagaagaactccatgtcaccatcgtcagttgttcctccccacaatccaacccatttaaagtccatattaatcaaccgaagaaactttttgagatttccggtcctcccagcacctcccccgtcctctcttcgctgaaaaagctgctttagaagcagctgaagccaccgagataccaaacacaataggcttcaatcatattcctgatatttcacaaaaaaccctccctcttgatacccagaaattcgatgagccccaaattttacctacttcaattgacaaagaacaagccgttttccctcagcgggatctcttgcataaaagtaaatacaatctccgctctcgcacaaggtctaacagttctaaacaataacaaatagcacttttctccttacccatttttatactcacaattaatttttaacttctcacaccactttttacaacatttttcccctttttgttttcattccttcacaccgccttgcacccaaaatttttatgattaattctcgtttccctcccttccccaacagaatgatccccttcctgtccaacatccccgaacacaaatacctctccaacttctaacccgccctcttcttctaccctccctcctcctgtcacttcctttcgtcagaacaatgttaccaatccacaaaagcaacattcttccaaagatacgacatagacaccgaaatcctgaaagccacctccccagtcgtagcaaaacgactcggggctcgtgcccaaaatgaagctgaccccgcagcagtaaaagtgtggcacagaacgaagcagtcaaagatggaagagattctcttccacaagttcgaccagaaccccgccatggcagagtgcctcatttcaactggggagaaatttttggtgaagcgagtcactctgaccgattctggggcgctggtgccaccattgacgacattcgtcaatggaactttactgggcgaaacaccatgggccaactgctaatggaacttcgtgaaaaattaaaaggttttaggattcctcattccccagcgtcccttctcaaataaacatcataagtctcacacctttattcccccccatcttcctctttcccttccaaaattatcgacccctcctttgcactccaagttctccttaaatgctttgttttgtttgttttattaacaatgctttaccatacttccacattgctgtgttgttttctaatctcgtttttgtcctctcctcgaatatctcttcactgccacattaagtatgccgaaacgacaatcgaaatcctggattccgaagacgaaatgccccagactccttccgacaactcctcttgaagaatcgctccaagctctgacaactaatgctgattcaaccatcactccggcagcatctcctactgaacctgctgactcttttgatcctctctcacattctgttgtcccttcatctcctctatcctctatggagactcttttggcccttatccggtttcttctccttctgaaaatcagaatttgtccaacaatagtccggctccttccccaccacgaactgaaaatcaacccatgtcttcttccttggacccggatataatctttttggaagaaatctcacccccccccccaaaatctaagaaaatgctccccttgccaaagtcaaatttgaaaatgttaatcccttaaattgggatgaaattatggaagctgctaacaccatctctgattctcccatccctagcccaaaatataatgtttctcatgccccatttccccatgcccaatctcagcagtttcaggaaacttttgaccaaatc

SEQ ID NO: 2468 - DNA, 2369 bp, Heterodera glycines
tctaaaagccttccataaagcatcatcaatccccaacttccttgctgtcaatatccccttcatctcgtccaaggaattgccgttgggcataaaattttcaaaacatctcagggtaaaaacataatttttaccctggtgaccggataaggacttattacccccaattttattccgacaccccatctcaatcatcccctcataaaaggtgtgagacttaatatttatgtcaaacaaattgccctggggacccaaatttctgagttttacacctttccccaaaactttccaacaaacaaccttccagcatcgtcaggtgacaacaacttcgccatttcgatggactccacatcaccgcccaggtacatctttcctttcaatccctccctcacaaaaaatgacaatattaactctcttaaagccatttccgtagccttaaaagcacaggctcattttttgtcctcttcacaccaaaccacctctgtttatacaaaattaaaattggtccctcataatccaaaaaatgaagagatctgctcatccgtcaatccctcaaacccttcctgttcctcttctaatgcctcccaaacgattcgaatccaaaaagtatttccatatttcttcacccactctctctcttcattatctgaattcataaagtttaacaatacctggaaacccgactccctcctgattggttccgtcaacaaaaacatttgtgcccaaggcaccgttaaaaacgttaaacttactgaccctcataacttttctgttgaaatcacagttaatttatccgagacagaaggtcacagctttgatttggaggacctaatcctcttggagatccctatgtcccagactcaattgaaaaataggtctgccttcttttcctcctccattcccctcgctactgcttccaatgaaagccctcaaggacaaattctctcccaaatccttggtttatccactctcccaaaaattctcccctcctctgatctgtcattttcctcattctcccaaaaactctttccgagacccaatcagggacaacttgaaaccctggacctccttttcaacccctcccccagtgcaatcatcaccgaagccggaccaggcactggaaaatccaaaattatcattatgtccatccaaaaattcttagaattagggaaaaacatccttatcaccacccacagcatgtagccatctgtcgtttagcttagaccataattcaaaaggccttctcatcctctctgcctccgcaaaagaaaagtattttcccctttttgagccttttatgaaaaatcttttaataaaaactttagctgactttaatttgcaaaaattaacccgaaaagaagccaaaatcattaataaatataaaatgaatgctctaaaaaaaccacaaaaagcagatgaacgttcttctgcagaaatctttatcagagacgttgggactgaaattcccatcatctttatcaccctcagtatgttagaagatattccctccatgctaagtcttataaatatcatattcattgacgaggcaggtcaggcacctaccaatcagattcttcacattctctccctggccccaaatttagaaaaaatccttgctgctggtgatccaaaacagctacaagtttgctgctctgagcttcctgaggaattgctccaatacggatttaattcctttctttctcatttaatttccattcctaacattcccaacacaaaactcacaatttcctaccgaggacacccaattctcacccagtgtcttgctgattctctttatcatggagatattgttgccagagtaacggccgaacaacgctccatgattacctcttccaattttcccttacccaatcaaaatgcccctcttcttctcgttgatcttccaaatcctgattatagagaattaacctctttttcacgtttaaactctgcccaaacccacattgcccactcaactctttctcttttctctctcattttacctccatctgcctcaattacttgtctttgtctgtattcggcacaggcaaagctttcaaaactcttccgcccttaaaaaacgtcactattttgacggttgattccttccaagcccaagaatcagatgccattgtccttatcaccacccgatccctccccatcactccctacgagatgagcagatccctatattttttaaaagaccccaacatagtttcggtcgctgtttcccgggccagacattttttgtttaattggaaattttggtaccctaaaagcatgtaagtcctggtctaactatttaaactcggcttcttctttctcccctataatcggtcagcattatatttttaataaaattgaccccctaa

SEQ ID NO: 2469 - DNA, 1033 bp, Heterodera glycines
tggccaaaaagaagaaaagaccaggaacggtcttctggtcggccgggaggtgttaattttcgctcagaaacatttggaactcggatcgttttcatctcttattaatttcacatttaattcacatttccgccgtcacccattccacatttcaattcacaaccattttccatttttaagtaaataaatcgatcagaccgattggataatggagaagtcaaagaaaaggatatggaaatataaagagcggagaataatttaaggggaattgggcaattaaaatggaatgggaaattgggaaaaatcacatcccgggtcagggaaaatcctttttcgaggaacccaaaatttgggaagaattccatttatttttcgggcgcggcacacaacttccctttctttaacgagaaaagattaataatacaataatattaataaacaaatgaaaattttaattttaaattggaattatattttattaacagccacatcaatgataaattaaaaaacctattaaatatgaatattaattaacattatcataaatttacgaagggaaaatataataatttaaattatcaaacctttgcaaaaattaagaagaatttatcggaaaaaatcgttataaaaataaaaaagatcgaataaataattagaatttaaaaaagctaagagaaattttaatttatgatttttaaaatattaaattgcttcaataatgacaaaagcgtatttcttttcaacatacttgacaacttgacataattggaaatggcgatcaaggatattgttatattaaaatgtggaactgatttatccaaataccacaaaatagttgaaatttaaatgaaaataaattatatataacgaagacaatttcaacaagttacaaaaatattttattttaaaaattcgaatataaaaattaagaataaaattaaaaataaaactatcaatgcttgagtgtatggtctataaattttgatacttgtaagtatttgcattttaatgtatttattttggaaattaaaaataa

SEQ ID NO: 2470 - DNA, 4626 bp, Heterodera glycines
gaacaaaaaataaataaaaataagctaacgtggaatgttctcgaacctgcgcccattttctcgtttatttcttacaaaatcaacttacccacatttaacaagtcttttaggtaccgattctcattttcaagacttcaaacaaaaaatatataaatttatatttttaaaatctaagtttggtgccgcattttcagggagccatgtatcactcgaaagcttaagtgcttagaatatatttctgatttgtaggtgataaatagggtcgctacttttagtgacgaaaaatatcgaaatagttaactaaaatagtgagtaaaaatgccaaaatagtggcaaaaaatccgaaatagtgacatattttcagccaaaattttgtcaagagaaaaaaatttgggggaagattttttaagaaaattttccaattctcagtggtattttttgaaaaatttttaagtcgattcttaggagtgtattttttgggtttattgcatttttgttaaggaattttccaaaaatttcgaaatagtgaaaaaaagaaatgcgtttttgagctcttttcttcaaaacaatcgagcaagaaaaaagaagttaaataactaaaagtagcgaccctagtgataaagcagcacacaaaaaaagttatctcttaaaaccgcaaaaaatgtagaattttcgaagttttttgttcactatctttcgttacagttcgacaatttagttcgttagcttagcccttaagtttctctctattttaatgaaaattttcaaaaaatgagaccaattaaaaaaaattatggacgagaatcgtaaaaaaattttcatccatattattcaaaacataatcaaattttatgggctattaaatgacaccaaaaaattataattttgtcaactttttcaaaagttatgacgattttttgtcgaaaataacgtacgcagtgtatgtttttatgtgcattttacaatacatatttattttaacatttttttctcatctttttcgggtgtctcttcttcttctgacttctctgctgaccagagctggccgtgatcacgggaatcacggggtttttggtgtgccgtgatctcggatcacggattttttctatttttccgtgattttcatccgtaattggcattttatataggggaatttttattgagacgaaaatatgaaattgatgggaaaagagaaaatttttgagaaaaaaattaaataaataaatcatttctgttaaaaattaagacatgtatatgtagcttaatggttaagccttctgtctttcgttatttatcccttgagttcaattccacattggtacagtaggcttttttcatattttctttaaattactttaattgaaattaaattaaaagaaaattttcttacattaaaaatattttctttattttttaaaacattagctccataaattaacaaatgattgtacattttttggacaaatctgttaacaaattcattcaaaatttttcctggcggcgcctatcggcaccaccggaccgccattttacataattttctgaaatttggaccacaaaatggcaaaaaatagcccctttttggcgcaaaaacggctaaaaatccctattttttctctccgtcgatgataatgttggtccaaaagacttttgttcaacatcaaaaattagcttatttgttaaaagaatttttttttctatataaaatagagttttgattaaatttaagaaaagtttgaaaaattttcttaggaaatttacttaaaaattaaaatttttccttagagatttctataaattgctctaatttcctcaaaaaattggctcaatattgtaaattttgacatttttggacaaaatctgcggcaaatcgcattaaaaattacaaattttttcccggcggcacctattggcgccattgttccctgtactcgaaaaattttttggaaaaaacacgccgtaaagaagcggtttatatggtttgttttctttaaaatatattttgtttatttttccagcgattaaattcccgttttttattaataaattgaaattaaaaaaatcattcagaaaactttttacaatcacggctcacggatcacgggaatcacggggtttttggggtgtcatgatcacggatcacgggaatcacggggtttttggggtgtcgtgatcacggttcacggctcacggatttttttgaaagccccgtgatcacggctcacggatttgcgtgattggaaactcaatcagggccagctctgctgctgacacattcctccgtcttttttaattccaatctacagtactaccttatcgtaccaacccatcaagtttgttgacaatatttgtactttaaagcatttaaattcgaattgaaaaacgtacaaaatgttattaaaaatcatttgaaaaaaacaagaaattgtttctaataaatcgttgcttttttaaagataaatatatatatatatatatatatatatattcaatttgcaaattaataaaactaatcaaatgaaaaagcatcgaatttagcaaattttgcacttttcctcgtttttacaaagcatcttattcaagacccaaattcccttgtgggaaaatcaaaaacatttaattaaaaggcattggaacaggtgtccttatttctaagattttgtacttattttgagggtcctgaaaaagtgcaaatgcagtgagagcgaaacaatttgaaaaaatgaagagacggcattcgaaagtccgaagaccgaatccaactatcttgatatcatgacgaaatgagaacaattggggccaagtgggagaagaaagccaaagagtgggacttcgatgagtaatttattttgctttccatttgtgtgtatattttttgatcagaagattttttaaattttgatgcattttacttttctaaaagcgcaaataatttttatcttcttttaacaacaaaaagaatatttaaaattggtttatcatttgctaaaaaatgattaagaaaaggtgccattttaggcgttccattttgtcattcgttatattattgattaagcaccacaaaagaaggggataattagccccgggctatgccccgtaattgcccactgcagtggagttaattattctggttaattaacttttaactttacataacataatatatagattgaacaattccgtttttacatacacatattcctttagatttattatattttttgaaattttcctaattttttggccataaaatgtcggaaagtccaaaaaagtgggaaaacaaatggaaaaagcaatgtaaattttgatagaatcaattttcaattaattcattaattccgcgttcgtttagcttcatcactggcgacaattggctttcggtgttccatttggtccccccttttcagctgggccttggcattgcgttgctcagtcaccggtttgaccgattggtggacgaacacttcaaatcgcggcgttgggcgttggacgaaattggaattcgtcgcacatatgaaaaggatggccaaataaaagatgagatgacaattaccaattcaaaattggatccgtcggcaattgagacaaatgtgtccatcttttgcctaaggtgccggaaatggttgacattctatcagagagttcggcacttacagatggaaacaatcggcgccaattccgcaaaagccggtgccgcacaaagtcatcgcattcaaaagcatttgcataaagtagagccgaacagcaaaagggaatgggaattaatgggttgaaagccggccataattcataactcccaaacagtttgaattggcttttgtttcagattcatggaccataatgtcatcaattttctccgtctttttcaacgacttttcacttcttgtggccaattgtccgtcttcgttagcttgagtcgaaaattggagttcacttttcacgaaatttggccaatgatcagtgccaacatttttgcaattcatttgttgtgcccaatgcgcgattgtcgtcaggtggcaccgtcctttctcaaagattgtccatcgcttcgattgatcgcatactcacgtatggctgtcggatcggatagggcttataaaattcattgactgggatcgcctccccaaaaaagagaaaatcctatccaaaatttggttttcgtgcccttaatgcttataaatgtatttgatttcccgacaagggaatttgggtgttgaatagtactgtacgatgatgaatccatgaaagcgaaaatcccaatcaaagcttttcgtgcctctctttatttcaaatactattttaattaaatgtttttgattttccctttttcggcttttgcctccgcttcttcgcccgtctgcttcatcatcgtcttccgctttttacgtccgttcattaataagacatctctgttttacgttacgttggaagatgtgtccgttttggcctttgatctgatcaatgatcggaccggggagcgattgacgatgaaacaggtggacaatttgcacttgctgatcgtccgttctccgattgggcgcgatgagagcaaatgggccaaatgggagaaggaggccaccgagtgggacttcgatgagcagtggaaccagattatgatttcctatt

SEQ ID NO: 2471 - DNA, 4759 bp, Heterodera glycines
atcccaatcaaagcttttcgtgcccctctttatttcaaacacttttttaattaaatgtttttgattttcccattttcggcttttgcctccgcttcttcgcccgtctgcttcatcatcgtcttccgctttttacgtccgttctttaataagacgacatctctgttttacgttacgttggaagatgtgtccgttttggcctttgatctgatcaatgatcggaccggggagcgattgacgatgaaacagatggacaatttgcacttgctgatcgtccgttctccgattgggcgcgatgagagcaaatgggccaaatgggagaaggaggccaccgagtgggacttcgatgaacagtggaaccgaattattttttcctattggtaggaaaactataaccccttttttattttattttgcggcgaatttggcattttccaccattaataattgtaccaattaatgtttaatccccatcatttgcccaacttgcattttgcctttgtaataattatttgtgcccttttataatttgttcttttatttttttcaaaaaaatatatcaaaaagcatatgcatgttaactaaggcaaatacgttctcaatttttgaatttagcactctaaaaaattaaattaagatgcaaaaattgaaataaacccaaaaaatgcaagttcaaaatctgttacaaaatttattttctaaaattaacttttcgaaaaatacttatttttttgtattctgctaaattttgctaattttttccaaaaaatccttaaaattaaaattttgtatgaaaatctgttaaaacatgttattccaattttttttcctggcggtgccggtcggcactgtcggaaccctttccgttcccaaaagtttttttaaaaatgctgcaaaagggccatgcccaaattgacatcatctggatcatcggaaattgtaggaaaacattgagaaagtgatgatcaatgaggttttaatctcaattatcaatcaatcaatttatacgcaaaagcgtgacaccgacataaataacaatataaataaatttggtcactgaatgagatgaggtggtttcaaaagtaaagaatcaacatcataggtgtcaagaagtttagcaaagtcaatggaattaagtaacctcgcctctttaggcaaacacctatagaggcgagaggtacgaataaaaaacgaatgataccgaacattggttgaacaataagcggttttaataataaaatcatttttcagttctgaatatgtttttgaaaaggaatcattatgctgaatatggatcttttccaaaattatatcatggaagagttttaaatctatttttattctgcgttttaagagggattcttgtttaaagagttggaggagttcgttatacccgggtatatcatccttattattattacgtctaaaaacaatacgtaaaaatgttttttgaacattttcaagagcatcaatgtcttttttcatgtatggattaaaaatcggagaaccaaattccaaaatggatcgacaataaacattgaatatatttatgagaatttttgggcttttagttttaagtgacttgagtaaagcaaaagatgttcttattgcttttttagtaataaattctatatgtttttcccattttaagttatttgaaaaataaatgccaaggtctctaactggttcaccttcttcattttttaaaattggaatattatttattaagtaacattcattagggtttttaggcccaagatgtgaaactaagcatttattaggagcgattttaaggccatttaattcacaataattcagaaatttattaatgaaagaatggagtggagaaatagtattttttgatagtatagaataggccttaagatcgtcggcaaaaagcttaatttcaacgttttcagttttacaaaaattaggaagatctgaaatataaattaaaaacaaaagcggacccaaatttgatccctgcggaacaccacttaagcatgggaattcatcagaaaacgcagagccaactctaacgaaaaatgtacgattttgtagataattttgaagccattttagtaaagtaccatttataccaatatttttgagtttagaaactaatctttcgtgcggaacagtatcaaatgccttcgctagatcaaaatatataacatcaattgattttttgttttccaaagctaaactaaagtcatcaatgacttccaaaagttgagttgtaacagagtgttttctcctaaagccatgttggcaattcggaagtacattatttgtctcaacaaaattagtttttctgggtaatattttcttctagaatttttgaaattgagcataaaagtgaaattggccgaaaatcaacaggatttattggattgggtattttcggtactggataaataattgattttttccaaatgtttgggacttggccagtcatcattgaaaaacaaaaaatatgaaatagcggataaaccaaattttctttacaatttttgagaaaaatattcgggatgctgtcaatggaagtattattattgttttctagtttattaagagccaaataaatttcattaagtgtcattgtgaaaaagtcaatattttttttaggggtgacttcacaggaaacaggaattttttgatcagtgaagactgaataaaattgttcggctaataaattggatttagctttttcggaaaaggcaatcttgttttcgttatttttaagagggggaattttcgcgtttttagtttttaaaaaagagccaatatatcgaaatcgttgtttagggtctaaaccacttaaaaatttattttcacgatttgtaaggtatttctttatttcatattcaagttttttagaggtttctataaatttttctctagttttttcttttttaatgtctttccaaagttgccgtcgataaatcataatttttttaatatggtctgggaaattatgtttaaaatttgatactgttaatggaacatatttcgatactaaaaaatgtaaaaatgctgcgaatttgttataaatttggtcaatttctatacagtccgaaaaaaaggtaacccaatcagtagaagagagcatggcatttatttccaagtaactagcttttttaaagttaaagtgtttaaattttctacaaggaaaaacatttagtcttaagtcgaattttacagtgttgtgatcactaagtgagaatggggggccaattgaaatgtcttttatgagaaatttattatttgttaaaattaaatccaaaaaattgcattccctggtgggttctttaatcatttgattaagtcgtaaaccttcaacaaaaccaaggaaattactttcataatttgtcaaattattttggacagagaaagggccattttggttccagtgaatattagtaaaattaaaatctccaagaatgacaaaattttctgttgagactgttagtgacgaaattaattctacaagttgcataaaattttcgagtgtttccgtagttacaggtctataaaccaaaataagacggatttttgattctgtaatgggcgaaaaaacatcgatacaaagtatatcagaattttgtatttttggagtttttataatttcaaacggtatttcattagaaatgacaaacgctacccctcctccctttttattttttctatcttttcttattaaagaaaaaggaaaattttctaaaatttgcgagtcgcttattttattgttcaaccagctttcggttattgcgataattttatacctattttctaaaagtaaaagcctaaactcatccattttgtttactaaacttcttgagttaaagtaaaaacaattgagaaagttttgtgacctcaaaagtttttttccattttgcctccacgccgcgtcgtcaccatttcgttctttttgctttcttcataattcatccgcctttgttcacgtgtctcccgctcagccgccaattcttccttcgtcaaggagggtctgacgagcagtcgctgccaaccgacacgctgtttcagttccgtccggttgcgcccccattgtgccagtgcaaaacgttggaacgtcgtcgctggcaagacaactttgaccaaacgcggcccctttcgcttctcatcaatccgccgccccattctatacaccatctgtgggcaaacctccacatccaaagcgtccaacacttccgcaactgtttccgcgtcctctttggcgcgttctgatggcttttcggccacagcctccggaagtccgatcaaaacgaggctccgttttcgttctttctcttccgcgctgtcattggcattgttgttgctgttgattttgcgctcaatttcactgaggcgttcagcaattgcgttgaattgttcagccatttgggatgccaatgtgttgttgttgttgtttgataataaggtttcaattgaagacagtcgatttaagatgtttttaatatcggttgccattataatcttaattggacaattacttgtctccaaatatgacggttaaattctttcgaatccggttgcattttttgaaaatttgtcatgtgcctgccgaattggaatcattttacccgatttgcctgttttttccattttgctttggtccaaatgaatcctaatgtgatgtgaccgtacaccatttttcagataatgaaaaaacgaattggatattgagtaaaaaacaaaaatagatttggagaaaaacaattaattaaagaattatacataa

SEQ ID NO: 2472 - DNA, 2062 bp, Heterodera glycines
  unsure (1)..(2062): unsure at all n locations
tttataacaaatatacaatttaancatcatcggcatataaattttattttcactcctgatggcaaagcatcaggaagatcgttaatataaatcaaaaataataaaggtccaaggacagagccctgggggacgccagagccaacttttttactggaggataaatcatccccaattttaacacgaaaagtcctattactcaaaaagtcctttatccacatcaaaagtttgccccttatacctattttttccaatttgtataaaaataattcatggggcactgagtcaaatgctttttgaaaatcaatataaatacagtcaacattttttccatttattattgcctcgtaccaatcttccacaactgttattagttgactcgttgtagacctattcctaacaaaaccaaattgaaattccgaaatttttttgttttttaatagaaaattgtaaatatttttgcttaaaattctttccataaccctgcatagtgagcaggttaatgaaattggcctatagttttcgggattatttttgtcaccctttttaaaaagcggaaaaacaattgattctttccagatgtctggaagtgaaccaatgtctaatgagatcctaaacaagtcagtaataacagttgacagagaagaatggcaaatttttaaaattttatagctaatgttatcgggagaagtgccatttttattcggaagttttttcagaagattttggggctcgatgatgttaaaatttatatccgatataaagcattgatcaatttctataatattacccaagcatggattgcttgggtcggtttcactattattaaatgaattggcaaataaggtggcaaataattcagatttctcagcactattatgatagcatttattttcataaattagattaggtatttcaaagggattgacattgaatttttgtatatatttataaattgaatttcttccctttgaaatagcctttttctcaatttggctatggtatttatttgtttgtatttttatatgtaaagaaatgctatcgtatagtgctgttttggatgggtcagttttagcttgcctgaataatttagccttttctttgatggatgctaataaatgttgtgggtatttaggagtcaaatcattcttggttaaacgctttattggaatacactcatttaaaatttttaacaacatactgttaaaggcggaatatttttgatttatgctaaagcattcatatgacaaggcatttagccttgatgctatgactatattaaaatgtaacacattcgatggacaaaaccaacgaaagtttacgatcgttgttttcggttttgttttaggagtaattaatgtaaaaaattgtgttaaatgatccgatgaaaatatgcctcctttaacagtacaatcagtaataattttttcattggccgaaaaaatcaaatctagcctccttggtcatgctctcgcggactgctaattttatgtaagaaatttgcgaattatgtaaataaaatatgtataaaaaatggtaaaatatgtatgaaatatgtacaaaaatcctcaaatatgtaggaaaatatgtaaataaaattttttaatggttattttttggaaaaaaattcttcgtaaaaagtgaaataggcacaaaatgccataaaaatgaccaaaataggcttagaatcacatttgaatattttacaaattaatttttgatatatcattttttgaaaaaaatcgatttttagggatacattttcaaaaaaaattttttaattttttacaaaaaatttctataattctcaaaaatcctcaaaatatgtaaaaaaaaatgaaaaatatgtacgaaaaattgcgaaatatgtacgaaaaagtccaaaatatgtataaaaatatgtacatatttaatatgtagaaaaatcccaaaatatgtaaaaatatgtaaataaaagtcccgggttttgttcgcaaacacaaaaaagaaagtgtttttcctactatttagagcatggagaaaccaggaaaaaaatatatatttacataaaattagcagccctact

SEQ ID NO: 2473 - DNA, 5530 bp, Heterodera glycines
agcgatttgctttgtgagaagggtcgggacaagggggagggggactgaaaacttttagggacaaagaaaatgtacgacggttattgtggacaatggaagtgatcggaatgtgagtatgggaaggggtgggttgggcttattcggctatagccacgggcatttgccatcatttttcatattagttctgtgctctttttctatgcattttctaatttttccaattgctttagtccaactgatcacctttttctgtcatgagcatcattcagcctgtcgccacccaccccaccaatttgacctggatggtcctcgagggctgcgtgtgtccccggccggatgcggtttgcatccggccggtggactacacaaagccagttgagtgcatccacgtgtcacacgtgggtgatttttctgcgcacctgatgagcaaaccctgcgacaacaccgacaacatgaacatcaccgagctaatcaacggactgtgcttcaaaggggccggatgtgtcaactccatgaattttgtgttcttccttttcattttcatgggcccaagtaattttcatttaattttttgatggaaaattgtatattataatttctataattttgaggtctgtattttttgggcaattttgctcaatgtaccagcgcgcttgcgccgcatcgagcgccttcgtccgcgtcgtccgcctgtttacaacaatgatgagggccacccgcgtacgcttcgccttcttgtccgtcgtgaggtgagtgtgaacgcacccccccccccccccattttttcatttccttccttttggataatctttggcaattcagcgttcgtttgatcatcgattgccggccaagagttccgggcgagagcgcccaattggaacggtgggggagggggatgggaggggatgacaaacaaaacaaataaataaaatcacaaattttcacaggcttcaacggaatttgtcggtggtagattgtccccaattgaggaggtggcaaattttaaaaatatcaatttataaattaaatttttttatttctaaggcagacgagtccgttgagaattgagaagtgaagagaacaagagaagagaagaggagaagaaaatatgaaaagagaataggagcacaaaggaaaaatttttaaaagaaataatcagggatcattataagtttgtccatttatttaaataatttggtgaaggtcatttaaataaacagttaaatcgaagggttcaaaatttattattgaaattttatcaatattcctcggtccttctctttcaatgttggtatatctcaacatttccagagtttggtcattccctaaaaattaaaattaatcaaacatttaaaaaatagtaaaaattacaatttaaattaccaaataagccaaaaaatgaaaatgaatgcagcagcgatcaacgatcgctgccataaattattgtagaactgcggcttggaattttcataaaaaatcatctaaatagtgaataaaaataaataaattataatgaatataaaaattatttaattagctaaaaataaagaaaaaacaaacatacataaaataggcaaatgatgagtcgatcgaacagagccatcgttctctgctggtcactcattcgagaatggcatatgtaatgtgaatgtaggtcacacttacgaccgaaacaaataagagggaccatcttattaaatgataaataaataaataaataaattacggatgtataaattaaagaggtgtatataaaaggtggcaattttttggatagattcattttgctattttcttgaaaaatgagcattaaccttcgtgacaaaaaatcccttatggaaaatattttgcccgctgtcgacatcagccacaccattaatggaattactgtgagcagcgaacgcattgccgtggcaagaacaattcctttcgacattgtcggcaagtgcaaggagtgcaaggcaaccgaatgcgagacggaatggtgtatctcaaaggagggtgtgacaatttggtgcactcgatttaaaatcagcccccgttttgtgccttttgatgtcatttacgagcttcccggttatacctttttcaaggtattttcaacaatttttcttaccacactacattttttaaatttgtagatccgtaacaagagccgagtttttaacgttgaccatggcagtcgcagcgatgcttgcactcagacgcccacaccgctctaccacttaccgcctccaccacccccaccaaaactcccaaaaagaaaacaggaacagcaacaagcggacgccccggcgttcttttccgctctttcggcagcagtagtatagaaccccaaaagcgcactttcgcatgggtgtttaccgcacaatcccgtgcctatgggaggggtgcagccctttgatgttgccgcacgagcccgtgcctatgggaggggtgcagccctttgatgttgccgcacgaacccatgcctatgggaggggtgcagtcctttgatgttgccgcccgtggacccatgcctatgggagggtgctgccctttgatgttgccgcccgtggacccgtgcctatgggaggggcgcattcctttgatgttgccgcccaaaacccaaacctattggaccactttcaagttgccgcccagaaccaaaatctattggaccactttgaagttgccgcccacccaaatccgatttcccaaaaccgcacgggtgctttttttttgcccaacccatccctcccggccgatgcatcgccgcgcaaattaatcgataatgacaccgccctaccctccccatcgatgtcgccgccgcgcaaaaaaaaaatcgataaaattaatcgataatgacaccgccactctcatccgctccgtcgatgtgcagcgattccgagtcgtgaaaaaatcgataagcaccaaaattgttaatgaaattcaattaattctaagatataggaatattaattgtacaatagttgaataaataaaaattcattaaattaatgaaattgaatttttctgaaataattgatggtcttttatttttcttccattatttcgcaatctgcacgtgactttacgattcgcaatatggaccaaattaggtcacctgtcaatcaaattttttatttcgcaatttccccatcgatttcgcaatctacacgtgacttttttttgttgcatatttcgcaatagacacgtgactttctgccattgcgtcgaaaatataacatttgtcaacgaaatattcctccatgtcaatgaaaaacagtcacgtgccaggtgtcagctgacacgaggcattctgcggccactataaaagccccacaaactcacttctccattcagttcaaccaaaaagttggattttgctaaaataaaaattgtgcgctcttatttaaaaaaaaatattaaatttaattaaaaatgacttcaaaacgcaacgggactttgcaaaaaggcggtccgtcgaccaaaaaatgggattttcgagctatagggtaagcaatttttaataatatatttaagagacaagtgtaatcaataatttttcaggaacaattttactgaggaaatggaaaattataaattaattgacgaacggtcgacgatttgcgaaaaatttggattcacgaagaacattacggaatttcggatcaattcggatgtgagacgtcctgacgaagcgatgagggacgcaatcgacacaatgattaaggcggcttttaagactacggaagaaaggatgaagcggaaagtgcggatgtttggtatggcaataacgggtgccgggcttgcttccccggtttgggtaccgtacagggcgtacccgcagaataatgcggatgttattatgcaggagattaataagttggggcagagcggggacggagatgaaaataagaaaacgcttttgttgtcggagcctattatgatgaaaattacttgcgtgacactgcccagtggagaagggccgaggaatgtacataaatttgatttcggatttaaggaacaccaacggataaggtaagttttttgagaaaaaaaaagaaaaaaaaggaaaacagaaaaaaaaagaaaaaattataattatttattaaggatttcgaatgtggataaattttgtttgttttatgctttggtggcgtcaaagctttatttggaagtgcatcggaatatttttaatcgatttatgaatagcatcgtgagacaacgagaggcagcatacggacttttaagaaattgtggaattgatattaacgaatatagctatggagtggagcacttatcgagggttcagaattatttggtgggttctaaaatttgggaaaacgtaaaattaatggatttttaggatgagatttaccccggtaaataccgggttgtggcatttgaaaagtctgcggatccgcggaaatcgatccgtgttttatggaagggccctatgggacgcgaaaatgtagtgccgatatttttggagaatggccattgggatggtctgaagaattatgtctgctttttcaaccgtgggagaaaattctgtattgattgcgagtgcttttacgacaaagatatttaccatactttcgactgccgggcaaggtgttattattgtaacaaagtaggaggagtaccatgccaaaaggagagtggagtgaagattgagtgcccgaagtgttgtcgttacttttacaatttggagtgttataattaccatcaggaacatcagacttgtaaattatggaggctttgcgttatctgtgacaagacttatcgatttaacccgaagaaggaccatgaatgtggagagacttattgccaactttgtagtgtgagccatgaccccaagcggggttgttatattatgccgatcgaggagaaagaggaaaagtccgtctaccgaattgtcgtttgggtaagatttaataaagaaaaagacaaaataaaacctaactttcaggattcggaaacatcgcaggattcgatttataagggggaccagaaagagcatgtgatcaattatatttcggtgagagttacgtgtacggagtgctgtgatgacaaaaataggacgaattgcaaaatatgcggggaggagaggaccaaggattggagcgaggctgaggggcatgagccgacgaaggcatttgtggagtggattttaacggcattttcaaattacgatacgtacatatttgcgcacaatgctgggcgttttgatggtaatgaaaaaaaaaattaatctaaatttttaaatcctaaaatttttaggtcattttgtgtttaactacctctgccgtaccgggaagaacccgataccgcttatcaatggactcaaaatttatgaattcaaagtgcgaaactcgaagaaacattcaatgctgatatggagagactcatgcttattaatgccggtgaaactcgagtcgcttaaggcgaccttcaatttgggctgtgaggacaagccctttttcccctactactacaataagaaagaaaattatggaatacgtttggaacatctgccatcgat

SEQ ID NO: 2474 - DNA, 2184 bp, Heterodera glycines
atgaaccggttccttcttcctctctctatgctaatagacaaagaagaagaaaactgccttcagactcacggcgaagagaagaacaacaaattcccgctgacattcagcaggaagaaccctttcaaccagccccacagccttctattcctatacatccacaacttaacagaaaacggaaggcacagtatgctttgaatgatgttcaagaatcaaaaaagagtcttattggcttggaagagctaagacctccatcgcttcaacaagaggcatcccttcgtttcaaacaaaaaaggacaaacaaatcccgagtaaccctaccacagcactcgaattcattgtccttggcaaaactgcataatcctccgagggacttactggccgaggcagcctctgcccctttaccggatgatgatgccgatgattttgaactctcacaaaaccacgggagcgcttctcaggtccaacctcccccacctgcacctccgttgcctagtaaagccaaaaagcgaaaaagcaataaagttgatgaagatatcgaacgaaaaagaattagaattggttctcgaaagagggatttactggcagaagcagcctctgcccctttgcctgttgatgatggtggcgatgattttgaacctccacagaaacccggaacgtcagctcaggtccatcctctcccacctggacctccattgccaagtaaaaccaaaaagcggaaaagcaacaaagttgaagaagataccgaaagaaaaagaaccagaattggttcccgaaagagactgtcatcaccaactgttcccaaaaatcaaccaaaacgtcaaaagaattcgggaaccgaaagacaatcagaagaacagcgtcgtcagtttgcggatgatcaactccttttcagcatcccaaattctcagcttaccaatgaacaaaagagaaggcggctccaattcgtatttaaccgaaacccggtcaagtatggcgtacgcgaagacaccattttaaacaacgctggaaatccagtaacggacagcagtgtgacacaagcacttgaatacattattgaacgcagagcggggagagtcccacggtttagacagccgccggggacaaaattgattcgagaccggattaatcgagaccttattctacgaacatggacagccccaccggtaccaccgaggggagccaagcggaaattgccacaaacagaccaagaggaggaattaaaccaaaaatcacaaaaaatcagaggaacagtacagccgagaggcagagcacaggaaggactgatgcttccgtttccaacgagaggagtcaagcggaaaacaacggccccaccagaagcaacaatagaaatacctccgaaaactcaacgcctgagaccacagaaatggaaaaatcaatagaaaatgtgttggaacgactctacaatgacccaaaatcgcctgccgcattcgctggcgtagaccgattatggttggaagccaaaaaggaacttggccataaagtttctaaaaaggatgtaaaacactatttggaggggcatcgcacatacactttaatgcgtccaagacgtattaacttccctcgttcacgaacaacagctgctggctttatgacagactgtcaggtggatttggcggattttcaatcgctttctcgacacaacagcggcaatcgatacttaatggttgtaattgatgtgctttctaagcgaatatttgttacaccacttcgcacaaagaaggccgatgacatggttgagggctttaagagtgttttttccaaaatgccgatgaaaccccaccgaattttctcagacaagggcaccgagtttaaaaatcagcagttgaaaaagctatttgatgaagaggaagtcgagaaatatgagagcacacactctgagaaaaaggcagcattggccgagcgtgctattcgacaaattaaaaatcgtgtctatcgttattttgctcaactcaaaactctcaactgggtgaatgtaatcgacaaaattgttagtggaatcaacaattcaccgagtcgtgtacatggcatgcgaccaatcgatgtaaactttaaaaattctcaaaaagtgtgggaaagaatgtttggtgcagaccagcacagagcactttttggtaagcacagaaaaagaccaaaatttatgcccgaccagacggtgagaatgag

SEQ ID NO: 2475 - DNA, 6304 bp, Heterodera glycines
atcgttgatgaaaaatggtatgcgattacgatgtgtttgatcacttgaatgcatttcttgtgattcgtcctcttgatcactatcatattctttttcatcttcatcttcttcttctccggcttcttcatcatcgttttcttgctcttcatcaattgattcattctcttggtcggattctgaaggggaatttggtttgagcgctttcagccttctttttacctccaaatttatatccttaattgtgtcaaggatttcgtcaatttccttaattgtttttaaataattatgcttttcccggaatattttttgtagtttccattcactgttccattctgttttattcatttgccttattaaattttgccatttttggtgcaaaatttttaatttttcaaaatttggttcaattctttgaatgatttctttagttttattaaaaattcgagaacagtcatcaaaattatttttatcatactcgaaattcccatcttctatttttgacttaattttctgtatttcttttattaacactcggttaagtaacggtatttttgctctgagttgacccgacatatttaaaaaatatacttatgagttgaaagtacaagaattggatgatagcaatatggaccccactgttttttaatctgcttagatattcgattttctattctcttgagaaattttgttaatttgatttttctttggtccgttttgattgagtcaattatggtttgttctgttgtgtgtaaaaagtctgatagtatactatttgttacttcttcagaaattgtttgacagaaaatttctatattacggtgtgacaaatttttgtgtacatgcacagtgagagcaatagtaattttaaatatatatttagaaggattaaatttaaattttttgactttggtaatatagtcttgattaatggtaaaataatttgacaatggttcagtgattaaagccccgtagaaatttccaaaaattaaatcgtcttgatttgttatttgttcaatttcgttaggttcaaatatttcgatattctgattttcgttctctataattattggttcctcaaattccggtaatatttcaatattctcgatctgatttaactgatcgggttgatttgacaagtcaattgaatttaaatcgattatatttttaggacacagtttgaaattttgttaaataccgtaatttaaaataataaatgaaatgaaccttttattactcaaaaaaggaattaacagaattgttttatcacaggttaaatgctaatcacaatttattgattatggaattaacaattattatcacaattttaaaaatttgatcacagattagaactagttgattgggtcgtagtgtcggaatcgttgttcgattttaatttctgttcagttggtaagccaaaagtcttctttaaataatgtgtcgtcctttcttgggcggtaaggtagcgtctttggtgcttcaaattgttttcaattttgcgtaggctgataagtgcttggtcttgaccagcttttgttgagtagcctgttgactgaattagacgaactaatttttctatcagagttcggttaaactcttcccctttcacagcttttgtagttgcctccaatatgttgttggtttgcgtttccacactgtcaattcttttctgttcaagttttttggcgtggcgaattgcttgatcccaaatttctttgtgatcaacctcccagctcttcaatttttgaaaaaaacttccgtcagtctctggatcgacggagtcgtggaaatttggacactccggtgttttttcgcgaatgtcgtttagcttttctatcgctttttcactttgaataatatcgtccgtctggttggcacgaacagttgattttactgtttttatcgccttttttaattgtttgctctgagctattttttcagccctttttagctcaattaattttttttgtgtctcgctcgacagtgttaatgccgagtcaattgccgactcggtttgtggcgatttggttggtgtaactgagcgagttacttaagggatatcggtacgatcagaaaatgatttaattttgatcactttttatgggtgggacttcttcgttcgccacttcttgattcaatttgctcactggtgggcgagaacttgcgcgggtcactcgtttcactgaagtattttggaatttattttttgtttattggtttgcttgtttggtttaattgggcttggtgacccgtgtgttttttttgattgatttggtttatttttgtttgattttgtcaactgtttcagctcactcgtgttttgttgttaggttgaatgtttgacggacgtttggtcaggttttgatgagcaaatggacgaatttctgttggtcccgggtcgtggcaccacttttgtcgttctgatgacggcaaaaaagtttgaatgggctgggcggacgtattcagagcgagttgacaaaaattaaagaccaaaggcgccaaaaattcactttattttgtaccctcaaacttgggtaattaaaccataattaattaatgaacaaatataatccgacatgataaaatgggcacaaaggggaatggtaaggggaaggcgcagggcacggcacagggaaggcgcagggcacggcacggggaaggagcagggcacggggcaggcgcacgggcacggcacgggaaaggcgcacgggcacggcacggggaaggcgcagggcacggcacgggaaaggcggacgggcacggcacggggaaggcgcagggcacggcacagggaaggcgcagagcacggcacggggaaggaatggaaacttcggagggaaccaatgagcgatctgaaatcactgaaaacccagccccttttatacggcttttttgaaaccatagtacgctccaatttataatttttaattaaaatctgtttttgttatatccgtttgggttttgccattttcccattaattgtttgttttccactttttcctttgcaattccaattcctttaatatatttaattaattattaataatttgtttacgaacgcaatccttaacagaattcgccatttaatatcaattaattttcgttcctttcattcctgaggaaatgcacttttccttttcaaacaattttccgttattcatttcaaaaggttttcccattttttataattatatttttgatagttttttctaatatgtttttccaaattaaatgaaaaattatttttgtttatgtaggttttgtttttccccattttgttttctagtgttttttattttttcctttctttattttgggatttcgcgctgtcgcgacactcccacgcgaacgaagaaggcaagcacacataattctatatataataggtagtagacatggaattagaaaaaatagaataagtatgaatatgataataataaatatggtgaaaaaattggttttaataagagtgtaaacaaaatttattatatcagttacttggtccaaggaagttccaataatgggtttttcattagtattgttagcggggataattttagtatcttgttgtgatatgtattccaaattagcttttaaagtaatttcagacttgccatcgggacatataactccacaattttctgtaataatttgcttattatatgcaagttggatttgttgttcttttccttctttatcacaattcacttggaccttttgacttggacattccacattggctaatgcggtaccaaaatttgttttgcatgatagagtccaattagcaccactagtacaggaataacatccttccaatgatattgtaacaatattacaaatatttttatcataaatagctttaaccttatgtcctttaagtgtgacttgcatttgaagagaagttgtttgctgtattttagctttaatttgggaatcgaagtatacgtaacttccctgtgttttaatgggtaaaaggttctcttgcctagcaaatatttcggtaagtggacttttttcgcattcacaatgtacaacggaatcacctccgtggcattgacatgcttctggtggaaaagtgcaactaaaactttgcgcttcttctttgtttttacaccgtaatatatttttgagtaaattttcgttcgcaactattgctgcttttaattcttcgcgaactataataaatgtcgaaccaaataacggcgtcggtggaattgaagtcgaagtcagtgtgacagatatagaactattagactcgtcaccaatgtgtgttaaaattccgggtttcaagtcaacagaataggttaattctggattgatagacaatttaattgtcgcctgaatggtccaagatggacagttaacaacttcgaaaatttcgtcaccaactgattcggcataagttctgtaaaatagacatccatcagttgcgaggaaacattgacaatgccatcctccgcacgatggtacacagtatgaataacctggttgattattagcgtgatcattcacttcgggattccggtctgacatttttactgattgacaagtttggccggtacatttcccagcgcctgagcatcttttttgtgatgtcgaagataattcgtaacctctcgtaaaataatcagatttttcggtgcaaattattgttaaagtttctattgtaatttgtagtgtttccatagtggtgttagtttttgtattgtcgagttttaagcaggttaagtgttcaggtgtaatagagagttgggttgtttggtcataagaacattcaatttttccttcttgggttacagcacagtcatttgttccagcgactaaattcgtcacttcatcacaagcaaaaattattttaaataaaattaaactggaagtgattaaataaatcaatggtctttttaaccttggtcttgaaattctagttcgatttacttttggttttcttttaaaacaattaaaaataaattgtaaaatccaatggataaaacgtgtgagtattcgaataatttggaggcttaatgaaataacatataaaattatcattataattacaagcattaatgcccagtgaatctggtctacacattgtgggtttttaagatattccatacaaaatcgacgagttaattaattcacgatacgggagatgattgacatgtgatttgtttctcattggttttatctggattacttataaatttaatgataggtttatattcaaaggatgtaagttttgggggtaaataaattatttcctctttttgggggttcttttttataattgtataattttcaatggaaatttgtaattcttgtatatcatttattgctttaataataatgcctccttttaaacactcaatggttgcttcttcattgattgaagagttttcttctcttttattccgtctattttcaataaatgattgatttaaattatttggcaagtaaaatattttttcaatagttccccatgctttgatttgaattaattcttcatcagatttcacaagataaattttttcatagggttcataaaagcaaaactttgttccatatttttgtttgaatgaattatttttaaaacagtcatgttctcgacagtaaattggagtaccaatcgtcagattgccctccccaaaacaacgaaaattgtttattgagtcaatttgggaaaaaagtaaatttaatgttttcactatgtgaattgaattgtcataaagaacaattgaattaaataattttcttttcatgattgggcagttttcagttttatttggtgcgcagatatttggtttgaagaacgaaataatgctttggtaattaattttttcaactgattcatttttgattttattgtaagatgcaaaactacaaaatttgaatccctctggacatttacatttttcaccacaataaggtgggcgtcgtttaataatatgtttgtctttgcataccaattgtttatagcaaaattcttttgttattttattttgtctgattgtaaaaccgttttcgatacatagagttgtatatctcgttttccatattttaggttcctttggacattcgtatgaataagatgaacataatgaaattaatgttaataatgatataattgttaacgagttttgaaacagtctattcatttttatagggactaagggattatccatcttcctttttctgttgaaataattgggtttttgattaattattagattagagagagtttcttgctctttatcatcatttgaattaatttctaacgggtaaattaattttaagggtcgatttagtactg

SEQ ID NO: 2476 - DNA, 2283 bp, Heterodera glycines
agaaaagtttcgagttttttggtcccggtctcgagtctcgggaaattttcggtctcaaacagcactaattagaggacaccaaaccaaaaaaccctcattaaatatttattttagaattcctttttactttttttcaattaaaattaataagccccattttgggcttttcgcataattaaatttttccactatttaaacaaattaaaaaaccaaacattttttttttggccagaaatgtaattttttcactttggcataacgtgccaattaatgtcacctgaaatagaaattaccatcattaaatattctcacctgaagtaattaagcatgataaatgaaaccattgtattaaatatgaaaactataaatagtcagcaagaataaccacaaggaaaatattttaatttatgaaattttagtgataaacctatgattttcgcaattttttataatttcattttgattaaatggcattgcttttcttattagctaattagtcattacaccgaatagttttgattaatttgggccttggttctggcatcatttatattagaattaatgatttcacattacgtattgccaaaaaagcgtttccgttcaaacatcacgggcactgtaaacacaagaataatggcggttgcattccatgccagattttcctgcccacacaaaatccttatcctttttaggattttggttggcacttaggctctccaaaaattccccgatggcactctcgtactgctaatacttgtaagccattgttgacgtagccaattcttctaatgccaactgtcgctggcaatgcgcgcgagttcaaaaatggcacaccaatgctcaatccaaacaacaaaaatgccatcctcctcctcagtttctgtcccgtgcgcattttgcccattccaaatccggcatcctaatgaaaatgcccggggggagggggagggacgggcagtagcggttggtgggaacatcttccttcagcaatgccaatgccatttatgatgcctttggcataaagcagcttgttgctgtggcgaaggcgggcaatgcttgaaaaattccatggcgcatttgccgtcccatttcaaaatgcctattttcgaaaatgccaaaactgatttactgttttgtctataaaaatgattgaactgatggacccactactcattcacttttcttttcaattttgttccattttcatctgattcattttcatcaaaatttctttcatttcgttagtcattttgcgctttttccaatttccaatcctccgaaaccaaaaattattattattttttttttttataatttggcaaattaaattttatctttttttttaattgatagataaatcaattgaaatcattcaatactcaaatatgatcaaggactcctcctcttccgatgcctcgccttgctcatctccctacaattttcgcctcacttccgccttccgtcgcagttggaccattgaaaatttaaagtaatttttaaacatttttttcaaataatttacattttctatatttaaataatgcatttttggctcttaattaacaaaagcattcgcctcaattagtgagctctttatttattaagtgacaaatgaataggcgacaaattacctcttttataaaagcaccaccactttaattgagcatatttttttaaataatagcaaataattttttctggcctttttttttgcttaaaatgttttatatttcaaatgctataaaatttattttgtgagttataataaataaattaattaattaatataattaaaataatccaaaccagcaattaataaatcactttaaagaaatttgaaatttgctttttataaaactttttttaaaaaacaaattttacaggaaattgaccaatcggacttcaccaagcaacaaaaacagtgccaaggcaagcaatggtaaaatgaccgtaccagacaactcaccaacatctacagtaagccgtcgcagcattttgaagagagggagcagcaccgatgaagtggaacaaacagtcaaaacgttggcatcggagggcaagcagctgaggcggcgtcttctgatcaaaaaggtgaaaacttggagcataattgattttttccaattaaataaaatgacgcacaaatcgggccaaaatatttcgggagtgatccttttgaagctttcactgatcagcccgaagcaaaaattagaagcaaaataatccaatcatataaagtgacccaaaaatgcaaaaagacataattcactttttgctaatcaa

SEQ ID NO: 2477 - DNA, 5048 bp, Heterodera glycines
  unsure (1)..(5048): unsure at all n locations
aaaaaagtaaatacanttcttttctaatcattgtgtagactttaaaaggtaactcgccctgtgcgactcgaacccacgcccctagcaatccacgccgtgctctaaccgactgagttacggacatttcgtttagaggttctcccataggattatcccactttctcccacactccgcatccttcttgtatcacaattgaatttttaattaaatatatttttaaaaatacaataaactaaagggttaattgcactcataacaatattttttttacatatatatagcctaggcttaggcctaagcctaaagcgtagaccttgcctaagcctatgcctatgtaagagctgtcatgtcaccaattaaagaaccccaaatttttttgttaaagaattagctcctaaaaagaaaaaataaatcgaacaaattttggtcacaaaatttgaaaacagtttcccttctctttgactttctctctattgaaatttgttgataattaatagagcactgctacaggtaattaattagtgatcatcatcattagggcctttccaactgtaaattgtttctaagcaaatgccaattttttgcgcaattttttcttcaatttgttttgtcgcttttatggcgaatttccttgaaaattcgtcctttattctgtcaaattgcttaatcacagctaattccctcttccatttgtaaattttcttgcgacattttcccaatgcattggcaatttttgtttcatttttgacacggttttcctttttatattccttttttaatttcgacaatttcaccaatttttcgaatattgcaattgttttgcattttgtttcattgttttcttcatcaaattgttgtttcctttttttcgtaattctttttcaactttcaaaataattagatttaaaaaagagaaaaaattcaattttcatatgaaatcgcagctaatttttccggcggtgttgataggtgttgccgggaaaaaatttgatttttttgtagcattttttacataaaaatggccatttttaagttttttttctcaaaaaatcagcaaaaatcagccaaataatcattaagaagaaaaaatttttttctgtatttaataaaaggattgtccttaaatttgtgtatttaaaatatttttgttagtatttaattaaattttagaattactcccgctcccgcccgggactcccgttaaaaatggacgggatttgaacgggagcgggatttttacgggattcccgttcgggactcccgtcccggtaaattttgaactctcgatcccgctcccgctcccggaaattttttttaccgggctctagaagaagcattatccttcctttttgaatttagagattgtttttagcgcataaaaataaatatcggagtattagcacataatttttatgcagagaataattaaacaattaaacgaattgctccgattgctcgctgaataatttcaacgaataaaaaataccttatttatttttaaaaataatttaatattgaattggcgaaagaacggttttcgaaccgttcaaaatgcagaaaaaacagcaaaatggtgcactcccaacaccggacaaatttaaagttttattcataaatttaacaaaaaaatcaaacagaataaatgtaataaagttttcatttatttataatttcaataatgtctggttataacgattttcattaattcgagatgatggtatattgaaacaaaatatttttttattttgattaattaaatttttagttttgatttatttcagatgaatttattataattttatttaaaaatatgttgatacaaataataacattattgctatcatcaatcatcatctgttgctggtcaccaaaattaaaatccatcttcaggaccgtacccatatcccacaatgccgtcgtgtccacataacatgcaccatcatcgtatcccggatatggatcgtatcctggatcatcgtatctcaagcctttaatagtagattaattttaaaaaagtaaatagctgttgtttgtgctaaattatttataacttaattgggtaattattttcaaaatcctttataatttttttttcaaatattgccgtacataccctcttaaattaatccaattaaatatattatcgttcattaccgtccgttcctccataatattgggttaaaaaataattaatttaataattaaatattgtatgggagcgaaataacagatattacaatatatgatgtcaccaaaaataagaaatgtttattatgctgaaaaggtccttaaaagcgatcacttaagaggaattttttaaataaaatatttaaatgaagaaaacaaaaatgaatgaaacgaaaatggaaataaattatgctggtgatgggggaggaatagatgacgggagcggatttattactatttaaggactcgggaatggctgggaaatgtattccgattttaatagaaagccgtctttccgagtttaactatgttctagattaatccaaaaaattttatcttcgacctgatatcccatctctgaaacatttataaaaataaagtccccatcccccacctctaacaaagaacctttttagttttgtttaaaaatgtcggttcctatgtataaattacttattaaagcaaaactaaattgcaaaattttagccccagctgacattgatcaccaccgaacacaaagtaaaaaatcgtctctgcccctctgaacatgaagtgttcactcctctcttacccgttcattggaatttccctcattttggtcgtcggagttgcgtcaagcattggcgcgcctgcggcggcgagtgggcgaaagataaagccgccaataatggagcgcggtgccgtcaacggaggcactaagccaactgaaatgggcaaggaggaggcggaacagtggaaaaaggagcgagaagaagtgaaaaagttgctggcggagcacaacgagaaagtgcagaagaagctgcttaagcaagccaaggcgttggagaaggacgaaaagtatcagcagcggatgaaggagcaaaaagccgcccgggcgcggcttccgaaggagaagcgagtgccggcaatggacattcctgagatcaatgaaaacagcccagaggctgcgtatctgtaccaaggggacattcaactatcgctggaagaagccaaaattttgtttgcccgggacgacgatgttgaagagggacgaccatcgacgagaactcccaatgcttcttctgatgctgttgcctccagcggtcgaaggcggcgcggggcgccaatgaacgctgtcacctttccggacagcaatggcctaatctccagtacccgttcagctttgacgacagcatctgtatgtttttcagtgtggtaataattgtagaaaaaatacaataaatgggtggtactctattcctaatggaacttctaattcagaggaggaattttcgatatattgtatccttacgatctttagccgaccagctaaaggggcacatatacaaagccctcaacctttggtacaacaacacgtgtcttcacctgtacgaagacccgaaggcctctccccgagtacactttaccagccatgccggaaaaggttgctattccgcactgggacgccaaaaatcacaaacctaccaagaagtgtcgattgggcctgaatgtgacctggtaagcagcagatcagcttgagacggctaccggtccgagtgtcgaccgttccgagtgtcgactgcagtataacttgcctcaaacttaactgatttggccgaccagaatatcaaattaagctttcaatgagacgaagctagccgtgagcaaaaacattttattcaataaagcgtaacaaagttatggccaataaacgaaaaatccaaaaaattgccaatttttgactctttttggacatagcttttttgaaatgctctcaatcactaagcttgtgcttaataatatcttggcctaaatacgctgcttcttttggtaccaattcagtcgatattggtcgagacaacaaaaaattacaagccggtcgacactcgcggagcgatcgacacttgggtaagactttgacttaccccacaaaattcatgaaacacttcgccaaacttagatgaacatagaaagtctgaaaaagattttaagctttttccgaaattttaaaacctgttttaagaggttctctgggttcgctgttcacgaatatgacatccactgcacctaatttcgaacaccagacccaaattcgaaccaaaagtcgaaaattgatttttcatgaaatcactcagaattagcactaaagcatagactcagcctaggctaagcctaggtaaagcaaaacgagttgaaacaggtgtagatcgaattttctgttcaagatatgtttattgatactaaatttgctatgaattgaatgttttgggcttgtgggtcaaaatttgattttttctaaaaattcatttttggtaaaagcacttttttatgacttggtagatggtttttcatgctttttcatactgtactatgcaatatctaagttttacaatagaatttcataaaaacttttgtggggctaagtcaaagtcatgccgacacttggaccggaagcgcttgagacgcatatttaaattgcataattctgctccaaaatgttttcaaaagagatcgccataaaataatatgtgttaaaccagaggtcgcattgaaaatttcccgaaataagtacatcgctggacaaaaataagttttaggggccaaaaataagtacattttttaaaaacattattttgaggctttatctcttattttattcaacaatatcggcataagcaacatatttttcgccgcctactatttttctgagcaattccggcttcgaaattagaaatttatacatttccgaaaatcgattttaacaagtttgtggaaaacatacctaagcaatttgtaaatttcagtgcatttagagtcaaaaaatcagatttttaacaatttttttggcgctttttcctagaaattttttgggtatgggtga

SEQ ID NO: 2478 - DNA, 1627 bp, Heterodera glycines
tgttttgggcttgtgggtcaacttcctatgtttctaaaaattcattttttggtaaaagcacttttttatgacttggtagatggtttttcatgctttttcatactttctatgcactatctaacagttttacaatagaatttcataaaaacttttgtggggctaagtcaaagtcatgccgacacttggaccggaagcgcttgagacgcatatttaaattgcataattctgctccaatatgtttccaaaagagatcgccataaaataatatgtgttaaaccgctatttgtttgttattttgtaagctcggcatcattgcgcatgaaattggtcattcgctgggctttttccacgaacaatcgcgctacgaccgggacgactttgtggaggtgaacactgacaacatcaaaccgaaaaaactgcacaatttcgacaagcagtcgaacatcaataacaacaactattacgttgggtacgatttgggctctgtgatgcattacgcttcaagtaagtgttgaatgaaatcataaacaatatttgaccaataaaccgaaacatattgataaataaggttgacattatgccgaccaatctcgatttttttaatattatttgatgtaggaaaaaagaaaaatgcttgttcagaagatttctccataaatggcgagccaacattggtgccaaaagcgggccccttgtatctgcacacgatcggacagcggtatgggcccagccacagcgattacaagatgatgaacgagcattactgcgggctgagctttagttcggcaaactcaagccggaacaaaggtgaatgaaacaaatcaaaattgaataaacgaaaagcattttttggactaacctcaagggctcataagtttattaaagtgtttgtgtccaaaggaatcgatcggttccggaggtgtaactgatttcggggttttttgtcttaaatccctggttaaagacgaatttcttcactccaatagtgatcaaataaaagactgaacaaatatttttacactgccaccctaccaaaaagcagtgttaaacattcaattcggcccggtgctccgaagctcaaattctttttgcaaactaaaccaattgtcatgctaggtaataggtatggttaggtaataatatttttttcaaacaaatgccttagtctatctgtacatattggcgaacgtttgtcaacgaaataatgtttgttgggttgcagttacttgcgagatggaaaccacgtgcttcaatggcggcttccagaacccgaacaactgttcggcttgcatttgcccgccaggctattggcatgaaaagtgtgagcaccccttggagtggcactcgccaatcggcgtaccgaagtgctccccctatacagaagccacgtcgtacactcactggacagaagttggtgcctaagatacaaactccgtatgtccaaagtcgaaaattgatattactataaatgatgcacacgaaatttcggttttcgggtttttggctttcggtttcgggttgcgagtttcgggtttcccgaaagtaaaaacacacccctaatgttgagttttggccattatcaattaatataaaaattccccgacggtgcatgaacaccgccggatca

SEQ ID NO: 2479 - DNA, 3439 bp, Heterodera glycines
  unsure (1)..(3439): unsure at all n locations
ataattttttttcttttcaagccccnaattgctcaaaaattgttcgtggtgaaaaaaatgtcgcaaatgatgatattgttgaataaaatgcgagattagcctcaaaacaactttttttaaaatgttcttatttttgaccccaaaatcttatttttaacctttgatgttcttatttcagaaaattttcgatggcaaccctgatttatattctttttcccaaaaagtcatttgtaaggctgacaattttatgtgaatacatatttttcaaatcgaaaaattacctctaagaatttccaatcggcaccgctggatccatatatagaaaagatgctttgaaaaatgataagcaaaaacccaaattttttgagtagcaatgaactggaaaaatttctagctttcggttccggtttttttcgggttttatggctttcggttttcgggtctgactttcggtttggtttcggatttcgggttttttcgctttcggtgcatcactaattactatagccatgataaatttcgacttttggctaatcggagcggagcataggtgtcagaattccagcatgtcctaacgctttggataatccttagatgtccaaacaaactggtgccaccacgttggatgaaaatgctgactttgcttactgtgtttgggaaattgtgtcacgagagacaatctacatcgaagtgctggaggtcggtgatatgtgtagcgatggctgcacatatggtaacacggaaatccggacgagtgcaaacaggggcgacacgggagtgcggtaggtatcttagttggttagggtagaagtaatcccgtggactggttcttattggggtaggtcgatacctggtactgaaccggtttggccctatcatttatcctggtaccaaaccaacggcaccggttttcaaaaacggttggtaccagatatcatttaggaaatataaatgttttttcctattttttcaaaaattgtgcaaaattgaaagatttatggtcaagtttcagtcaaaaccagaaaagataagaggaatttttggccggagcggactccaaaaaaacgggaagcggaaggtttccagtagcctcgtttttttattcgaaaattttttattcacgtggtaaaaatgggggaggaccgctcaatccaagatgatccacttttactccacaattaaataacagcacacaatttgttgaagggtcaccaacggcagtccgaaaaggaaaggccgcccagaatccggaattggaattccggaccccaaaaaggtccggaactccggaatccggttccatcccctggtatacatacgtttagatcaaaacacacacttttttaatttgttgtttttgtaaaagtaaaacccagtactgataaggagagtttgcaaaaatgcaaatgcatttttttttcctgaaccggtaatggcttaaaaagcacgaaaacttgtttttagtttgatttgaaacgatgtacttcatatgcatattttgcatatttcattggtgcatatttgcatattaggtacagcgttatatgcatatttaagcgtatatttttgcttttttgaaaaacccataagaaaaactcaataaaacaaaatcaatttaaattttaataataactcctgaaaatcgttacaaacaaaaattctcctttaaatggttgtttggccaattttaattcaaaataattgaatattatataaaatgctctgttttgtttgtttttggtaggaaaattaagaataaatgttattgggattttttcaaatttgaatccctaattttggaaattttttttctgcattttgctgcatattttgatattttggatgcaaattttatgcgcatatttgccgatttaagtgcatatttttgttagccctagtgatcgttggtcttttaccacccgtagtttgtgttgccaagacgacctcgggggccccaacaaaacgctgagcatcaccgcatccaacggttacgcaaggatcagcttgtacgcgtacaaaggcatccaacgctttcgccttcgctggcgccatgactgatcagagagagagagcggatttatagttgctaaaaattccaaaactggtactaaaatagttgttgccaaaaaaaagtgcaaaatatttgctaataaacgcgaaaatgccgaaagagttttgtttaaaaactataaatccgggtatctactgatcagagatggtgtagacgagaagaatgaaagcagcacagagtgaagatgaagaacattttgtgatgaaaccccaaatcagcagcaatgtgaaagttaaaaaaataaaataaaaaagtgaatgcgcaagtctttaatttaaatcgaaatcggcgaatatttaaattcacaacccccttcacctcttcctccctccttttcgttttaccctcttcttctacatacccagggttcccagatctgaggctttagcctcattttgtggttttttgataggtcaatgaggctaaattttcataatgaggctttgaggctttttgtggtttttttgagaaattttgaggcttttggggaaaatcctcagaatcttttaaattttgataaattggcataatgtttggcaatttaaagaatttttttaatgaaaacatgctaaaaatatggtcaaaattcttaatttttcccccagcggcgcctatcggcaccgccggaccgtaaaaatccttaatttacaagcaaaaatttgctcaaaatcgcaaaatttggtcatttttcggacaaaatctgttaacaaatcgcattggaaattacaaaatttttcccggcggcgcctgtcggcaccgccggccccctttgttccccaaaagctctttggaaaagcgccgcaaaaaaatcaacttcgtttttcatgttcagaatcccaaaaaatgcttatttctaacaaaaaaaatgctcaaatcgatcatggacaatcaaaaatataacatttgatcattttaagcgtgttttgaataaatttgtaaaaatgaggctttttgacacaaaatgaggcttttttgcctgccaaatgaggcttttgaaaattttgatctgagagccctgtatatgccatatatttagaaaacaaaatctcgtttttaagtgcatgaaaaatttgaagagttcctggttaatggacataaaacaaaaatgttttccaggtcctttcgtccttttcctttttgctgaagacaattttacaccatagaaccgaacggacttcgatgggtttggtagtccatccggctgtacacccccgatttttgaaaattttggagaatttaaaaaatcctagtgggttacaaattgaggaaaaataaagcttgacctgagcttgaatttttctagaggctttttgtggttttttgagaaattttgaggttttgggggaaaattcgtcagattttttaaat

SEQ ID NO: 2480 - DNA, 2656 bp, Heterodera glycines
  unsure (1)..(2656): unsure at all n locations
ttttaagcgtgttttgaaataaactttataaaaatgaggctttttgacacaaaatgaggcttttaaaaatttttgatttggggaaccctgtacatacccccttcctcctctcactttattaccccttctcccctcctcctctctttctcccttcctcttctttcattcttttccgccctcttccctctctccctccgcccctcttcctcctctagggctacggcttgtacataaaaagttatacttgggttgaaaattggacaactcaaaattgatcaaatttttgatcattttcccttgaaatacggtagaaaatactgatttttatcgtcatcaaattcaatccaagtataactttctatctacaagtcgtagacccaccattcaaaaggcaattcggtagagaattttgtgttctttctggtagcccaatcaaaaaatttcagaaaaattttcccagccccctaggaatttttttctaaaattttcccaatttcaagccatttttgactttcctgatcaccatgaaggagtgatctgatcaagttggtgtaaaaggctttttaaatcagtatcaaaagataagctagcatgaattatttcaggtttttaaatgaactctaaggtggtttttcaagtttgagtcaagacttttttccgccctttttttgagtcaagtctgatcaagtgaatcaatctcgggaatgaataagccaaataaattttcttgttgtgtgtggacgagtcatatattgaggtaataattatccaaaaagaaaaataataagtcgactttaaaaagtccatgagaaatttgtaaaactcattattcggcgagtaatgtaaaaaattttgagcctattaaatattttgcccgatttcttctgatacagtggggaaaaaagtcttgacgcaagatgattaaaaattttaacttttttactgaaaattagctgattattttttcttacagtatatttatttatcccaatacatgggattttcatacacccacaaattatttcaatccaaaaatgataattcatgcttgcttttcttttggtcctgatcaaaaaaacaaaaacaaacttacaccaacttaaaaaaaaagcagaaaccggaccgatacaccacaaaatatgttcagaatcgcggaaatcttcgcaaaaaattcattgagtgttggaatttctatcaacgtcaggtgagcggaggagggcaacagcaaatgcaagaagtgacatacgcccgacagtggttacatttatggttgcagatggtgatggaaaagtgaggaaattattggaatcatagatgatgggcccgggatttatatttgaaaccttattttaaatttcgaaaaaaattcttacaattagcaaaattccaaaattttgcacccaaagttctcctaaaaatgtaaggcgcaaatgtcgggaacttataattcaaaaaaaatggatgctaatcaacgaatttttttgcttcaaatcacctttcggcacgctttttccaaaaaaacgagcaagagggtcgggaaaaattttgaaactttggatctgatttgcgttaacagatgttcattcataatcttttttttcgatttagtgcaaattttttttttaatgaaaattaggatttttgtaggccggcgttgctgccattcattgcaaacgacgcaccaaattttcctccgtcgcttttacgtcggtggacccatcgcttctcaccgaaaataaaggtacgggaaaaagattttaaatttatagtaaaaattgaaaaatgtgcctttcaaaataaaatttttttttaggaaaagcgtggcaacttttttaagcttttgttcaaaaaattttttcgtttctttttaacaggtcttttacatttcccgctaaacgaaccgcgaaagtctgcgcaaaattcctggccttacacttcgagtgagttggccacgacgtacagacaaatcaatttaaaaaaatacgacaaaaaaatttttttttagggagtgaaaggcgacagttcgaaaaggcgccgttcaaatccagcataaattttcaagtaagcgaaaaggaccgtaaatttaataatttaaatataaaatggccccctactctatccaaaaggacaggttcggcaggcccgtatttgtgatccaaaagttttatgcgactgggacgggacaaaatctcgccgaaatttgaaaaaaaaattcgacggcgagattttgtcacgtcgtaggtattttgaatttattttcttggtttacatgctttaattatgtctatgaaattggcatcaaaaatgggagggtacacagaatacgcattactcccaaaagagtcaggaaaacgagggagggccgttggggctcgggtttgggtttttgcagggttcggttcacttagtcaattggcgatggacttggagaataattatttatttggggacaagtaggaaataatatatatttatttggaggagggacggattgngaaaggagagaacatgaagagaaaataataanacaattacgaatgaatatgggaaacgggcggggggatatgttgactgggtcaaagggtaaatcgataaatgggatatgaatggacaatgaacatcagancgaacgcccaattnaatcaaatgaccttct

SEQ ID NO: 2481 - DNA, 9980 bp, Heterodera glycines
  unsure (1)..(9980): unsure at all n locations
agtattttaaaatatacctattantctttttgtaaaaaacgctttttaaccgcttcaatcagccttgtacgcatttcctcaacttcgttaattattttgatgtcgccatcaattgtcactgaaagatcaactcgttccaaagtggagaccaaagtgcgagcgagcggaattcgggcggagagtgtttctttacaataatgtaaagagacttcttcggtgggctttagaagttcctgaaaatattaaaacataagaatatattgaacactaaattgccttaattagtttgagaatggaccattcttcttgacttagaagcagatcgaatttcctgtttctaaccaaaaattcatcaacagcagccgactgttccagcatacgttcgatcatacgtaatgtcgaattccacctcgtacttacgtcctttgaaatgaaaattaaatgagtatttggtaattagcaacttgaagcaatttagctttcggtagcccaagttcgccttgaacatcttttaaatcatccatcaattttgccgaatgttttaaagttccaacaatttttcgacatttttcgaaaatttgtgccatttcgtctttttcttttgaaaagcactcctttacacataaattgaggtcatgggcggcacagctgattcgttcaatgtacattaaatcaaatgcctccaaaaaatgtatttgaaatgaaatgtttcataaactaaccttaactaaatttgctgccgaatcggtcacaaaacaatggcattcttttacattccaattttcgagaagagcttttagaatttcagcgatgcgttccgaagtgtgggccccatgaaatttttgaatagcgagtgtaaattttttgcgtgaaaattttgagctaacaccaacagcagtcaagctaaatttttgaatattttcattttactaaacaaataaaaaccttatgaaggaatcctttgttgtatccgaagtccaaatgtcagaggtacaacaaatgttctcaaactcagcaatttctcccttgattttgtttttaacaactttgtaaacttcaggcagaacatttcttcggtaatggctttcgtcgcgtaaattttccgaaggatttcggagcaattttttgaaagttttgtggttgattatttggaacggcaaattgcaacaagcaataaaattgataatgtccttgtccatcacacttaatttgcctaaaatggtaattaattaaaatcacaattttattcttggacccgaactccgtgttgtataatctgtgatttttggaccatccttctttgacttgccttcatccagttttaaatatatttctgcatacggcgtgtctttgtgcttggcaaacagatgggtcttgagccctttgatactccgattcgacaatttaagagcaaaatacaacgtttttttgtttacactccaagcactcgaccgaatcttcggtaattcggttaaaaagaccgatttgccaaattgggtggctcataataatagcttaaatcaaagtaaaataacatttatttaaattcctttgcaaaagtctcctcatacctaatccatgtatattataaaaacaaagtttctgtatatttggcattctgtcttagaaaattttttaaaaaatcaataaaatcccgcataatcctgcacaaaaattcaaatttgcggatcctgttgcaggattggaattcaaaaatgtttgcaggaccggatccggccggattaatcctgcaatcctgcaaatcctgttttttccaaaaaatgcaggattgcggactgggatcctgcaaaatcctgcgcaggatccggtcctgcgccgggctctagacataatcgcgaaatatggaaaaatatggatatagaaatccatcctagaagcttcaaaccaagctaaaaacatgtttttcttgcgtgtccaggaaaaaaaatatggatttccatataattggaagccctagtgatcagtgatcccggaaatccctgcctgaaaagtcaatttttgttgattattttgtgcaaatctcaaaatttttgtgtttcgtacatatattttttgccatttttatatgtccgatttatttaccgaaattgagaggttttcatcataaattgcatttgatcactgatgaattatgatcggttggccattcttaaataattcatttcttcttccactaatcaccattgtttcgttcttttgtccgtcactcattcatcgtcagcagaagacgccacttttgtgatgctttgtaccgtttcttctgccggtggcggagacaatggccttaattaagcgcaatttgaattaattaaacaaaattaaatgccttttttatttgctcacccaatgcaattagtgccaccatcaagcaaaatgatcacattgtcccaattattgtcccaatttccgtcttcccaatgaaccgccgccgtctccccaataattttgcatcgtttcattatccaaccgatgcccccccattcattttcttttgctttggccaatgtcagcttttcatttgtcgattcgttcaccaattcaaatggcaccatttgtattgacggcacatgaacagaaaaatgaatttcgtaactgacggaagaaatggcattggcacggagaaaatgctaaacaatttgaaaacaaaaaacagtgatttgtcgagattatggccacacctccttgaaattgttgatccaatcagtgttcgtttgttcgttgtgatcttcgcaatgcaatcgcttgggttggccatcttttctcggagagtgcaaccatttggacaatgcttggccagcagaaattgttgcatcaaaatcagcatcaatcgcagcgggcgacagaccaaatgaatagattgaattcaattggttaagatcgatgagaattgtcggcgaaatttgacgaagcaaattgtccaaatgatcaccatcgttaaagcgcaagtggcgaatgtttgccgaaaaaaagggccaaatttcgcgaacaaaaacatcccaaattggctggccatccgtgttgtgtggtgatggaagcgacaacaataatttgatgtttcttttgttgaaaatttggtgatttgaacgaagaaaagcgatgacggagtgatcgatgtacctaaaaatgggatgaatgcttttattgccataaatctctgattccgaattactcaatctgaagattcttaaaacggattttgctgggcagcggacggtcgggcaatggaaatggcacaaatttgtcatccatttgtacagacagcttcggttcaggtcctttgtccttgcgatgaattttgatctttctccaaattgtcaattcgcttttgccatcgaaatgtttgtccaccaacgcattgaaacgtggcgaaagaagtgccaatttgaggccgagttgggcatggtcaaaactgggcaaaatgtccatccaaacgtcgttgcaaatccaactgaaattatggaaaacagtttagctaaataaatgacgaatttgtgtgacttttaaaatccttttaccgtcggttcatttttgaggcaattagcacaatttggccgagctccgaatgatgtcacacaaatagcagaagaattaattgcgttggtaaagctttatttttatggttttcctatttcttgacggatattatcagggaacggatttatatgtttttatatatttttttatctatcgcatgaaaatctcaaaaatagcatttttacctgttttcctttcaatcagagcgagttttagcacatatttattttgggctttttgggaataaaaacatattttggggtttcggcagtttttgtcacatattttggcgattttttggaaaaattagtttttttttacaaaaatgtcttttggcactcaaattcgtggtcaaataaatgcccaataatttttcaaaattttctttttttgtatttttttgaccattttcatgactttttcacttttaaggcaaaatttgatttttagcgaagaaattccgaaaaatgagtaaatctttgagagcgaaaaaaaatttacgccaaaaagcattacattaagctagcgaaattgataaaaaatgagacttttttgagaaattaacttattttttgagcagtttttttcaatttttggcacatattttgggaatcggtcgttttggcgccgccgttttggcgacgccgttttggcgccgccgttttggcgacagggtcgttttggcgccgccgttttggcgacagggtcgttttggcgccaaaaaatcagagacgcagaaataagcggcagacaagcgcctcttcaatttggtgtagaattacattccgtgaacccgaacaatgataacgatcacaattaccacattaacccaaatcaaaatcatcatatcattttggaatttcttcgtggcgtttcgcgcaattatcatatgaacccatgaattttcttatttgtcttctttttgtttgttattgttagggccccgacttttagtgacgaaaaagtgccaaaaaagtgaattttcactattttaagtgacaaaacgccaaaatagtgatttttagtgacgaaaaatgacgtccaaatgaaaaattttttacgcggaaatgcgttttttgagctcctttcttcaaaacaattgagcaaaaaaaaagttttttcactaaaagtcggggccctagttattgttatttacatttttatgaaaagttgtaatttttaaaaattgaaatcgatcttggattcacaattttttaattttggcttggcgccaaaacggcagcgccaaaacgaccctgtcgccaaaacggcgtcgccaaaacagcggcgccaaaacggcggcgccaaaacggcggcgccaaaacgatacagactcatagaaaacatctagaactatcgaatgatataaggaattaaaaatttgattgattttaagtaaagatatgaaaaaattgctacaattgatggtaccatttgccgggcgttttaccttatccccccacccacaaatcaatcaatcaaataatcaattggatggataatttttacccaactttcatttgtaaaaggttagaaattttctttgtcaaccaaatccaacatttgttggtagcaaaaatggagaaacgagggaagaggaggaaaaggatgaaaatagcattggggaaggaggagagacggaagagagagagtgaaaaaggaaaaattcgaagcaagaaggacggggagaaagaggaggaagagagaatgaagcagaaaagagggaggaacagcagcaatttgacactttttaattttgccggtgctaatattgctaatggatgtcgtaaatccccgtcaaaatcctgaaaactacacaattttcgaaagaaaaatgcattcattcgattacacataggcaaaaaatttatgttgtggcgtgggtttgcaggagcacagcttgttccccaaatcccattaacgatttaaaaaaatcattaaatttctcagggaatttccggcaaatttcaaacaatttattacaaatagagattcttagaccccctaagaatcggtcggggccgttttcgcgtgagtagctgtttaggactgaaattggtcggatttgtgcaaaacatccatgtttcgaatccgaacccgcattcggacaaatttcttaacttttaatttttttatttcttgcggctaatatcttctacagtaatttgtcagtttggtcggatgtgcgtcaaacggaaaaattaaaattttataaaaatataacaaaaaataacaaatttcagaacaaactaaggtcgcatttcatagtttcgggaaaaaccagtgagaaaattgataatgttttcgggattcacattggcattggcataattgtgatcattttgggggaggtgaatgttattgatgtcgttatagaatgcgccgtttttgcaaattttttctcctccaccggcagaagaaacgggacaaagcatcacaaatgggccgtcttcttctgacaattagtgacggacaaaacaacaaaaacagtgatcagcagcagaagaagaaataaattgattaaaaataactttagccaatctggcatcatttgaaagctctatgtgtgctctatattcacatgtcaaaatagaataaatgattcaaaaataaaaaagttatggcacacggcgccgaaaaagccaagaaaaagtcaatttttgaggttttttggccacaacgtttttgtaaactgactaaattttttgaaattttgcaatctaatagagaatctcaagagctatcgaatcaaaaatatttaatttggttgataatgaaaaaagttgttagcaacggcgccgaaaaggccggcgccgaagtgggcggtttacgaggattttttttttccaaaaaataaccatttgaaaaatttttatttacatattggggcttttgtacatattttgggatattttaattaaaaaatgacaattctagataaaatctgataaaaacttgtgctgctccattttttctaggtcaatgacttcttttaaagaatttttttaatagcctcaaacaacaacaaaaaattgactctaatttttaaaattaaaaaaaaataaacggtagttttaatatttgccaaaaattgcgcaaaattttccaactgttgcagcctctattgtccgtcccatgtaaagcacttttaaagtgggatagattttaccggtgctaggtcgttccacaaaaaagctcagtgtgggcgttccacaaaaactcagtgatcgataaaattaaataaataaatttaattattcaattcacaaaacacggtgccgtccggttaacactaatgtacggcgggacgcgtcatttcaaattttttaatttttcaatttttgacatcacttctcgccaattttctccatttgtagtagacatagcctgacgccattgtactttttttttatttattatataataaagtttttatttttatctcatttttgccgttttcccaactttcgcctgcagcagtttgtgcctgtctttttgggtcaccgttttgccctgaacaatcaaaggcaattcgaataatgcataaatgactcaaatcaaataaaggatttttttgttttcaaaaaacatgaaagcatgtttcctagggtttggggccgctgatcacgatccggcatctattttgaccaatttcgaaccccggacatgaattcgaacaaaagttcgaaaattcaaatttttcgaactttgcatttttagtttgaaaccggctaaatacgcgtaatcaaacaggaacttatttacactttttaaggcaaaatttgactttttgtgatgaaaattccgaaaaataagccaatcttagagacggaactgaaatttcttagtcattaggactcaaatgacgaaactgaaaaataaaaaataaaataaaaatctggcggtgtaacaattttgggtacttgtgtgttatctgtgggcagattttcaaaaatttttatgtttttcgctataacttttttctttagcatccaaatccaagattgttggtatcattcgaaagcttaacatgtttcgaatctaattctatgtatcacttcgcgattagacaattaccaaaaaagttatacatgaaaattgcgaaaaggtcgaaattatgaagttttttcttaataaaattttgtaattacaactcgccttttgtctccttctccccttgctgcttttggtgtttttgttgtccctccaattcaccgattcaatcaaaattgccttttcagtaataacttaaattggaacaaaggcagtgtcctcgggcctcttctttttttgatttttataaatgaccttactaattatattccgcctgaagtcggaattaaattgtatgccgatgatgttaaaatttacatttcgcatgataatgacgcgaaaagggatttactctctttagcgttggctaacttagcaaatggtctaaagacaatggcatagccattgcgcatgagaaatgcgcagcattatatttaggaaaaaataattctagactgagtataaaattggcgagaaagtaattttaagcgtagattgtgtccgtgatctgggggttttggttgatcaaaagctctcatttaacaatcatatttcaaaaattttaaaagcggcctattacaaggcatatcaaattttaaaaatattaaaaacaaggaatatcagtaccttaatcctagcatataaaagctatataagacctcacctcgaatacgcatccgaaatttggaatatctcctcaaaagaacagagtaaaagaatagaaaaggttcaaaaatatttcacaagaatcgtatacaaaaaatgtggcctcaaggcaataccatatgaaaaaagacttgagatttgcaaattggagaaattaagtactcgaaggtcgctcactgatatgaatatgactttcaaaataattaggggcttaactcatttagacccaaaaaaatatttcgaattttcttcaaggtcgcaacgaaaaacatttaggattcaaaacaaaagattcagtaataaatctcgaaataacttttttattcgtacaattaatccctggaattgtctacccaaaacggctatggaaatcggaagtttagctaaatttaaaaattttctgagagaattttatttagaaaataagtcctgagtggtaattcatcccttttttattttattttatgtattttactgtattgaccatatcatatttttttttaaattgtattcattactttgttttccgctataagtgcaattacatgttgccttgcggtttgctcaaataaataattacaactcgccttttgtctccttctccccttgctcttttggtgtttttgttgtccctccaattcaccgattcaatcaaaattgccttttcagtaataacttaaattggaacaaatcctattaatatttgacagtaattataataataatgttacggtaggtacagtaattaaccattgctcatttcccttaactatttgacagtaaaccttcgtctgcactttcacatcaatttgtgccatgacatttttctcaagcttttcttgaaatgccatctgctgaaattaacagatttttctttttgcaaaaagcaatctattttctaaaacattaaaatattagtgccaaaaattttttatttttgtgtttttgtaagtgatttataatttgaccccaccgcgtttaattttttctccattttgtccatttttcttctccatttcattgtgatcatttttcatgttgtcatcattctccttttcggcatcagcgttcgtctgtagcatcttttacggcattttagcaaaaaagaaaatcaaattcaaaatgtgctgatcaatttgcttcattttccttttttcacattttcccaccttttccatctgatcaatgcttttctgttgttctttctgctgatgatccatttcgaccaactttttctgtaattcctccaaattcttctccaattgctcctctttcttatcaaatttttcctgcattttttcaatgccatttttgagctttcgattctcagctttggccataaaaaatgaaatctttttaacaaaaattttaaacaaaaataaagaattaaaattttccctgtactactgttgatagttccccctcatttttggaaaaaatagtcgttaaaacatgtttcttggagtttttgggaccatcgaatcgctacggatcaactatttaatccgggttccgaattcgaataaaaggtggagtgttacaatttttcataatgaaattttttttcaagtttaagtgtcgtaaaaacagttcatgttttagctgtctagtttttaactcgagatcggctcttctatttttacaagggaaaatcccctaaaaaattttaagttttgcaaagttttggcgttctgattactaaataa

SEQ ID NO: 2482 - DNA, 3577 bp, Heterodera glycines
acataatatatggagacacttttattcgcggcttttgtgccttttgtcaaaatatggtgggtgaaaacattttattttttgggtcattggatacccatttcgccatgatgaagtttgcccgtgcatgcataaaatttttttttattactctcaccgactgtaccggagttataattttttttgtgagacggtttagtcatcacaaattattgaatatttatttttcagaattttggctctagggcaatctgtcaagttatggaagagaaataaaatttgaattataattattattcttttggtcagtttaccctaatctcaaattttgaatgatacaaatccttaatgatatgacaaacaaaaaacagaaatcaagccttaattcactaatcacaaagggctctttgcaaattcaaaaagcggaaggattttgcgaattcctcattaagctcacatgaaaggagaattttgaaatttttgataggctcctaacatggatttgttttttttctttttggctttcttaaacctgatcaattttataccaagtctattctcagactgagaagcttgagatctcttagcttccaaagatggaccatttccgaatttttaaggggtactgtaactgtattggcaaaccaaaaaagacaagtgagaataatctaaaggttcagaaaacactgggtttaccatgcgaatttggctccttaggtacccgataaatccctgattttttaatggaagaaatcatcatggatagagataggtttattagcaaaaaacgaaatgaaactttcagtacaaatgactcacaacagcttattaacaaggatacctcacaggggaagctgaaggatttaatatttgaattattgaccgctcatccgagccatttccgatctgagtttttatgatcaaagccctcgggcaactctgtcaagaatgaagggacaggagctattaaaaaattatttaattgcagtcgaaagtgttaaaaaaagtaaatgtataatcttgtcagtaatggtccaatacctcaaaaaattgatttaacaacccgccagatttctatcagttcgattatcctcaagtgaacagtgagaacctttaatctttaaaacaaaccttgtcgtcaagcaaagctaaggttgagagccaagaggtgccaactatcactatttaacctatcattggtcatgtggattggataaaaatttatataatttataaataaactagataccaaaattatgtttgatagtacatggatttcaatttttggcacaattccataaactattattttaggtgccctttctgattatttcatattagctcgagatttaaattctccccttctacataccagaattttggtccgaaatttttttgtcattacttaaactattttttattctattctcttaggggaaagctgtcaagacattagtttttttaagaaagtgcctacaagtataagttttttacatcaaaaagaagtcagtatccagacgcatcattttttttgagaatgattaaaaagcattattcgaaagctcttcacaggctctattagcctactaaaaattacagaaaatttcgaactataaaaaaaagatagaaataaaaaacttcgaaaattctgccttttttgcggttttcaactgacaacttttttgagagctgattaatcactgagaaatagcttataaatatcttctaaacatctagggctttcgagtgataccatgattgtgaagtttggccaacaaagaaaaaagttatagctttttgaacattgctgagatggagttggccagacggagttgacccctaccggtgcagttgaccaattataattaagtgaatgccgtaaagttgtaccttgcctaatcactgcgcagaagtgatcaacaaaacctttttttgtaacaacggcctaatttcatcactttctcccctttggggaaacagtcaagttttctttggtctatcaacaagttttgccaaacaatgacataaggctgaattatcatttatcccaacatcatcattgtgatcgaatgcctgaatgccagaaaaatttcgaaaatataggtactttagttttacgcttttgggtttgagttctatatgaatactttgcatatgtcataacattttttctctcttttatctccacatttcgagttgacaataacctaatttaagttgtttgttaaaacttatccctctgcattaattcgcgccatttgcccacgttaaagacgggaaatccagccaattttcgaattcaatgaccatgataaaattaacagaatgccattcttaaattattagtcaatttcttcgttattgtaaatattaccggtcttgagtttctagtaattaaacaagaaaaattttctgatgaattattttattcatacattttgttgtattaaaatatcaaaaggtttcaattactatttcaataattaatcagggttggatgtgtatggtagctcatttattaaataataatttttctgtttggggaaaaactgagcttccatgaaatttttcttgaatagtattgtatcatgaagaatttttttttattttaaagcggaattttatcaaaataaaatttatcacacaataatgatagcctttcggggcatttgtcaagcagcagagactttgtgttaagtagagttgctcggtaccggtaccggtaccggtactggccggtaattaccggtttttttggtaccggtaccggtaccggtaccggtaccggttttttcaaaaatgaaagtaccgttaccggtttgtctagtaccggtaccgccggtaaaaatttgcactggtaagaatgggggtctggtcgagaaaaaaataggaaattggtgaagaaggagaaatttttgagaaaaaaataaattttatttcgtttagcaaccatgcatatgtggtgtaatggttaaaccttttgcctttcattatttttcgcttgggttcaattccccactgggatagaatattcttcatattttctttaccattattttaattgaaattttaattaaaaaaaatattccaactttttttctttcattttaagcatcctaaaaacccaaaaattaatcaattggtcttttttttacaaattctgttaacaaatcgcattaaaaatacaaaatttttcccggcggcgcctatcggcaccgccggccctccttgttccccaaaagtcttgagaaaaacgtgccgcgaaaaaagcggtgttgaaagcaaaaaaggtcattgatttacattaatttacatggccggagacccttcgcaaaattggaaaattggccgctgatcccttgttttgcaataatctgaattttgaggtctacatctgaattttagtgttctttatcctgaatttgaaaaaaaaacttggtcaccctcaatatacatatacttctgaacaattctaatgataaaaaacaggcactcgcgcgaaaactgaataaaaattttgtatttggaaaattttgtccaaaaatttttacgttggaaaattatggttaccggtaccggt

SEQ ID NO: 2483 - DNA, 5618 bp, Heterodera glycines
  unsure (1)..(5618): unsure at all n locations
tttttcactagaaatttctaaaaatttcnaaaaattctcaaaatatgtataaaaaaataaaaattgccaaaaattttggatttttttttgaggatttccaaaaatttccgtaaaaaacccgcaaaattatgtaaaaaaaatcaaaatatgtaagaaaaagtccaaaatatgtaccaaatatgtataaaatcccgaaatatgtaaaaatatgtaaataaaagtcccaacttttgtttgcaaacataaaaaagaaagtgtttttcctactatttagagcatggagaagccaggaaaaaaatatgtatttacataaaattgacatccctaataatgaacaaaaacaaatacaaaattttcgattccattgaacacaatcgtttcaaaaaaaattctcaatttccttatccacctaattttcacccagacccctttcttaccagtgcttatttcgacccgaaacccgacccaaaatcatcgggtcgggtttcgggtcgagaaaaaggccgggtttgggcatcgggtttcgggtaacccggaacaaccctgctaaaaacccaaaaattaatcaattggtctttttttacaaattctgttaacaaatcgcattaaaaaatacaaaatttttcccggcggcgcctatcggcaccgccggccctccttgttccccaaaagtcttgagaaaaacgtgccgcgaaaaaagcggtgttgaaagcaaaaaaggtcattgatttacattaatttacatggccggagacccttcgcaaaattggaaaattggccgctgatcccttgttttgcaataatctgaattttgaggtctacatctgaattttagtgttctttatcctgaatttgaaaaaaaaacttggtcaccctcaatatacatatacttctgaacaattctaatgataaaaaacaggcacacgcgcgaaaactgaataaaaattttgtatttgaaaaattttgtccaaaaatttttacgttggaaaattaccggtttttaccggtaccggtaccggtaccggtggaaaaagttggtaccggtaccggtaccggtttttgcattaccggtcagtaccggtaccggttttttagcaattaccgattaccgagcaactctagtgttaagcataaaatgtattttttttagtgcattagtgcattaactaacagatatgagcatagtataattttagatttaatacagcttggtaaaattgccagaaaattcaaaggttttgtgtcttttgaatatgccctttgtgcttaatttagaaatatgaggagaatgacgttaaattaaattcagaaattatttaagactgtcaaatccttgcaaaaaaaatcaacaaaattttttcttgctttgatttctttcaatgaaataaattctttattcttatcaattcttcgatcagcaattatttgaattcatattcgagttgtattaatcctgcttgttcgcaagtctagtcatgaaattttttttaatcaagtatttttttttagaaagaaaaatagaagataaaattttttttgcatgaaaaaaggaaaattatatttcagctcgtattcgaccataattttttttaatcatttttgcattcttttttcaattaagccagtttggttcatcagtttagttctctttttatttgatgaggtttaaataatagaataattaattcattttaattttttgaattaatactactgataattaattttgcctgttagcaggcattgtcatggatgttccggttaatgattaatataccgttaaaaaactaatagaaaataatgcatctttattattttttattttcttcattaagcctaatttatgaggtacaaaatgttgtttttttttacttccttgcatttttccctctagaaaattgagtaatactcacaaaaacctatctattcgattggtttagaacagtttcgaataaaattaggttcattcgaaagcttatactttgggctacccaaccacttgccaaatatttttatcttaaccttaacacattttaaatcacaacaatcgaacccaagattttaaggatttttatattttttgaaattattattattagagctcggataaaaagtcactaaaatcggaaaaaaacgtcaaaaaggcaccaaaacggcaaaatgccaaaaaaggcatttaaggcacgaaaatcacgaaaaaggcaaaaaaaggcataataaaagtcaacgtagaagcctcaaaccaagtggaaaatgcgttttttatgcttaatatatcgaaactagtgcgcagaaaaaaaaggcatatgcctcaaaatccgagctctaattattatttataaattaacatgataaaataactttgtattttattctacttttgtatattatacagctttttccattaaaccgtcttataccaacagcaaatactcagaaaacggatgagcaccaaatgccggagattgctttcccaccaatgaactcagattcaaattttgcatactttcaattatgcattaatacttaagcattattgtgtcttaattatgtgagtcttatctacctattctcatgggtaacatgacaacataaccttcggtttcatttcaagataagaaaaggtcatttaaacttaaatgtacaagcaatctgcttcggcagcactgtcaagaaaatcggaatattggtcaatagaaacacgttaaattaatatactatctttttctctagctaattgagaaatgccttatatttgttttcaacttttacataatgaggaatttcctgcggcgaattatttaatttttttttattacaacttttcgctattcaaaaataaaagtttcaaggcccacaatttttttatagtgcattgtcgcttatctttttcgcttagaaaagctttcgtcaaggtcatccaattcggctgcaaaaaaatcaattaataaagcttcaaaaatattttcaaaaataatcattttatttttaaagaaaaataaataaaaacattaatattgtggagtggactcgaccctcctccttctttccgtttacttcttacaaaaaacttttttgccacacacggcacctttttgataaaggagttcattttcgggactctgtgtaaatggcattcgtcattgtttagaataaataattttttttaatgagttaaactttgacggaagcaaacggacttagaattagaaaattataaactcagtgttttgaaatgtgttgttagaattccaatgtgaaaagagcggtgaagcattgagaaaaaggcaaactcatagcagaaaggactttggtacatcagtcatgcaagttccttttaaaatgaatgccttaaaacctaagaggtttttgtaatttaagtttttattgaacatttgacaagacaattataacgaagccgtaactgattgttgagcgtaatttatccaaaatggatcaaaacttaaatttgaaattatagaccccattttcaaagtctcacgaaatcattttgcaattattttttcttgtttacaaaaaaataatttgaattatttaaaaaactattgacaaaaaataattaatttttgatttatttactctaatatatacatttttagccagcacttattcagcaagtaaacgccttaaaatccgtgcctataaaaccaatttttttttctcaacatttcataatcatgacattattcacctatcggatataaaataaaagttttgttctggtcattccatgtgattaaaaaaattaacccaatcactgtctgtttgacaccgattctaatattttcagtcaaaatctaatcatttatgatcattattcccatgactttggtcaatcagtcacgttttgatgcttattttttaaaaattaattcaactcaaaagtagctcaatcaaagtttgtggacaaacttaaaggaagggtggacgtgtaaggcgcaatttatcacatccgttcaatctctttctcacaccatttatccccgcttttccccatctttattccgttccataagtccaactatttaatcgggagcattctctcgataaggagtcagttgagcgggcagttaatcggcgagcgagagccgagagcagaacgcggcggaattattattaatgtaattggccaatatttatattattattttactccttctcgcccatccccgcacgcgtattagatctaataggcgcccatgggattacaaatttggggaggtcatttatccagggcccggattttggcttattcctttttcccccaaatccaatccccaatttccctcgtcccttcctcatattcagggctggacatcagcaccttcactcgattaaattaatagttctgttgaaaagtttattttcaataaatgtttaatatttaattctttaaattatattgcaatttgtgcagccaaaggccaaaaaaaatacaaaccttttcttattttgatttatttatcatttatgagagatttatgaaagttggtaaatttacaaattaattgggtttttttgtccctaattcattaaagaaatccgatccgtttcttaaacatacatttttatttcattttttaatcgtttttttaattgtccagacaattaatttgttttatcaaattaatgcggtttctttttttgtttgttctttttttattataatgccattaattaaatttgttaaagattattaattaaatgcgtgaccggaaaatcggtcagtggaaaatgcgtcagtggaaattgtcaattttttaaagagtaaataagatgaaggctggcctaaggcatcgtccggaatttttttcacaatatggatgaattttgagaagaaaaataatttaaattaattaaatttttttactgtggcgcaaataccacagaattaacgtatgtccacattcgtgaatggcgaatttttgctgcattttcttaatgcctcgatttataaaattccctgtacggttgccaataagtcttactcgttaaaaatgccatgaatttgaattacttatccacaatccattaaagcgaattttgttgggcaatggatgatccgacagcagaaatccctggggttttcgttgaaaaagttttgcttcttctccatctttacgaattgttatccatctccaaattgtcagttcatttctgttttgccaacatcaaaatgtttgtccaccaaagcatcaaaactgaagaaatcagcgccaattgaagccaagttgttctcgtaaccggaaatcggtcagtggaaaatgcgtcagtagaaaatgcgtcagtgatataaatattttaaaataaacttctatggcattaatattgtaatacagaagtaaacttctatatgaaaatcgtactcaatttcgaaccccggacccgaactcgaacaaaaagtcgaaaagccaaaattttcaaattaggttttttcttaaaaatcagattaaatacatgaaaacaaattaaaagccaatcaatcctgcaataagagatcatctatgccgtttttgaaccaaaaatgccaaattcgaaaatttggactttcgacttttagttcggttcgggtccggggttcggaaatggccgaaatg

SEQ ID NO: 2484 - DNA, 7662 bp, Heterodera glycines
gttaggggttcgaaattggtcgaaatggaggcctgatttgtgctcagcgcctcaaaacacccctagaaacgtgttatatggattttcagaaaaaaaattaaagaaaaaactttcgggaccaatgatcgacatgattgccaaatactcgactccaacaaaaatggagaatctctattaggattgaaaatcccaaatacttcgacaaaaatcgtaaattttacccataatttcattgatacaattgcaaattttcggtgaaatattagctcataatcattagagatgagatttttaggcaaagcctatttctgcactcctttttcatcgatataagcatgtaaaattaactacatggtttggtaaaatttcgaaaataagggttttttcaaattaatcctataaaatatggtttttaaacaggaaaatggctgtttggctatttttgctacctaaactcatctctaataatcacaatttcctgctattacgggtggcgatatcattcgccgccgccttcgcccgtcaaatttcgtcgcttcctctgtttttgcttcgttttgccttcgcctgtatctgtcgccccctttccgttttgataggcttttgtccgtttgctctttttcccattttgcgcgcgctggaggaaaatccgatgatggaccttcctcttcgagcagttcatcattccgttcatgcagttgaccatctttgagcagttcatccccttcagccaattcgctccattcaaacgaatcgtcctttccaaagcgttcctcctcaacaagttcgatccattgttcatcactccgttcagtttgttgttcgtcttccctctcttccaattcgtcgtcctttccaatttcttcgtcctctttctctgctcttttctcacccaattcccatgttttctctgattgtttcgtcccattcttcctcctcctcctccgacatttctttcctccattccatcaaaatgttcggttgttccgtccgaagggtcttttcgtcgtcgtcgtcttcgttcttctcaatttcatccatcagcagctgatttgatggggacacttcgccaaagctaacaataatttggattaaattcgtttcctaatatttaaaatttctttttctctttggacaaacttttcgagtgaatttgctgaaaagtaagtggtcgaagaattgaaggaatcgtcggacgtgaaggaattgcgtcgcgcttctctgtccgaagaggaagagaaggagcagaaggaggcacttgccatgtccgattgagtggcacaaatcccaaagcgaacaaaaggcatcgaaatggaaggggcgcaatctcttcgaccgaaagtgtcatttggaaagtcaagagtagaattctgatggtcgagaggtgaacattgattctcccgagggaaattttggtgttgaggagtctcggaattgttgcaaatatccaatgccatggaattgcttgagctgaagctggagtatttccattcgtcatattccggtgccgtctcgaaaccgatgtccgaaattgccaaggaggaggaggagggagaagagcgggtgtcagctgcagccaattctggcgttgagttctgttgataaggggagaaatgttaacaaaaattaatggattggatagaaaaggggaaaagtgccgtaggatgccaacactgactgggaaccgattgcccatcttgccagcttatttgaccgtagttggccctaaccatggataatcccccttccaattgtaatttggaaatgccgcactttccctgtttgtgttcgacctgttcatttcgttcaacagccgcattttcctccacctcttctgagtaactgctgttttgctccataaacaatgaatttgttgtggtggtcgaccgatgggcgctggaaatgcctccgaaaagtggcggaatggtcagcggaccgggcaccgcgccggcctccgttctgtaggaacagtcctcgtcatcgtccccggcgccatcatcggacaaagcgtagacaccgtttgagttcagcgagccgtacttaaggattggatccatataaattccttatcggcttaacttcattttatcggattccccatcgcgagtctcaaaatgagtcctttgtctgtttgctccccaattccaacggataacactttatttacccgttttctcttcctccattgcgcttcaaaagttgcaaaaaatgagtccgtcgtctcattgttcagtatccattcgctctgttggagctcctcaaggcttacacggccttcgggggacgggcaaaggcaacggcggataatggcacggcactctgtggggagaaagaaaagtaaacgaatgccaatgccaaagtgtttctttgatcatttttgaaaatatatgaggactctgatcaacataattgattaaaatattatgagttttctccgttaattatggccaattttccccccatttttttctcatttttaaaagggacctgacgacacattgcgcgggaatcgcaatttccctgtacaaatttggagctcattccgaaagggcggcttcccgaccaccaaaaggtacagaagaatgcctgaaaggtcggcaaaatggcgaaaaaaaaaattcgaaaaaaacggaaaaaaagacaaatggactaacgacgagggacaattggaaaagaggagacaattgacacgacaattttaatttcgaacagaaaaatgaaaagatttattaaaggtaaggtattatttcaatttgactgtcttggattgaaaattgcaaaaactacatggatttgaaatttgatgtaattcaatcggaaaataaataaataaattaattataattaaataaaattaattaaaataaattaataaattaaaacaaataaagaattgtttgtacccaatgaccacactgtgccctccaatgggtaaaaacagtcccttttgaacacctgcgaacaatcaatcaaacaataagtgatttgttcaaattatgtgtttgccattcaaatgacctcaggcggcgagtaggacaaagtgcctgacgaatttggggaaatggccaaaaacgaacggacggaacgaaccttgaaagcattgtttcctaaaggattttgaacattggtatgcttctcttttacattaatgctaaggctgcctaattgatgaacaaaggataattgatcaattggagtcaaaatagaatctcgtgttcagttggctttacattcggaattttgatcggatttgccgggattgtgatgggcttcccaatcctggaccattcatgcacctttgtctcgatttcgttctctaaacttacttagcacgctcgagcagttcggctgctccgaagtcgaccagccaaacagtcccagaatccaaatcgaccaccacattttcgtcttttatgtcccgatggatcaccgagtgtttcttgtacagctcaacaacggtgtccacaatttgcacaaacagtccgcgtgccattctctcctccaaccagccgaaggtgttgatcaaatcgaacagatccataaagttggcgggccgttccattacaatcaaaaagccacggcgactttaacggcacaaaaaaccaatgaaaatcagtgatcagaaagtaagtaaagaaaatatgtgtaacaccttgtgaaccatccaataagacgaacgacgccctgaaaattcgaatggaagggacagtcgaataagaacatgggaaaagccaaaaggtccgcttccaatcggcacgccgacctgcacatcctggcattcctcgatgaagcaaatctccgtggggattattcgccgttcggccatcgtccatccattgactcttttgtgccgaatgcttttcactgccaccggaagtccgtccgcaaggcgataggcccgaaattatgccatttaaatagggtttacaaccgcagaccgataaagttaattacaattaacctaagtaattacccaggttttctcagtgaacgatggaatgagaaaagaaagactcactttgtaaactctgccaaagccaccggagccaatttcaccgcatatccttcaaaataaacaacaaatgcttattccagatttgttatgcttatcccctcggggacctgtattgacggtggaactccctgagggtgtgttctgaatttggggtttttgcagaaaacaaatggacaaaagggaaggggggcactgacctttgtcatggcggagacagccgaaatggttgaacagacaaatggacacgtccaacacctttttgagcacaaagcccatttcagggaatggcacttccaaaaattaagaaaaagctcatagactccgaattttgaagattttttgcaaaatgaaaaatgctttctgaatgaatgcatcagacaaaaagaaatgacaaacaaaaggcaaagggcggcccggggggaggagggatcagcagagagatcagtagagggagagaaagcactgatggcgcaaattggggagggggagatcgatcagaagaaaccgaccgaccatttgaaaggtgacaccgacggaggggcgagagacaaacatttgcgtggggtcggcaaagagcgacggaaaaagcttattttacgatcagtttaggctcaggacaaggaaaggcggacgagttcttttttccgtggattgggacagggaaaaagacccggggggggggggaaagtaaatcctttttttttctcttagcattcggcccattagcagtaaaagccatcggtggggccactcattgcataatcttcaaaaatcagaagaaagcgatgggaggggaggtgagctgatcggacgctgcgcttcttatacttttgagttcgcgcacattgggaaaagcaaacggaggacgaaaattggggagggagaagcaatgcttaacgaagggaacgtaatgaatcactcaattgggctcaaattagcaacaaatccgtggaaatgattcttaaaaatgcactgctgagcttcaaatactttagcattttaaaattggcaagaaaataaacggcgaagggttaaaagcataaaaaagggatggcattaaattgtcaaaagggaaaagcaaaggattaaagagggaacaaagcaaatgattgatgaataaaggacaagcacagaatcagatcaatcaaactcagctgaattggctattttgaggggaaaatgccgaattaagcgcttcttctttttgttggtggcttttctgtttttattttcaatatttcgtcctccgttggctcatttcatcgggaaaaggtgttccaaatcatcgcacattcccccccccccgccctctgatcaatgaatgagccatcgttcgccctttcatcgatcacttttttcaccccggggccaattgaatggcttatgagtttttttttgcaagtaatttttttgcatcatcactttattgttgtcaattctctgatgcgttacctgccgatttccggcttttgattatcttctttcttttgccaatactttttcgtattgctcccgctctgatttcaatttgtaaataaaaaaatgcctgtgccgaaattgggaaaattccccgtcaaattttgacgaattttttcactttgcgttgcttttcccattgtcccatccccgtttttctgtcttcttccccatttttttcatttctctttcatttcaattttcctttgagggaaaatgagaaaaatccttccaaattttcattccaatttgttttttgtaatttatcaaatttgaggagcattgcctgcgctggacatctgctgttgtgctgaaaggggccgggcttatttatgattggatgtgttttataatatttttcgtggaaggaatctttggagaattaattgaattacagctttcaaatcctcgaccaatccattttaatctgaactccttaattgaagtgcttttcgtcagtttcgggcaaaaattacggagttgttggccaatcacactttgtacggcttcaactcttctccttgtgctgcttgaacttctcgtccctcccaaatcttcccatttctttgtccatgtccttcttcaacttctcccacagcttccaccgttgtctgtctgagcacagtcttcgcctttccgaccatcccattgagaccattttcatcggctttctcctcccccctctgatcgctttcggattgatcggcaattgtttgaatctgtgcgttttgctcggtcctcgcgttcacccgaccatacgacggttttgcaccaattagctaattagctgcagcggtggcgtaatcaaattctgactgtgaatatgcctctcacctctctcttaaaggggttccacaggaattaatcctctccgagtcattagtacaaaactttgctctaaaatgaccaaattttaatacttgatatcattgatagaactaaatgttctttatgatcctctaaaatttcaaaaaaatttattaactttaaaaaaagttatggcaaaaaatgttcgaaaaccaaggttttttgagttcctcgagctataacttttttgaaaattaacgaaattttttgaaattttgcagactgatagagaacacttagggctatcgaatgatatcaagaattaaaaatttagttgctttagagcaaaattataaataattattcgacaaaaattttcataatgatggtttttaaaataacgccctttatgatgttttttaaataacgacccgtcccagggataatccctcgttaaaatttgatccctaattgcgcccaccactgcccgtgccattggtttcgcttttcgttagcctttggcactttgttcagttcgaattcccttttggcggtgttggcactgctcgacgtgcttttccttctactgatgttgccaagttcattggcccattttacattttttgctcgtcagttcacttttcgacgggtttattttgccacaaaggcattaaacattgaaaagttggccaattcgtttactaattgcctaattaagatccctcttttggcactgataaatcaatgttctgccgctgcgatttggtgatttttcaattaattaccattttaattacgttaaaccagggctgggttaaattgcatacgtatacttaaattttgattaaaaaatatatgtaaattaaaaaccctcaaagcatgctgaccccgacaaacccccgaccccgacatttcacaaccccaacgttgggggtttcagccctactgcaaaaagattgaattaatcagcagtggtttgagaaaagcttaacccaaatttaactgaaattcttttattttgcattataatctctaaataaaaatttatgatttgaaaatgaatttaatttgctgaataaaaatttaatttaatattttcacctttcgctatttacaacctttttgggcgatttaatttcacttttttgtcactttttatttttcggtttggcccagccctggttaaaaccaattaattaaatccaaatttgccttccccaggattatgctcggcatttgcctcgagcgtttggtgggcattcggcgtcccttttcttcgcgtgtgcgaagttcgcgcggcggcacccaattcttcgtaatggccgtcttttgtggcactttcctgctgacaatgaacatttatt

SEQ ID NO: 2485 - DNA, 1917 bp, Heterodera glycines
tgcataaaattcatttttatttttatttttaattattgaaacccaaagctttcgaatttgtagttgcggcagtgcacacaaatatattaaaaatatgcttgtcttccttcatcaattcactctcaaattcggactaattatggcaaggaaagaaaatcctaatgcaagcaaaagccaaattattagcatttttagcatttgtattggagaatgaatgaagcggccgcttggaagagaagcgaaatcgatggaaatgcttcgccgcctgccgattgattaacgccaaaaaaatccctccccccccccccccaccttttcaattccttcatcttattcaatggaattaacttgtaaacgcaacacaaacaatacgattgttataaaattacaaattgcaaaattatgtgcaaggaactaatgggaaatgagcaaaagtcaaaaacaaaactatcaaagtaaaacggtaaacaaaaacaaacccaatattttacgcactctgttaattttgagaatgaaattagtttttttaggaagactaatttattcactgtttacagttgaaaaaatgaaaatttcataatacatatttcacgattcactttttaattttgattttttcatagtattgtaaataaggaatcatttgcttatttaaaattcaactctttttttttctttaacgtttcgtttatttgtgaatttgcttttttcaaatttagcgtgacttaagataaaagaaaatgtcacatggttcgcaattaatcgcatcatccatcatttttatattactaatttcgctaatgaaatgatgcaaaggaaccatttacatttgtagcaataaataatgaatctaatcagctaatcgcttctgattttcactgcttttttcaataaaaaattccgcgttttatacagaatattttgcatttgttaataattttgttaattgtcatcaattattattattattcattatgcatccgcaaggccaacaacaaaaacagcagcagcaaaagcagcaacaacaacagaagcagccgaagcactctccgcactccattccgatagtcagcagaatgggcggcgctgcgttgagtcacccccaccactcgcagccgtaccaccaccagcagcagcagtggtcaccgggggcagcggtggcgccggtggcggactttggaccttcgtccgccccttcggtcagcggatccatcattttcatgccctcagttgtcagcggcgacaacgctggtggtggtgggatgggcttctcctccaccagtgaattcagcagccgaatggcgttgctcatccgtgacgtgagttgggtatgtgttttggtgttgcacccattgcattttggggggcaaagcgatgtgtcggtcccacaaaatcaaaaagaaaaaaaattatttcacattttgacgaacgaaaaaaacaaaatgtgatagtcccaccgcatgtgccgctgtcgtgggttccccccccccacaccgccgttgttctttctccctcccctccggcgctggctgttattttcattatctttgttattttcagggtgcctccgtttatttatcagcttcctcttcaaacaatgatgatgatgaaaatgaatcagacagcgaaatttctccaaattgttggaaagaaggtaattgtcatcattttgaaaaaaataattcaaaaatttgagaaatttctcatttttttcagaattgcttaaataatgccaaatttaaaataaaattaatgtaaaaaaagttaagtcaattaatttagtgtccgttaacggcaacatttactcgaaaagagaagtgcgctctcctggtaaatgggagattgcttcctgaaaaacaaccaaattgaagtaactcatcattcatatttaaatattgaaaaaattatttctaaaaa

SEQ ID NO: 2486 - DNA, 4384 bp, Heterodera glycines
  unsure (1)..(4384): unsure at all n locations
aaaaaaagtagcggncaatgncaataggcgcaatttggaccnaatgnccagtttntaattaaagtattaattacactggtttaccaattattataattatcacacttttgttaacttatctattattatttttgcactttttcnccttaattgggcttttttattttaatttttaatntaagggttctcggcaccactttgccccaaattgcgtggaataaggccggcattgcgaaaccgggcgccgtcatgcttagcgtggaacaaccgcgcgatgcgatgcgcgtcattgaggaacggtgcgcggagcggacggtcaattttatataattataaaaaacatttactgatcggcggtgggtcgttgattctatctattgggattgattaaattcggacatttcattttctttgattactttacttactgtatttcttgaaatagaatccatggctgatcggtctgtgtttcaattcccttcaaaagggaggctttgtttcagtgggggggggggctgtattataggaaatacggtatttaatttgatcgctttcaaacagccgttgattattcaatcattttaccaaataaaattaatgagtttgaacccctgcaattatttcattccttattgattcactgattaattttatgatcattttaattcttctgatcatcctctgctaattctcacttttgggtttgttaattattttcaaatatttaatcagtaattcttcgtcgttttattctcagatcatttattaaattaattatttaatttgatcacttttccccgcttttcagtgcccccttttcattgtccctccactcaccgattatcgttggccttcttccaccggcggtcaacggccgtttgaacttggcattgccggcccgcatcagcacatcaatgcttcgttggcactccaactggcacgcatttggctgctcaaacgacacggacggcacattggtcggcaattttccaaaaaatggaaattcctttttaggaaactgattaaattttttaaattcattttagaattttaaaattatgttttttattccattattttgtttcacaatttcccagaacatatcttaatttttcttgccttttctgaaattattgcgaaaaaaagggatgggaatttatttagactaaaattcgaataattatgatttcctaacagactaattatatttaaattaaaaactaattctggtttaagaagctgatcaaaatggcacagaaatagccaacaaaagcagcgacactaattcaaatgatctccagcaactgctccaacttgatgggaacaacaccgtcgacaaaaaagagccgaatttcccgacaaatcgtttgaacgcatttgcattgactcatggttagtcagccagttaaaaatggtaaagtggatagtctattcttcccgttgaaaaatggctttttatgaattaaaatttaaaaataaattgccccaggcgttgcgcaagcgttagccaagtgccggtgggacgggcggagtcagctgttgcgacaagggccaaacacagtgttccacttggacggcgcgcacaccccccaaagcataaaggcatacattttcagtttattttacaaattctattaatttaattttcctaaatgcttttcaatgctatttcttgcattcctctttcgtttcccttatctctcgcttcctttcttcccacagtttgtatttttaaaaaattttaaataataaaaaaaaatctttttaaaaaatcaaaaaaactcttcagttctgtgcccaatggttcctccaaagtgtcggtgccaccgtcacagcgccgtccgtttcagtcattcgcattttgttgttccattgcaccggcgaccgaagttcggcccaactgttgccaaatttaaaagtaaaaaaacacatttaaaaaccaaggccaatatttagggatgcgaaaatttttttgttatttcctaatttattttttaaaggattgccgttttgacatggcactgttctgtccggcgctgatctgtccgcccgatcgtcggcccaccgggcgctcacttggccaagactcgaccaacgtcaatttggacctgagcgcagagcttcgacgatgcgagaatgatcaacaaatttggcaacaaattgtaaattaaaaaaatgttctttttaatttctgatgaatttttccccattgtcttattattttgaaaaattacactgaaaaaaaaacatttttatgattccccatcaaatttctgtacggacctgcggaaggtttaaaaaaattatattttttatctatttgtaaatatattcctctctgtgtattattcgaacgtttctctattaaagcgattaaatatattttattttccaaaaatggtcgaatatttaagggatgatcagtttttttttctaaaaattattttaaaaaattcctcattcattttcccataggctcctggccatccctccgctgtgttcagttgtgtttcggatgcgttggacaaagtgcgtgccgtggcggtggagaacagcaaaggaagtgccggcactgagctgcacgtgttggtgactggcagtcttctgttggtcagtgattggttgggcggtggattttttcggggtgggcggggggtcagatgggtatggaaaataggacattctatataaaatgtttccttgagtaatttaagatttttttatcagattgaaaaatgttttttttttggttttctcaatttttgtcagtttcatttctgtataatgttataatatattcttacaattatttttaaactatttatatctatttatattcctttccattttaatttcaaattaattaaggaaaagttaaattacttaaattttaactattatgcgagacaaaagaaataattgtgcacagaatattaattaaaaatttgttattttttatctctcttgatgaatttttacttaaaccctcattaaaatgcccaaaattatttttatttatttattcaaaaataaaaataaccaaaagaagggctgtgtcacttacacttttggtggaaataaggtgaaatgggaagtactgataaaagacaattgaaattttgactggagaagcagaaagtagaaatgtcagacctccaacaaagggaaatttggttttttataggggttggagaaaaaagaaatttttttgaggaaaatttttaaagaaagtttgaagtaggatgttttgttttttaattttatttgaagaaattgttggaggtctgggtgaactatttattgaaaagatgagggtattgttttcgagcgattgatttggtgaacaattttgtcgttgttggcaatgactttaatgcttcataacatacgaggattgtttcgtcaaaaactttcgggatgtttggaaatgtcttcactgtcctcgttctggtttggaccctttgcacaacgggagtttggtcatttttcgtttgtgagagctgtgttggaggtgccaatcagggctgcatttttctattttttatttaaagggctacccgtatttcgatttatttaagaattaaaatagatttataattttttatttgttgttgttaaggctatttgggtagttcgcctagaaaatagaggcatcacttttttgtcacacctatttctcacgcattttatgaaaattcataaaaccttagccaggtgaggggaggaattccctcccaccccctcccccgcccgaaatgaaaaattaaaaatttttacaggaaaaattgtgactttaaaattttttttgtcgatttttcttaataaaatcattaaaattaaaaaaaaaattgcccgtcggcacctatcggcaccgccggaccacgatttactcgattttaccttatttttttaaattttgactacaaaatggcaaaaagtagtcttttttggctaaaaatggttacaattcctgtttttgctgtccggcgctgaacttttttaaaaaacactaaataaattttaccaaaaaaaattcttcggattcccccttaatttttttctggctattaaaatgttgaaattatatacatatacataaatccgattataatgatcagactttcaaaaaattttcaaaaatcaacccataaattcaaaaagaatgatttgatcagacacaaaattataaattttttgtaaaatttaaataaaaaatgaagaaactccatcaagaaaatcagttttttgatttttattaatcactatttaaaaatttttttctanaattctgacaaaaattgatttttaaaaattacggattattacgggaaattacggggtttttggaccccgtaattacggatttccgtaactgagaaaatcg

SEQ ID NO: 2487 - DNA, 861 bp, Heterodera glycines
cgcgttccgataggcgagcggcattgctttccgggaggccaatgaacaccaaagtacgttgacgttcttgatctgcgagtgcaacagtgtttgggtccaggtccagtgtagctgccattaaacgtttggcgcgaggcggagtgatgtttgttgcgttggttcgcttcatgacgattaattgggaaagaatatttgttttttgcgatcttaaggactacagaagagccattttgtgttttcatcatcccttatactctatactaagtgagaggaagctccgcccctttttgcgtttttgaatttgcttggcgttatgtttttagaggaagagaaaaagaataaaaatattatttattttgaagagattcttccaaatgatgaatagagaaagcatgcatatggagagagagtgcagcatgtttctcagtatgcgcgtaaattttggttttattagttcttaagtttttctatttgaatctgacgcttgtacaagaactcgtacgaaaatgtcccccgtacgaaaacggcggtacgaaaacgacccccctgcggtacgaaaacgtccccgtacgaaaacggcggtacgaaaatggtggtacgaaaacgaccctgaccgtgaaatgggtgtgcgggagtgggtgggaataaagaagtgaagataattagagagagataacgagagagggagacatgatggatagagagagaaaggaatgacgggtagagtgtcagatgagagaaagtgagatagaatgaaatgaaggaaaagaaaggcagagagagcgagaaagaagatgtgagagagattgacggagagaatggaagagagagagaaggaatagatagagagaataaggtgag

SEQ ID NO: 2488 - DNA, 6185 bp, Heterodera glycines
ctttttttggctcgaactttttttatacggaacgaaattttttggaattttgcaggctaatagtgcatctgaagggctttcgaatgataccaagaatgttgaatttggttggcaaagaaaaaagttatagtccaaaaactccgcccccacgcgaaaacggcccacgcgaaaacggcctggcccgaccaaaaaagccttccaaagtggcggaatttacgaaaagaacaaagtccaaaaaccaaaaaatgtcattttatcactaaaaaatggaaactttggcaaatagtatgtatcattgcgtccaaactctacacaaattctggttattgctgcttgagaccaaggaattctcgagaccgacactcggaaagtcttgacataatgcaaaaagctaattttagcgggtaaactttttaaattttaaaaaatcgcttcattcaattagtggtttaggccttagaaacaaacttccatcgaaatataaaatgtatttaatgtactaaaatagcaacaaaaattgtgcaaaaactgtcgaaactataaatcttttcgactgtaaaatttgcaaaaacggtccaaaaattgcattaattcgatcattcgattgacttccaaaattaaacagaatttctaatatacaaatcacaatagttaaccgtgacaaatttggaaacaccaaaaaggcacaaaacataaaaattaattgcattttttgtttctgttttgtgcctctccaaatgcgcaccttatagagtcgggggcgtttgggccccagtttttgggcccccgcgtttgggcccccgtttttgggccctcgtttttgggccccagggtcgtttgggcctcagggtcgtttgggccccagggtcgtttgggccccagggtcgtttaggccccaagtacagaaaaatgaaaaatcacagtaaaaacaactttttaaatttcagcataaaaatgtaaaataaacagtttaaaaataaattcaacaataattttaacaataaaaaatgtaaaaattaacagaaattcacgggttcattcgatagttgcgagaaattccccggagaaactccaaaataatgtgaaattgattgcgattgtggtaattgtgatcatggttgatgttgcctgcattcatcgggacgtaaaggggcctgggctgtccaacgtaattgattaatagcctgtaaattcagtggggtttaaatttaaaaaaagttcacacaccagtcaatcagcggttggaaaaccgccaaatttccgaactccgtatcaagtgccgctaccgccattctaatgtcacacaagggcacgaacgcaacagacgtgatcattcgagcgttctcggcaaacacagaatcggtgcagtagcgctgaaacgggtcggggtcacttcggcgccgcaataattaaaaaaaaaattattaaaacctgccacaaattttgttccttcaatttcttttgcaaatttcgcacaaaatggaagaaacaaaaattgatttgacaccctccaaatacagttgtgaccgcattgctcacggccaattcgaaatcaattgtgaatgatgtaggtgcaaatgttggccatgcctgatgtaggagctcaaacatacgaatgtatgacgcctgcgacttcgatgtgagcagaaaatggcacactggtatgatccatttgcctcgtctaaacattgcaaaataaaaaaatttctaaaaactaactaacctagccaaaattgtataaatttgataaaaaagtggaggcgccaatgaaaaggtcccgtcaccgaagcaagcttccattcgatctgcccaccggccaaatgactcgcgtccgaacaacaaaattctataacaaaagaaaaataagaaaataattgtcattttacctctgtgggttctcatttcctcgttcataatatacgccgctgtctcataacaggaactgttcatcgatgccgtccgtcggtgtgtacgtctgatacgccgggctgattataagctgctcaagatttgcaggaacgacggggggcgcattcacttctcggcgagctcttttgattaactaaattggaattgtttttattatatgaaaaatattttgttttcacatcttttgctgcttgttttgacaccaaaattgccgacggagacgggacattttgaagcgcttctgctctgatgacagaaggcggttcgaaggtggcaattgcgcgccttttgattgcggtcgtgaccatttgagcatcaacacgtgacgcatctgctggacatgtgtgcggagttgcgaggcgaatgaattggtcgtggaggtccgtccagattcggccgttgcatttgtcggtgctgtttttgaactcgcatctccaaaattttgtcatcccatcagaactcattttagcgaaggtgtaaaggtggccttcgtaagacaattttactttttgttttttggttgcaattgggttagccatttctgaaaaatgtccaaatcagaatgtacatcaaattggttaactattaaaaaataataggatttggaataagtaaaattgtaaaaaatgagcgaatgttaattaaacctaacttatgccaagtggcgagggatccctcaggcttagtttttagaatcttaatttttaaaaaagcacatttttcgatttttgggttggggcccaaacgaccccggggcccaaaaacgggggcccaaacgaccccggggcccaaaaacgggggcccaaacgcgggggcccaaaaacgggggcccaaacgctctggtcccccttataaaaaggaaagggccaaatgaataaattcaaattcaaattatcatcaaaaatcatttttaaaacaattttttaattctctaattaattaattaattatttcaaaatgatttcttctcaattttcccccatcgttttgctgctgcttctgctcacttttctgctgcacttttcttcattggtcaatgctcgtccccaatcgtattacgctgacgcaatttcgatggcatacaatcgcggcacaattttcgacaatttgtggggacggaagtgaagcagaaaatatcaattgccattggtgcatattattgtaactttactgttccatttgtttaataaatttacttttaataaaaatgttttaacaagctaagccacggatattagcagccaaaatttttatgaaatgctaatggttagtgatgctcgggaccaaaaattttccgagacataagatcaagacttgaccccaagactcggcctcgagaccgaaaaactcgagactttttacaaaaaattttcttattcgcttaaaatcgtttaattttttttgactcttttcttaacaaatttttcgttttaattttaattttgattcaattaggtatgtactgtatttaatatttatcaatccaaaaaccacaaaacaaagtagtttttttcacagtttttagttttttttttgatttgacctcgctaaaacaaggacaaatccgagctgtgagaagaacgtcaaatcatttaaaagtaacacaaaatcgaaattgatctttggcttctgtttttctatgatccaccgccgttttctccttatttctttcctttgccgcaatattggcacaccgcttggcagtaagggattttacagtcacatccattgccagggcatcggggagaaatagcttaaaaatgtgaaaataattaccggtacggcgcatttcggcattgccggactccaaaaaataatgtataggcattaataattccatttttaacaggaaaattgtaattaattatccaattcggatattgccatgttccgtcgtttttgactaatctttcgtcacacatttgatcaaaaacaatcaaaaataaatatttttggctgatagcccaaacaaataaatgcattcactccattaaaatgtaaattcaaaaaaggcttgagaattttcaaaaaaaatgttgccgaaaagcttctttgacttggttacttctttgaaattatggaggattttttttacgaaaaaaaaattccaaaatggcggatttatgaaattaatgaattatcttctcaacacgtgaatctcattaatttaattaccacgcttaaaacggaaaatgcgtttgtctccagcagctgctgccatttgtccatcttggtcatccacggtggtcgcattgtccgattggatcgtcaaagttaccaggagaagagtgatcaaaaatgggacagcgaaagaggacattttgccaattaaagttaattagtgaagaatgaggaaattaacggcaaaattaattaatgataaataccaataaataaactgatcacgcaatgatttttcagcttctttttatatattgcacatttgttgataagtaaatgtgtcgtaaacatgattgattattgtttttcttaattgccatctcaaagaaaaaattttcaaaatcgtaaagtaattaatgacgctcgtactcccgaccggcgaacaaatattttaatttcattgataatttatttgcaaaatgaaaaatttatttaaaaatttaaactgcgaggtcattcaatggttttgtgtgtaattttttgtgaattttgcatttatccgtactgatttgtgagtgagataaatcgcttttttggcgttttcccaatttctataaaaatgtaaattttggaactaccaattcagcgacttttctgttttgggatccggttttttattatcaaattgaaaattatttctttggttgttcgttaattatctgagaattctaaaatgtcctaaattacaaaaatgttccgaatattacaaaaattttctgctttttaaaaagccaaccagaaaaatgacaatttattttttcttcatcatcagggatgatatgtatagttatttcactatttttttcctgagctccctatagcctgaaacgcacgaaaaacatgtttttttcggctgttgttaagctactttttgagttattagaaactattttctagttttttatttttagcaactaaaaaactataaaaatgtgatgtcgaacgatcttttcaatttacaaatctattttaactgataatcgctcacgtctatctcccgaacaactcgacatgttacttatttgcaacgtgaatctcaataatgatttggattaatattgtttatttttgaataaaattttgttattttacacccctaaattcggaagtttttagcaactataaatatcatccctaatcatcatacattaatctatttttttaaattttccaatattaaataaattctgccaaattgtgcattttatttgaaaaattagtaatattttaaaagaatgcatttgaaattgtgcctattattctgttcaatattatttttgattatcctaactgatccgatcgaagcagaaaataaaaaattggaacaaaaatcatttgaggaaatatttggagaaaaattggaagaaaaaagatatggagaaatttgtaagaaaattggggtttgtcttaaattaattaaaaaatggaagaaacaatttggaattagccaaaaatttgcactaattatttctttgaaaatcgtgactttttgaacttggttatataaaaaatttttattatatctgcgaaacaaatcaaattaattaattgataaattaaaaattatatcaaaatcaaaaaatatttatcaataatataaaatgcgataataataagtattattcaaaactaccttataaattagctaaaattaaatatggcctaatctgttttatgcaaatcctaattgagttttccatcggaaaattgtgctattactaacacccaattttcgcgcaattattttttcaattgttcttgtggccttctggttgaatttgttcgtgaatttttcttttattttttcaaattttgcaattaccgtattttctctttttatagacacggggggataaatggagaaggggggattatttttcgacagatttattttgtataaaatttttgatattttttagaacatgtcgccaaaaaatgtcatcgagtcaaagaaaaatcatttttaattgcattttttaaaataaattctgctttttctattttttaactatctataatgcacaaaaaatacattctttttcaaaaaattttgttttagcgccactttcatcact

SEQ ID NO: 2489 - DNA, 1706 bp, Heterodera glycines
  unsure (1)..(1706): unsure at all n locations
attcatttttagcagttttggaaaaattaaaattatgtaattcaatcaatttacaaattccattatttggtaatttagtgaacattttgcatttttgcccgagttttccataaaattagagtaatttttaaatcgaaaaaaatttcgataattgaaaaaagttagttcatcttaaagcacaataaattttaaaaaatactgatttttaacaaaaaaaactttaagtgttcaattaactaaatgtcatttaatctttactcggccattgaaaatttaacaaatcagacagtctcggaagataattcttatttaaacaacaacaacaaatgtcgagaatttagagcggcatcggcgcttttgaaaaaatgggctctatttagaaatccgccgggaaacgttcgtccaagtactgtttaatgtccaacagaaaatgtctgaggttggtacacaacgccccaaactccgacagaaatggctgatgctcgcgacggaagctaacactgaccatggtgtaatcctgaaatcaatgaaggcaattaagaacgaagtgtgcgcataattacagacaaaaacgcttaaaaatgcataggtaaacgaccgcctatttacataaattggctcaaaattccaaaaatttgtcagcaccgcaaaaaaaaacaaaaacaatttttaatgattttttatttggaataattcaaaattctaattaccgcaacttataattttttatcggccaaatgctgattttataagcgggatagatacgtactacgtaccccgctcccaagaaagttttaatgacaaatttgattaaaaatatgcagtgcatttttgtcattttctggacaagttagcaaataaattggggctaaattaaaaaaatttatccggcgccgcctaaccatactcgtgatttttttgaacaaaacacagcacgaacatagatttgcgaaaagtaataaaaaaaatgtcgaatttcgagggttaatcccattaataaatgtgatggctgaccacccctcgctgactttgggttcgaatatggaacacctgcgcctaaccctgtttttcaaaactgaaaataaaaaattctttttttcaatataacacactttgctgccatcgaaaatcgcatgcagaagcagtgcaccataaatgtcagccatcgtggccgctgcggcattcaatttcgcacagagcagagaattctacaaaatggaacaaaatttgaatactttaattaaaatggctttcccagtttaacggtcatattaagaaagaattgccgtccaaattctaaagtgccaaaaataataaaattaaaccattttccaagaggctaaaaataaaaaaaaaattatcaatttaagaagaaaaaatatatgaccatattttaagaaatgtaaaataaattaaattccggacccgggatcctctcctggtcccgatcaaattgataaaaccaaaaaatttttctcgacgtcgcctacgggcaccgccgtccaccaaaatccantggtggtttttagcgaacaacggtcagaaatttctgctttttccaggcattgaaaatattaanaaaaaactgggagaaaaattanaaaaattcaaaaaaatcgtaacaatccaacgtacanatcgcgattgtcatataggggggggggggtttgtttttgtcaatcacaatcaaaatttgaaatttgagg

SEQ ID NO: 2490 - DNA, 5975 bp, Heterodera glycines
atataacacactttgctgccatcgaaaatcgcgtgcagaagcagtgcaccataaatgtcagccatcgtggccgctgcggcattcaatttcgcacagagcagagaattctacaaaatgaaacaaaatttgaatactttaattaaaatggctttcccagtttaacggtcatattaacaaagaattgccgtccaaattctaaagtgccaaaaataataaaattaaaccattttccaagaggctaaaaataaaaaaaattatcaatttaagaagaaaaaatatataatgaccatattttaagaaatgtaaaataaattaaattccggacccgggatcctctcctggtcccgatcaaattgctaaaaccaaaaaattttctcgacgtcgcctaacggcaccgccgtccatccaaaaatcaatgtggtttttagcgaacaacggtcagaaatttctgcttttttccaggcattgaaaatattaaaaaaaaaactggagaaaaattaaaaaaattcaaaaaaatcgtaacaatccaacgtaccaaatcgcgcatttgctcaaatgggtggttgtttttgtcaatcacaatcaaaatttgaaatttgaggagataatcagccggcgagtccgtttcggcgaccacaaaatacttggccgcaatgtccagcgtgtggatcgaaagaaacgggagacagttggagtgaaggcgcaacagaattggccatttttggagcgggtaaagaagctcacatttgtaagcattttcgcgctcctaaattaaagattagtttaattcagggcttcaatctgtccccatttatcagagaaatgtcctgatttgaaaattttgaatttttgaccccgattttgaaaaattttcgatcgaaaccctggtttaatataataattattatttcctaataatggaaatccaaacaaaatatatatagaaaataatgttattatcatttaaatgaaaaaaaagccattcaaaagattaaatttaaaaataaaaaaggttgcagtcaaaaaaagtttcttaaaaaaacaataaaaaagtcgcacttgaataaaaataattaaacaaattggggctgaataatattaccacacgattctatatcaaattaattctaacaaaatactattttctaaaaagagcattaaaaaagccaacttaaagacaaaaaagtgagttttcccactgaaatatttaaaagtcgtagtgaataaaaagaaatcaaaaaactgaatttggctgaataataatgccacatgtttttatataatataaaatttatttttcttattgcttttaagggaaataaaagcagcataatttcgacgttaaagataacgattttcacttacaataattgagaatggctttcgccaatttttaatattttttctgcagacaattaaacggtaaaaaattgcgcttattctcaacaaacgctttacgcccaaaaattttagtggctccataaaaaggagaagctcattaatgagttcggctggaatacaaaagcgcaatttctgttgtttttgtttcgttttgtcgtagcaaaattgcattgttgttgttgtagcagttggaatttttggcttaaaattgttggaattcgtcaccatggttacttggtattttagcaatttctttaatatgtgtcctcccccatatcagtgccaatgtaagtgttcattaattaatcaataataactgataaagaataaacacagacagtcttcaaagacgaagaacataacagtagcaaattgaacattacaaaaaacattaatttccattatattgacactcactaacgacatatttagcaacataacagatacagccgaattacaaattaatgtttaaaatcaaagcaataatgttagagacacaattggccattgtgagtaaatataattaaggggggggggggtcggagacgaaagattatgaagtcaactttattcttagttcataaaattttcccatatattttaatgtgatttcttaaaaattttcgttaaaatgatctaattttgcgatgttgatccattttttttaatgaaaatgaaggtttttggcaccctctgaggaaattttttaaccttagatttccaaaattttatctagtaaattttttatgaatttttgttcataaattcacgaaataaaaggaatgggcgaaaatttaacattaatctttaatttgaaaaaatcttagaaattgtttaattattttgccttacgaagacgcctctctctctattgccccttcgtctccgatcttttcccaaataagaagaatataaacataataattcggatgtgtatttttgttaatttcttatatgtattgtaaggtttattgaatcgaaaaaagcataatcgtcaaagtaaaattgtactttatagtcaaattttaaaaatgtattaatttaggccacagaatcttatattaatcagtgattaattgggaatttttgtggaacaagtataattagagaaagtgataaaatatggagatatcataggattgcaccacttaattgagccttccaaagagcattaattgaaaactcatattcacacttattaaggataaaaaataaagaaatataaagataatttcgctctcaatttataatagaagaaaatgaacggagacaaaacacgaagatgacgaaaatatcaaactataaaaaattaagaagagttatttgaaataatatttgttagattttgcttgtaaattagagtaaaacagtacttgcaactttgaaaatcgatcttgacctttatttttatgatattaacaataaaaagaatcagatgaaaaatagaattatgaattgtcaaatttaatgacagagataatgcggcagaaataaagattcaattctggacaaactcgaaatgtaaacaaattattctatcagaatggcttgttttaaataagcaaagggcaattaactaacaaattaattaaatgattgggtatttccttaagaaaaaaaaacaaaaattataagagcagaccagaatactaataaagataaagacaatttcatactttctaaaaggtgggatttaaagattattaaagaataaacaggagggaaaggaaatgacaatgtgtagatggataaaagttgttgtggtcgtgttcaaaaataaaacaaaaaatgagcactattaaaataaacaccaaaaaacaaacaacaaaaagcgtgctaatacaaaatgcttgtaaacttttgagccttgccttaattttataaatcattcataaaataaatttaaattatatatgctatgtgaattacatgggaaaaattaaaacaataacaaagtcaaaaatctataaggtttacggagtattcttgcatattacattataaaaaaattttatattttggtatgaaaattaagtaacaaatttattaacaaaaaaacaatttattaacactagttagtgtttgaaatttaaacccaaaaagcggaccttaaagttgatacatgtaaaaaaataacatttagtccaatattaaacaaataatttgaggaaaaattgcatattcacaaatattgttcaatgttagcgattaaaaaacaatatagtcatttttggcgatatgttttgtcactctttgcttggtgagggagatgatacattttcaaaaatcaaaggagagtttttagggctataattttcaaaaatatccatgatatcagcggaccggaataagggaaaaattgacttaaaatgaattatatgcgtcatggacgcggacaggtagccaattatacaaaatcggacgattccgaattctggtcaattgggctgtaaattaaaaaaatttacataattttcatgatttttggaataaaaattcttagaaaacacaataccgtaaaaacggcctatttaggcttaggaaaacttttaggtatttaaaaattggttttaataaaataatgttttttcgaacgatacttttcaaggacatataattttgtcatcgaagaacgaataggaaccatgtatttacattttcatccagcaaaaacatcattttagaataattggcgaataatccgatttagatttagttggcaaaatgccatttgtgaaagctaagtctgggtggccggcgacaatttgatacaaagttacaggcacaagacaggaatcgtttgatacatattttagacaacacacatttttatgcattattgcaaaccaaaaggtgcaaggtaggatatttcaagccgagagcagagagtgcaccccaattccatgttcagccccccccccccccccacccctttcccccaccaacttcaacggttggagtgttcggttgcgccattttgtaacagtttgaggacaaagtctgtaataaagttaaagtgtataggcacactctttttgggaaatgaattcttaccaataaaatttggtagctctttaaagcaaggcaaaaggcagcaaataacaggcttaaacaattataaaataagcaaaaaaaatcattaaaatgaaaaataaaagcgcataaaataacgctctaaacaattaaaattaaaaagattgtgcaatttaagggagacgcaattaaacaaagcatttgtttattagcattgaacgcataaaatcatttctgagtgtcgaccaacaacatattgtagtacaatcaaattcgccgttttgcattgtctgactcaatgttgtgctaaaaaatgcaaaaactggaagagaccgtttacgaagttaataaattattacacttagcttcaaaataacaaaaaaacgcattattgatcaaaaaataaattttgatttacaaacaaaaaatgacgaaaaaaacaaaattaagagaaaagttattaccaacggcgccgacccggtcggtgacaaatgttcccgtttccgctgctcgcggcggcatcgtccgacctttttttaaattggttgttgccgttgccaccgccttttcatcgatgtacatctccaactcctacaaatgtggaaaaaatacaatagttttaaaaaaaaattttataggtaaacatttgaaaataaaattgttttattagtgactaacacggcgaagaaatttgcgggctcatctccaacatccgctcgttgaccagcatatagcccatgggatcggaggacataatgacatcgaccttggaatataaagaaaaaaaataaatttgatcgaataattttcaaaattttagactgaaaatttttttattttctcgactgttgaaaatgcttattttactggcgaaatttgtttaacaaaactctcgaatatatctattttccaagtgaattttttaaataacacaatagattttcaaaatgccaccgaatttttttccccgcaaaatttaatccctaattatctgctctgggaatttcacctcctcaattttggcactcatcaccacatcatagagctgaatccatttgcgccagccaattcctcaaaaaacaaaaaaaaatgaaaaaaaaatttttttttttttactcttgtgcagccattagaggtctattttcccaaaatgccaccgaatttcgatgcgaatttttttccccgcaaaatttaatccccaattatctgctctgggaatttcacgcctcaattttggtactcagcaccaccatcacagagctgaacacatggcctcaaccaattttcgtaaaaaataaaaaaatttttactctactgtgtccatacattgaggcctcgactttgaaaaataaaaaaaaatgaaattttgaaaaaaaattattccaccaattgtgcagcaaaaaagaataaataaagagaatcaaaataaaaatagtctttttgtagaatcaaacttttaaatttctatttttacaaaaaatattaaaaaattttcaatttttttctggagttcgaataaagaatttttttatataaaaaaa

SEQ ID NO: 2491 - DNA, 4162 bp, Heterodera glycines
ctctttttgggaaatgaattcttaccaataaaatttggtagctctttaaagcaaggcaaaaggcagcaaataacaggcttaaacaattataaaataagcaaaaaaaatcattaaaatgaaaaataaaagcgcataaaataacgctctaaacaattaaaattaaaaagattgtgcaatttaagggagacgcaattaaacaaagcatttgtttattagcattgaacgcataaaatcatttctgagtgtcgaccaacaacatattgtagtacaatcaaattcgccgtttttgcattgtctgactcaatgttgtgctaaaaaatgcaaaaactggaagagaccgtttacgaagttaataaattattacacttagcttcaaaataacaaaaaaacgcattattgatcaaaaaataaattttgagtaacaaacaaaaaatgacgaaaaagacaaaattaagagaaaagttattaccaacggcgccgacccggtcagtgacaaatgttcccgtttccgctgctcgcggcattggttgatgccgttgccaccgccttttcatcgatgtacatctccaactccatcacattggcttggcttacaaatgtggaaaaaatacaatagttttaaaaaaaatttttataggtaaacattggaaaataaaattgttttattagtgactaacacggcgaagaaatttgcgggctcatctccaacatccgctcgttgaccagcatatagcccatgggatcggaggacataatgacatcgaccttggaatataaagaaaaaaaataaatttgatcgaataattttcaaaattttagactgaaaatttttttattttctcgactgttgaaaatgcttattttactggcgaaatttgtttaacaaaactcttgaatatatctattttccaagtgaattttttaaataacacaatagattttcaaaatgccaccgaatttttttcccagcaaaatttaatccctaattatctgctctgggaatttcacctcctcaattttggcactcgtcaccaccatcagagagctgaatccatttgcgccagccaattcctcaaaaaacaaaaaaaatgaaaaatatttttttttttttttactctacattgtgcagccattagaggtctattttcttttcccaaaatgccaccgaatttcgatgcgaatttttttccccgcaaaattcaatccctaattatctgctctgggaatttcacgcctcaattttggtactcagcaccaccatcacagagctgaacacatggcctcaaccaattttcttaaaaaataaaaaaattttttactctactgtgtccatacattaagaggcctcgactttgaaaaataaaaaaaaatgaaattttgaaaaaaaattattccaccaattgtgcagcaaaaaagaataaataaagagaatcaaaataaaaataaaaatagtctttttgtagaatcaaacttttaaatttctatttttacaaaaaatataaaaaaatttcaatttttttctggagttcgaataaagaattttttatataaaaaaattaagaagtatagtttatagaatcaaaaaattgaatttgatcaaaaatgccatacaaatgcctttgcgtgggcaatgacaaatttgcgaatttttcccgagcgatgcttaattttttcatattttttcggggtgaaaaattttttttttttaatattacctatatattttttgcaacaacgaaccttcccagaaaccgtgccaatttttgaaaattggccgctgatagggaagcggcggttcgggtgattctctgtagcatgttctgctgctggaacagcaagccacagaattgaaaattggtcggtggaatctgttaagaaattggggtggtaaacattaattttaaataagcgtttttttgcaatttaggttatttgtacttttcggttttgtcaccatgttccataaaaatttacattaacgacgatcaaaatatccaattcataaattttttaccaaaaacctaagaaaacaaaaaatttaaaaacaaaattttttttggggggggggggagggggtgtttcagccggtaaccgcgcccctcccaaaaaaaggtactttgtaagtagatttttggacattatatggctcaatttgtaagattttgcgggttccaacaaccaaagtgatacattacgatcttgtcggaacagcgagcaatttggaaaaaattgtcggcggaacctgaatgaaaaaaaaattttttcatgaattaagtggtgggggtgaaaaagcgaaaatttttttacaataaaactccaatcattactagggctgggaatcattttgtaagattttgcgggtcctagcaacaaaaatgatacattaaacgataaatgaaaagcttgctcggttctcgagccaaactccgagtgcgttatatttgcagatttcaccatcaccactacggccgtcaatgtcatcgtttttcgtcccattttccgctatttctgcagtggttgtgccgaatcgccgtcggcactgtaaacgttgatgccgtcacatattcgttttttgcagccgccgtagcccgtcgttttgccagcagcggtcccgtcgccagcgccccgggacagcggcgatggactgacgccgcaaaacgcgtccaaattggtgcgaaatgtggcgctcttgggaaaaccaaaagagccaccacagaacggagttaggagtcaccagcgaatggggagataaaaattactaactttcaaacaaatcttaacaaaagttcattaaacattacacagcaaaatttgtagtattttcataattaaccaccgatacaccacaagtaccaaaaaagatttgttttctggaaaaatcctgatccgggtcagtcagtgttcatgtctaatttgttaccggatcaggtctcctgaaaaggatttttaatcctgaattccgttccgggtcaaattccctaatgctggttcagatttttataaagtcggggttttagtaatgagtagagtaaaacaatttaaaaaaatgatgcgaatgtatggaaagaatggtctttggtaagtgttttgttacacaaaaatcagcaaataaatcaattacttctctttatccctcacctacacatttgaattcattcacatgtacatatatcatcattttgacaaaaattgcctaacattataaaaaaaatgagtattgaaacgagggcgccaaattcaaaaatctttttattcccaactgatcaaatctaagcaaacataattcttagtcgataattggtgtttgaaaggtttatctgatcaaaaatattaacgtgaacaatattttaacaaaaccggataataaaactaacgattcctaacaattgttggtcaaaggaaaccgatttgtctgtcgaaaatagaattgagcaatgtctgatgttctccgatcttcagcagcagttcgtcgcccttgtaccgcatgaagcgctcagactaaaacaaaaaataggtttttgaactgtgaaattgagtctgtccaacctgcttgttcaaaacgtggtgaaggtgttcgattccctgttcactgatccatgcgaaccacccccaacgcttggcaaagtctggaccatgggcgagaagccagtgtaattttggggtgaatccagcggcattgtttgtgtcgaatttagccggatgagtttcccaaagtttcttgaaaaggggaaaatgagaaaaacagaaaaaaagtatctttgccttgaaatagccattgagcatttatttgagaaattgtcgatttgttcttgggtcatcaggtcagcacgtccaaaaatgtggagctcccgaatttcgtcaaggaggtcagcaatgtccatcgaaaacggtgttccgatcgagctgatttcggttgaggcgagaaggaggcgcttcatgtgatcacctaaaattaatttgaaaaaaggaaagaggtgaatgtcaggaccagtatactcttgcgtcttggcatgccgaattgctcccgattttgccataatttcttctaattgacgtttttctacgggtgacccatttttttcaaaaaagtcaatgcatttccgtccggcggagtgaaatgtgtgaaatggtgaaggaatcacatttgtcggtggcacgaatt

SEQ ID NO: 2492 - DNA, 4520 bp, Heterodera glycines
ttaagcgttgggagtatttgtttttaggcgaaaaaatccctcttgaggaaaaggaagatataattaacaaaaaatatgaactttgtggtaaatttgggtgtatgtgctgtgtgtatgtgttcaccagtacgtgtgtgctgatgatgatgatggttggctgcactcaccacgcccagtgttggtaatttcgtcaatgctttcataccatttgcagcctttaccgttaaattgtaaataggaagagttggaagaatgtgaagcttcacttttggtgtcctcctcctcctgcgcctcaatttcagtgaacaatcgaccaaataatcgccctccctttttgtcgtcgacaatttcaagcagttccatcggataataacggtcctcaccacgcgtaaagccttcaatgatgcatggcacataggggtagtgcaatttgacacggtgacgagcgtaaaaatgcgctgccacgttaatgttgaacggcttacgcagacgtccatatgctggttcaaatgccgcgcctcgttcagtcattccaccaacgaggaaagatttgcgcattccattccgatccttgtatgttgtctggacctttttcccaatcaattgctgcaaaactcggactcggtcctctgggtggttcagtcgatcgcgaagtgactttgtcgggcaggagagaaattgagcacaaaattcgctgacgagaaccatttcagattttttatgcctgaatgaagaaattcgagcggcttttataccggtgttccaactcaaatggataagctccgcccctttttattttattgcatgcataattaatgaatgggaaataaagtacgaaaataattaaacgttggaagatgtaacttttaggtagaataatgcataattagtaggtggaagacacaattttgaaaaaattaagaaattgaaaatataatttaactgttcaacattttatttagcattaataatgaatacatgtcagggtttgaacaagttttgagaatatgtataaatttatcgaatgattttccatgggacatgtggtaaacaaagacaatacaatggggggcacatgttgatgtcaatggggactggtaggcttcaatgtttttgtgtaaacctttgggaaaattatttaaaaaggatgatgaaatacttggtggtatgggaagggcaaggctatcaaagtaaatcacaggcacgtccaagtcccgggcataaatggcacaccaatgggagccccctttgtgatgggggtcacggttcacaatgagtgccgcaggatactgtagggtggccggcgaaggcaattggtcactggcgaaacatcctcgaaaaatttgtgacgtccgttggttttctctcaatattttggtgatttgtgtgctgtccattacgtttcaaccaaaaaacagagcacaattggtgtaggaccaaactgacgataagcatcaaatacagagccaacagtgcccagcaaatgatttgttggaagaaattattttcctttgaggagtctttgcacaattgaatcagtggaggcaaaattgaggacacttgttcatctatcagcttctcttgcttagggggttgaggatgggttgttgtggtggttgctggacttgccagccgggtcgaagttgtactgggaagtcgtgtcaataatttgcgtcttagatactctgggacacgcgttgtactgggttgagggctgcttttgggccagcccatttttagtctttttatatattcggaatatgatgctgatacctcggttgtttgactggacacaacatcgaaattaattcgaagtatgaagaaaataattccaacatttttgtaattcatctttattcaaatgatagtggcatacaaaaaaaaatgacagccttaaatagtaatgtctgtgctaattgatcgatttttgtctaacatcacaagagagtcgcattcgcccatcaccaccagcattatccccccggtgggcactgcctggttgaatttgatgctcaccgctgttgtcccgttctttatcaggtcaaacagcgcagcttgatcatctccactgctggtcaaattgaacacataaatgcagtgggtttttccgaactgttcatagctaattccattgctttccaatgagttggcgaatcccactgcttcgttcatgtcattgaaagggcgaacatatttccaatttgggtagtccaagtcgtatggcgcttggggaaaggagcggccattagcaataattgagatttcgcgcacattaaacggttgaaagttgaacggactgcgcgaaattgttccaatatagtcagaattagccactaaccccattgtgatacggcggggaatttgatccatgaacaaattggctgtaaactcgaaacgtccatgactaatgaacattgatttcatcagcgttttcctcacagcatatcgtgccggtttcacttcaagttttcgcgcaatgtccaacgccagtccatccatcaatgagacttttttcacatacattttcaaactgacaacctcgaagcggtaacgaggagcagctgcagcaccctgggcaacagcgggcgtagtgattaggacaaactcgttgtcgttgggtaaaatttcaatgtccaactcacagaagttgatcaagtagagaggttggttgaacaaatcggcgtcaattttggcaatgaattgcgctgttctgcttctcgcaaacaggttgcgtcgcgcaatgcatccgtcccctgtctcaagcgagccgccgatgtcacggtaatagcccgccgcattcaaatgcgagtcctttgccgtattggaataggacagctcatgtgagaagtatgttttgtaggccattagtgaattggagttgaaaacttcacgtccatttatgctcattttgatgtttcgaatgaaagtctggccgatcatctggatcggagcaacttcgtcagctgcgaggtcaatcagatgaccatgctcattttctttgcgaattcggaattcactttgtaagtagcatttggacaaatcaataaagttttggctggagtgaagcttgaagtggtagggagtgtccgtcagtgggttactgggaagcagctcaaacacttttgatgaagagacgctcacattggtgggtggaatacgaaaaaagtctaaggcattggtgattgagtttgcactgtcattatcaattttatggaaagccatttatttagtaaagtccaaatgcgtctgaacgaatacgtttgtttcctggtttgctgattgtccgtccaattatggtctgatggcttggtgcatgagatttctttctttttatactctttcttcgaccaccgccaaactgttttggcaggccgcccttctcaagtaccgtatcaattcctttctttccctcgctgacaaatgcctccttaaatggcactccttcgtttcccactctctccagcactcgctgccccgtgctcagtgcctccgatcctactgtagtgccaacacgacgaagaatgggaaggaaaaagcgccaaagtccgcgaaacacatcccccacccctgcgcctcgttgtccataccctcgttggaaggggctggaccctcggaagtaatcctcgctttctatgccacttccgtattgcatgtactcatcatatccgataatgcttgggtcgaacacaatatgaaccattttatttgcgtaaaatgagtgaatgaatacaaaaatgagtgggttttaaaaatttatcactttcttaaatattaataccaccatggtcgtgccataggcgaatggcaccagtcgtcccttgtccatcgtgcgcagctcaatttcaatttcgctgatctcccgtggcagcactcgagcgtatattggcgaatcataaatcttctcattgtagtcaccgggtgtggcaccgctcaccgacaccacgcgaagcagcgaactcagcgaattaccaacaatcatgttctcggtcagtccttttgagtagactgcgaaacttgagaagccaccccgtaagtcacagccgtattttgagatttcttgaggcccaacgtgttgggggttttcaaatccaagcacatagcctagctgaggtgagaatgacaagtgactgatcactggatttttgaacaccaccttgaatcgctcaaagtcatcaagatattgtatttctacatcatcgacaatgtttttgaaaggatcatatggccattcggactctttgtcatcgtcgtcgggaaactcgtctccggcagctaaaccgccaaaaaacctatcatccacatccaatctctttgattccttattgctttcgtttggggcttcgactgatcgtttagcgtcctttgctatactctgtggtggtggtggtggtggtggtggtgatggtgccggaattgaagtaggaataggcttaataggaggcgacggtggtttcggtgttgttggtgtaggcccaatctgagggggggaactagaaatagatgttgtagatacggtagtt

SEQ ID NO: 2493 - DNA, 2131 bp, Heterodera glycines
tcccccccccctgcccctcgtgtcccatcccctcgttggaggggctggaccctcggaagtatcctcgctttttatgccacttccgtatggcatgtactcatcatatccgataatgcttgggtcgaacacaatatgaaccattttatttgcgtaaaatgagtgaatgaatacaaaaatgagtgggttttaaaaatttatcactttcttaaatattaataccaccatggtcgtgccataggcgaatggcaccagtcgtcccttgtccatcgtgcgcagctcaatttcaatttcgctgatctcccgtggcagcactcgagcgtatattggcgaatcataaatcttctcattgtagtcaccgggtgtggcaccgctcaccgacaccacgcgaagcagcgaactcaacgaattaccaacaatcatgttctcggtcagtccttttgagtagactgcgaaacttgagaagccaccccgtaagtcacagccgtattttgagatttcttgaggcccaacgtgttgggggttttcaaatccaagcacatagcctagctgaggtgagaatgacaagtggctgatcactggatttttgaacaccaccttgaatcgctcaaagtcatcaagatattgtatttctacatcatcgacaatgtttttgaaaggatcatatggccattcggactctttgtcatcgtcgtcgggaaactcgtctccggcagctaaaccgccaaaaaacctatcatccacatccaatctctttgattcctttttgctttcgtttggagcttcgactgagcgttttatgtcctttgctatactctttgggggcggtgatggtgccggaattgaggtaggaataggtttaataggaggcggcggtggtttcggtgttgttggtgatgattcgatctgagaagttaatttagaaatagatgttgtagatacggtagttggtacagtggacttctttgcgacatttggctcctttggtttagctgccagagttggtggtattttagggatattctgcgccttggtcgatgaagcaggagtcggaatagttgatttagatgctggagtgggtgttggagttggcttcggcacagccgctgttttggacggagaaggcttcggggccgatggagcttgcttaatgggtggaatgggagcgggagccggggaagttttggttgtagcaggtgtcacacttggcttttggggaggtactgtagcagattttggagctgcctgttttggtgcctttggcgcttcagttggaggatgtgaaggaggagcaagtgttggagccggcggtatcggttgcttagtgacaggaggaggtgttgcttctttgacttttttatcctctttctctgtctcatcgaatctggggggagactgaggctgctgctgctgccgtgattgttgctcatctgtctcatcatatctcgggggagagggcagtgaagagagatcatcaattgttgatctcttgaggcgcttggcgtgtggaggcgagccgagcactaccggtttatcgaagtacccttcttcatgcgcaagcggcttaagtctgactttttcttgactcttcaatgttgcttgtaaaaaatccctgagttgctcaacttttttgtgcgacgcctgtgggacaggtactctgatgacacgctgtcggtcctcatcaacggaatggagattggtgaaatgaatgtcaatccattggtcatccaatgtaccaattgtagagtgccatgagtagggatagctgatgctatgcaacccacaaacccacgacccactaaaatgtagaggttttggaagacgtaccctatatttgttcggttgattgtcggggtaatccgatacattacttggcaaaaacacaaagaagctatttgatgtcattagaaaaagatttatccaaatgtaaaaaataatgaacaaactgaatgcttttatacaagctgagattcatcgatccattccctctcgggatagcctatgaattttacacgtatctcaactgacccatcgggttttcttctcttcctgaagaccttctctattcggtagcttgtctcatcatccttacgtacgcgtgccaactcctgctcataaaaagtgcccctgaact

SEQ ID NO: 2494 - DNA, 2820 bp, Heterodera glycines
agcacttgggtcaacctcaagaatttcatcgccgtaattgggcaggtaacccttctcgaactgccccttctctctgctcattcgcacaaaatcgtctttacggaagcggggtgtttttttaacaaacgattgttgtccatacattcgttcccacaccttctgagcattccgaaaattgacatcaattggtcgcatcccgtgaacacgggacggtgcactgttaattccatcaacaatttgctgtacagtatccacccagttgagagtctgcttttccgcaaaatatctgtatagtcgctgcttaacatttctgatggctcgctcagcaactgaggctttcactgacgaatgaacgggctcgtgcttcgcaatctcgtgctcctcaaagaattctttgaccagtttgtttttgaattcagtgcctttgtcggagaatattcgatggggggccatgggcatttgctcaataagctccttgaatgcctccagcatctcctcggctctcttatttttcagtgggacgacaaacaaacgttttgacaggacatcaaccgccacgagcaggtaccggtggcctccattatgacgagaaagggcttgaaaatcagccaaatccacctggacatcggtcatgaatccagcagctatagtttttgctcttggaaaccgcaccctgcgggggcgcatcaatgtataggtgcgatgtccctccaaatatctctgcacttcttcttttcgtaaatgtttaatctttttccgtgcctctttccacagtgctgtaacacctgcaaacgccgctggggaggatgggtcattgtacattttgtcaagagtggtgttaatcagctccattttttcgggcgaaactccttcttgattgcccgtgccgtccgggtggttttgctctgtgatggtctctttggtggagccgtccatgaatacaaaattggatcccgcctaagccgctcctccaataggtctgctcccggtggtttaatggtgggacggcccgctcttcggtctattatatacttgatggccattcgcaaattgctatgcgccaacggcttgccgttggcggtgttaattgtattcacccgaacacccatacgatcggcataatggttacatttgagatataatcgttctattctctgtgtcatggtcagttgatttgacggaatagcaaacagctcacgttgttgttgtcgttcttcttcactttgtgcagatgttgatggccctggctcgggcgagtactgtactcttacccttctcggttgcctcactcgttttcttatgtgcacctcatcatcatcattctgggggtaggtgcgtttggtccccctcctaggcggaggaatatagggcatttcttcgacgacaacagctggaggaggaggaggttgttgttgctgctgctgtaatggcttttcttcaatttttggctcttttttcgggatacggtatggcactggcctctttgtaggttgcaactcatgttttggctcggttttgattttcgggggcgggaagtacccggcttgcttcgatgtggatggtcgtgggtcaacttcaaattttggttcctttttggtgaagtgacgcggaggaggaggaggaggagctagttcaactttcggttcccttttggagacattgcgaggaggtggaggaggggcgagctctatttttggttctctctttgcgcgatgtggaggcaatggtggaggcggtggcgaggcggattttttcaactttgttggttgtggatcccttttcagttcaactttgggtatagaacgaggcggaggagggggatggtctggtcgtttgtacacgggtggtagtgtgggagatggtggaggagaatagtaaattttgtattttttgtttttatctattccctcctctcctttaagctttcttctgcttgcaagtctttgttgggcggtgtccatttcctcaatttcatctgcataatcaggcaatattggcatgtctccataattttgtgatggtgttggcagcagatacccaccttccagcatttgttcatcgtcatcgtcactttcaggtaaaggagcagctgctgcctcagcgagtagatcacgtactaccggttgttgttgcaagtcacgacgcctttgcttccattggttcaaccgaccatgttttatagaagattgatggtttttctttgttctctgaggacgtggtggacgaggggggcgaggcggatgactatcgtcagacgaggaagattgctgatcgggagggctgggatggtgatggtggtattgatgaggtggaggagatggtggtgatggtagtaaaatcctctttgtcaacgaggggcacacgaatttcgaaaagtgccttgccaagcgcagcgcgccgcttcttggcggagcattccgtgccatttcgacggcactgcgcatcggcccaacggagtgcctaatgatgtttaattgaaaaattaatggtttttaaaataatttacagcctgccaaatttccaattctccgttcgtctgcaattggtcacgcgcaaaaatttcagttagaaattcgttgtcaatttgtaaaaagtgttttgagaggaataaatcgtgcgcattttcgtcaatgtattgcagacaacattgagcaaaattctaaaataattttaaaatagtaaaataaaatttcatcatttttatatttgtgttaacaaatccctgattttttttgcaccatttgctaaagtaaattattttacaaatgacaatttaaaatttttgacattaaaaactgcaaaataatccctggtaatttg

SEQ ID NO: 2495 - DNA, 2878 bp, Heterodera glycines
ccgataatcagaaaaaaaaactttagttttgtaattttaataaaaattagtgcaattttaattatttaaaaaaaactattttcccctatttttcaaattacggcaataaatcatttagaaattaactctgtgattttcctatccaagggctaattttatcaagttttggtcaatgaaagaaagtcatcatatctaaactatggcaaaattagtttggcattatggctgagcattttgattttgatttttatgcgcggatggcaaatattagcctgggctatgaatttttttttttccaatggaaatgaaattgcgctatgcatctgaatgttaaatgatgtgtaagatgcgaaaatgatgtggcttttttacatttacattctgcttcattttacgtttttttattgatttgtgtataatctataatattttttatgtataatttgaaaaaaaaatagtaaagtaagcactcgtatacgtcattaaattacaagaatttcaatgcttccttgcttgaatatgtaaaaacttttggtccttaaaaaacgagttcggtaaaagtgaaaaatccggtggaaaaataaattttcaattaaaataataaatttatttcttaaattcattttgggacttaattgaccatcctcggcatttctccatacccattaaaatgccaaaaataggtgcgaaaataggtgtcaaaaattggaaaacattgtcttttgcacaaaaattccaaagtgattaattttttatgaattttttcgggttttgaattttacattttaacgaattttccagaaaaaaacgcagattgctttccagctattattgttttgaccatgtaacattcaaaattaatgtaataaaaataaaaatattaatttttgacatagactctttaaacaaatcccagttaatgctaaagttcaaatttacgtatttcccctaatatgccctctgagggaggggatggggggttgaaaaaagcacggggcttcaatcggaggtaacacagatttcatttttaaagattcgtccatactgtcattatcactgaaaaaacatacgacactgtcgactggttctatgaggttccttcgtgtgatttgcaagtaggccgctgtgctttgatcaaaaattaccgtggcatcaatgtgatcatttttcgctacccaatgggatctgaagagcgtgtcagaaatgcgcacaagtggttgaatcaaaaagagatgcatatcagatggagcattgggtaaaatagaattttaaaaaatttataagattaacccagggttcagatcggacaaactccccttttccaaagacgggtatactggtttccatggacataaggggaaaataccattaatttaaagacatctaaaaattttatcatatgctaagaaaaatgttatattttatccaaacggtttaattttttgccggaatgaattctattgtcattttcctcatgagattcggcgatgccgataggcgccgtcagggggaaaatttggaatttttgtgcaacttagtaaaagagtttgcaccaaatgccataaatttaagttcaaaaaatattaacttttgaatttttctttcgaatgcacattttcatgaacatcttgaattcatgatattttcaagtgagagggacaaattacaaggagaactttgccattcaaggacgaatccgaaccatggattaatcaaataaacaataaaaaaaatctcgtttttcaaggggaaaacggtcctacctcttttctggggtttttattattttttgttattttttacgggttgaaaaacgaaaatgttcaactattagtaccgctttagccaattttgaaaatagcgcccaaaagctctcctcaaattgattgtattgtaagtttttaggtatttgaaaatacccttctaagtgcaatttttccatacttcacaatttaggacttggttcgcgtatggagccgaaaaattgccatctattttcgaaaaaatacaagccggcctgccagaaggactcattagcccgcggcttttttacaacgccttgtttttgcacacgcgcaacttttgggcgcatgagtgcgtgattcccgttggcatttcgtccattccaattggttcaatggaacctgtgcaattcgttgagttttactttactgatccgcagccctggtttgtcaacttcagttaccgaatctatttggttctatggttgttattaattttaaaattattgataataattttcttgcagaagttcatttatgctgtccgattggcttaattcgtcgacattgtgaaatgaaatatggaaatatgtcatttttaattttacgttacaaactttcgagttttacttgatttaaatcgataaatttaattatttttttttgggttttgttttatttataatgaatcggtaactatatgcgggacaaaataatttgtttgactaattattcatcccacaaattcaaaagtgaggattgaaatggttttagtgaccttttttgtgtgcccaccgtctaaaccaagcttgcagccgtaaattgaaaaaaaagcatcgaccatctttttggtgtcggcataatctatggaaaattttaggaaaacagcttaatgataagcggtataatttcgttataaagctggattgataataaatacattgaaaataagaaaatctaaaatatggcgcaaaatggacagaaaaagtcaattctttgaagttttttgccatgttttttactctattaatctttttttaaatggtttcacgccaaaaaagctggcattccctaataaagcgaatgtgcctcgcatagcttagtggtagagctgcccatcgtagtgagtatgggtt

SEQ ID NO: 2496 - DNA, 1688 bp, Heterodera glycines
  unsure (1)..(1688): unsure at all n locations
tagggctgctaattttaggtaaatacctaaaantttttgcacacttaatacacggagataggcgcgaaaaacgagtttttaacttgtttggagcttatatacccacctttataattagggctgggatttttatgtgctaaaaatcctgaaatatgtaataaaatatgtgctaaaaaacccaaaatatgtgctaaaaaccaaaaaaaggcctaaatatgtgttaaaaaatgcaaaaatatgtgctaaaaattggaaaaaccaatggtatttttgcataaaaattccaaaaaactcattctttatcatttttgcccgcacaattgcaaataaaaaacatttggaggtgtttgggggtaaaattagtccttttttgataaattttttttaaagataatttttccatcagttgagtaagtccagcaagaaacttcgatatccagttgtcgccaaaagaaagcgacaaaaatcgatccgaagatcaattttgtgatgactaagccccgccccctctggtcgatataaaaggggctcatttttcccattcgttagcattctattaattttctctgtattaaatttagtttgttcactctcttcccttttttaataaagtctctttgaaagagctttgtgcaattaaaaaggtattttttaaggagaagaattctccgtaaaatcaaaaggtttatttgtgaagagaagaaattcttctctgtcacaaatagaagcaaaaccaggactcatcctttctaagggtgagccaaggaaaggagaagaagcatctcctcttacctttccatttgctaaaagactccccccttttgccgggtgagtcagcttccccttctgccgggaagtacagattttttgcggcctttcgccgacaaaaattggagccccgtaggggtcggcttccagtcgtaagcctaccctccaaccatcgccaatccaaagcgcagccgtagcgcttggatcaaacgcacaacccaaaggggtttattgcgttttcatcaagcgtaagagcaatgagtgagctcttgcgcatttccattgcaccaatggtggtgcgtctcaagatgtacattgagacagcccaagaaaacttgggcaaagagctgacggaccaaagtgtccgtgcagatcttcttgcagggagacaaaatctctgcaaagcaatttctcttttggagaaatacaatggaaaatgggaagccattttcctgagagtgaagggacaagctcttcaagatgaagagcaaaactacagagactttaagcctgaagggaaggctttcatgcattgggtcgaccaagcccgagggcttgtcgacaccattgaaggggccttgggcctctcagagctgggggatgcaattccccagccaaaccagccagcacaagtcgtgcaacagccacaacttgtgcatcagcgtcatgatgtgacgcttccgccgataacattgcccaaattctcgggggaaccccgagagtggcctttattttggaaactcttcgagacttccgttgaaagtcttcagattgaagacttcaaaaagcacatttatttgctgggatgcctcccagagaagtcagttactaggagagcaattgacttgtatccgccatcagatgaaaactacccaagggtagttgagattctgaaaaagcggtttggggagaaaaaacga

SEQ ID NO: 2497 - DNA, 4366 bp, Heterodera glycines
actctggggggcgcgaaggaagcgccttacggatcaagacaggtgtattaattgcctcattatggggcataattcccagaactgcacctcaccccgcaggtgtagtcaatgtggtgaaagacaccattttatggtgtgttacggagaaaagtcccgagagggaacctctcggggccaaccaaataatcagatgaaaagagaggcaagaaaatcctctcaaagtcatctgactatgtgcgagcacgctcataaaagcgtgtccggatcagaagttttcccagatgttgaaagcttatccatcactacaaatgtgatgacaagcgtgatggtgaaaaagcctcacgcatttctaatgaccagaaaaatactggtcagatccaaaaataatcgaagagtttggatggaagttccatttctcttcgacccaggaagtcaaacttcctacgcctcagaccctctcattgagaggctcaagccaccgaaagtgacttctgaagaaatggaagtctatggcttcggaggagagagaaatggaccaatgaggttccattctcccgtgtactccatccaaatcagaagaacggatggaaaatgtgaagaaatcctactcaataggacggaaagaatttccacgccattcaaaatggcagaatggaattccgaggaattcccactcgaagaaatggacatggccgacgctatgcgtttttctcgggaagaacccgaaatactcataggtgccagacatttctggcaattcttccaagcgaagaaagaagtttctccagggttgtttgtaattaaaacaactttgggaccgttggtaaacggagagtccgactttgggccggaacttccgaacccaggattatcaatgatggccattgatgagtccaatcaagggcaaatgcccaccgctaaagaaattgaatatttctttaatttggagtctttgggaatcaaagacgatccaaatgaaaatgatgaccaaacagcaatgagtctgtttaacaagtccatccgccgagataaggacggacggtactctgttaaatggccatggaaggaggaggttcccgacctcccttccaattaccgcatggctttttccaggctaatgtcgacttttggaaagcttcgtaattctccagatttaatggagcaatacgatgcgaccattagagaccaattggaaaaagggataattgaagaggccaggaaagcccctggcactcttgagcattatatccctcatcagggagttcttgccaaaggcaagaaattgcgcgtcgtttacgatgccagtgctcacaccagaggaacaaacagtctcaatgcctgtttgtatagaggcccggtaatactgccggacctggtcggaatgcttatgcgtttccgatgcccaaaattccctctcctctccgacatccaagctgcatttttgcaaattgctttggaaccggaggatagggaagtcaccaaattcctctgggtgaaggatgtcagtaaatcactggcaccaacaaatctgatcacttaccgattttgccgtgtggcattcggagtgatcagttctcccttcattttggctgcgactttgcagcaccatttgaagggatacgattctccagtggccaatgaattggcccaatcattatatgtggataacactcttcttgagtgtgaatccgcagaagaggctttgcataaatatgcagagtctaaagcttccttgcctcattatttgaccctcttggtctaatggggccgtgcattcagcctctaaagcttttcttccaaactctttgggaagaaaagaaaggctggtacgatgttctttctgagaaagaacaaattcaatgggcctccttccaagaaaattggaaggatcagaccctcaaaatcccacgaagagcaatgctgcaagggaatccttcccttcaattgcatgcttttgtggatgcttccatccacacatttgcagctgctatttatctaagagcagtagaagatagccaaatatcagtttggcttatcttctccaaaaataggctcaagcctaaaaatgcttcaaaagcattaacaatccctagaatggaactcatggccattctaatagggattcgcggtcttaaatttgtcgccgatcaaattcggcgacccatttctgaactccatctttggggcgattcacaaatcgctctgagttgggtcgtttccaaggaagcacagccaaaattcattgagagacgagttagggaaattcgtactctcaatgaatgtgcttttcactttgtccgaacagccgaaaatccggcggacatagcaacccgaggcgcaaaaccaggagaacttaaggataagtctctctggtggaatggcccttcctggcttaaggaagaccatgaccaatggcctaaagaaatggaatttaaaataaaagatccttcagaaaatctggaggaagggtctctggataacgaagagaaagtgttcttcgttaataccagaactgaggaactgattgagagtcctctgattgaccccaaaaaattcagctcttggacaaagattgtccaagtgactctctttgtgttaagatttctccgtctgaaattgattcagaaggaaaatccttccaagcttttcgagatccgtcgaaaagaaatcgcaaaagtgtccgaaaagggactattttcagcagaagatgttctcctagcagagaaccttctgatccgcatggatcagattaaaagtgctgaagacttcctaagctatccttctcttaaggatagcgaggggattttaaggcttaaaaccaggttgggaaggtgtgaccaaccttttggttttagccacccaatcattctcggaggacaatcctccatccgagacttaattattttaaaatgccaccagagaaggcttcattttggggtggaaggcaccctcactgagtttttactcgagtattggacacctcgagcaagaactaaggtcaaaaaagcactgaagggatgccttcggtgcaaaaggatgcaggcataccagtttgcattgccaaaaatgcctcctttacctgacgagcgagtatgccgtcaggctcctttcaaagcaatcggcattgactttctcggtccaaccgaaacacggttggccggagagaaagtcaaggcatggatactccttatgacttgcctcgtaacacgagcggttcatttggaggccatgcttgacacaacggccgagtcattcctcaatgttctccgacgtttcataagtcggagaggaaagcccgatttaatttggagcgacaatgctacttcatttaaattggctcaaaaaaccattgagcatttgaccactccagaaagggtggatcaaaatacgcaggaatttttcgcacttaataaaattaagtggcgattcattccacaaatcagcccttgggcaggtggcgtttatgaacgccttgtccaattgtgcaaaaattgtttcaaaaggactttggggagaaaagtcctcagttatgatcaactcataactattgtagctgaagtcgaagccacactaaaccatcgccctattacttctgtgtccgaagggatggatgagttcctgccccttcgtccagtggacttcctccaaccggaagttcaaattcactgggacacaaatggtgaagaattcgatccattggatcgaaatctttcatcacaccaaaaattagttgccctttttcaggcaactaaagaatcccatgaatttttctgggaaatgtggcaaaaagaatacctcctccttctgcgggagagaggtaaatgggaccacaagagtccccgtcttcaggacaaaacagaaccaaaggagggaatgatcgtcctcattcatgaggagttcactccccgaaaccaatggtctttgggaaagatcattgagcttaatggccgaccaggggccattagaagcgttcagttggaactcccaattcatgggataaaatcaaagaggtatggaaccatgcctcggaaaatcattatcacccgtccggtgaataagattttcccattggaagtaggatttgacaatcctacagaaaatgaagaaaaatttgaagagagttcaaatggaactccccaaataccaaatgaggaagaaaattcttatttggaggcaccaattgaaaaggaaactgaaattgttcaattggttgatcaaccaattgatcaaaaccggcatggcatgactacccgcagcaaagcaaagatggggacagttctgaactgtctttccatcctttttgctatgtttgcgttggttggagcttatccaaccaatcattgcaatgaatgcaaacttctttgct

SEQ ID NO: 2498 - DNA, 1890 bp, Heterodera glycines
atcgctcgttggtacaaccatgttcaaacttacgaagatgttgaacgttccacgtaaattttcgtatccgtctttgggcaggaaacacaattttcttcatttaaaaagcattatttaaaaactccagaccaaatgtgtcctcctttttgtttcccctggctaacttaaaaaataccattgtttaaatgaatctatttctcttcaagctggccagataaatcgtctaacattgtcaaggaagagacagcaccaaagaaagacagagttggggaagattcgacgaaagtgacaacccaaaaacgatttgccgagatgtttggtcatttgcacttccacgaggtgggcaaaaacgacacaaccgaaggttatgtgcggacagagaacacagaacgacttctaagagagcacgtcaaagcggtgggaggaaaggttggccatgggatgaaggggaaagggattcccaatgaaaggccaagcccatttggatactgaaactccaacgatatttatacataattgctttttggtaatttcaggttgtcacgcgttttcctcctgaacccaatgggattttgcatatcggacacgcaaaggccatcaacattgatttcggattggcaaaggcaatactaacaaatgacatgaattattaatgacgaataatctttaggcacgtggtggtatttgctatcttcgcttggatgacacaaatcccgaaaaggaggaggagagatttgtgcaggaaattgtggacatggtcaattggctaggtttggtgaattgtttatactctttccacgctgatttaggctattcgccctacaaaatcacacattcttcggattattttgaccaactttacagctgggcattgacccttattcgtaaggtgcaatttgaattcgtttccttttctgtgaatgtttgtttattttcttttttcagaatttggcctacgtttgccaccaaagtacggatgaaatgcgtggctttaaccctcctccttcgccatggcgcaaccgccccatggaagaatcactacgtttatttcaggcacacttcagccgccttgctattatactttttaacgaaattacgaataatttaggcgatgaaaaacggcgcatttgacgaggggcaggcgacgctacggttgaaactcactttggaggacagcaagcaggacccggtcagtcggtcttctattcagaaattctcaggtactttcccagtttaactgacacttttaacacatatttttataactgaaaatatatttatattacatcaaaatttagcattgttttttttttgtcattcatcgaatgaaaattatttatgattgatattaaaggtacaaaaatatgtgttaaaagtagcaattaaactaagaaagtaccgattctcacccaatcaaaaattatccaaaattcaggtggcatatcgcgtcaaatatttgccgcaccatcggactggcgacaaatggtctttaaagaatgccaaacattattaatacctaattgaataatcaggcaaaaaaatatttaggtgcgtttaccccacttatgattacacccattgcttatgcgattcgttagaaaatgtgactcattctctgtgcaccaaggaatttcaagcaaggtgttgttactcacaaaaaataagagcgagttcattaatttatcatcgtggatttacaggcgttcctcgtactattggctgtgcaatgcgctcgacctttactgccctgtccaatgggaattcgcccgtctgaatgttaattacaccgtcgtttcaaagcgcaagttgctcaagcttatccaggcgggcattgtcgagtccgtctgttttaaacggagtaataagcacaaaatctcacgttttagtttc

SEQ ID NO: 2499 - DNA, 3491 bp, Heterodera glycines
tagacttcgcattaccaattatcgagagttggttttataccagcgaaaagcaccttacgggtcaaacaattcccatcctcaattaatgaaagtacggaagaatgggaaattgcatttgacgagtttgtctacattgagcaggctgattttagagaggtaattgcgtgcagctttactagacattattacgtacactttttaggttgccgaaaaaagttatcgtcgactgacattggaacagccggtgggactgcgtcatgtcaatttggcagtcaaaattgacaaactggagcgggatgagcacggtgtctatttcttatactaagtttattttaattcatttattttgaaggaaatcccatcgaattggtggtaactgcgaatccggtgagtagtgagtgtaagccgaaagcattcattcattgggtggcgagaccggtgctttgtgaggtgcgtctctacgacaaactgtgagtatttactatccctccaaatgttgggtaaacattttttagatttgtacacaaaaatcctgaggaccctgccgaagtccctgggggttttttgactgacataaacccgaactcgctccatgttctttcaaatgcaatggttgacggaagtattattcgcactattcgtccgttggatcgctttcaatttgaacggaacggctttttctgtttggatccgaatgattcgtggtcgagtgagaaaaaagtgaattttttttttaaatttatgtttactttttagttgtgaattttttaaataaaaaattacttctttttagttcgtcttcaatcgcatcgtttctctgcgtgaggatgcaggaaaaaacatttaaacttttccctgcttttttctgtttatttttatttattagtgcattttcattgttttgttgttgatagataaattgttgactctctattttactaacatattcttttttctttgttttttttcaaacgtacatatatttaactgtgcttaaattccgtctcatttgattttcccagcctttgttaacatattaaatggcgtggctcagtcgtgcgactttttgtcctcaccaattacaccaaaaagctgtcaaaacgccgttacagaaagcggtcacttcggcggcagagcgtgcgcttgacattgtcggcaatgcgtcgcgagtgcggcttcaggacttgagggacaacccgggcgcgaggacggtgggcaggcaagtgcgcgcgaagggccacaaccaagcgggtcacaccattggcgagttgcaacacgcgtcgaagccgccgctcggctgggtttggggcgactattacaaaccttggcagcggtcctttgacggcgacagacgcttcaacggggacataaagtaattcgttgatgatgatgttgttgttttacattaatgcatcatttgttcagtctccgccgtgaatacattcccatttctttggtcgagcttcagcgcctcatcgacttgggctggttggacacgagtcgactcgtcgacatcgccgcaatttgtgccaccaaattgttggaacagaaattcaagccggaattgcgtcagtttggcattcatctgactgatgaagtcagtgatttcgcaggtttaattcgatgctcacccgctatttagggcgaagaaatattctcaactccgatcaatttggaggtccaatgggcctcgtgcactgcaattgctgccatcgaacgcgctggtggtcgaattcggacggcttattacgacacggaaagcctcaaagccatgtccgacgccgagaaatggtttcgcacagggaagccgattccgagaaggaaacacccgccgtattcgctgatggaatattacatggaccctgaccacagagggtaatagaaatgtgaacacatgaacattttggtgctgaaaaaagcaattttagatatttggccaaccctgaggacattgagacgtcccgagtccgattggcagacattgtcggctacacattggtcaccggtccaccgcctttcgaaaatgaacaaaaaagaccggaccaagtgtttcttggactcgagcctggccaattggtcagtttggaggacgaaaaggtgttcgagccaacgcatccgacacttgtggaatattacaggggagaagaacaacaagtagccgacacaattcgatgaaaaatgttttccttttgttcgctgcatttcaacattctatttttgttttaaagtttaattttaatgtttgacatgaagcgtttcaaatagtctgagtacaattacatacttttcaacaaattcgaattttttatagctaattcttattgctgtacaaatggcatcgcatcaccaccagcatcgtcgcaaaacaaaggtgggcttttgcagcgatgttttaattgctactatatttaattgcgttttctgcatttgttttgacggtttctcacaatcaatctattacttcaaccgactgtttcagcatcgtcacggttccgtgcacaatggccaaagcaatgactcacaaaacgatgaatttttggtgttcggttactccgcgaaactgcacaatccgcgtgacgaacatcggccagcagaagagcaacagcaaccatttgacgagagtctctacttgataccatggaacggagacgatcggcttaaaattgatcggtgagtttttatgcgctggtcgaatgcctttgggagtattctgtccgaaaaaaacgtctgtaaaagcgtcacttcgcctgcgtaatgtccccggatgcgaggtttgttcgcgtttaaccattgttcaaaggctgacgccatttggcacgcgaaaatcatttcaaataaccaagagaactgtacatttttaataataaggaattccggaatttttgccaggcgccggccttcgctgtaaataagcgattgttttttcaaaagccataaattaattctttgcctatttttacaaaatgctcttcgacattcggatgctcttacgttttttattctttactaattttagtgtttttattagatacatttttagcttcttccctccccgttccttctcccgtctcggctcctcttcatttctccatgtattttcgggcatttattttcgtccgatcgtaagttcgtctctttggcagcgttttattgtgccaatgttcagccaattatattttccttttgaccattcctccaatatctgtccgccacttatccattttcctttcagatacgatgtgcgtctttatctgagttcgttggacgaatttgatgaggaaaaacagcgtaaacggtccattgctgacattggggcagccgaagaggaggaggacacggcggagaagttggaggaggaactttgcgaggaggaacgttttttggacttgtacgaggacatccgaaaacgggaacttggtcattgaatctgggattgcttaattttctcacaaataaaaattgcagaagaagccaaccaaaaacgcagaaaa

SEQ ID NO: 2500 - DNA, 6015 bp, Heterodera glycines
tccgctcccacaaaaaattgaacggaaaccggcgtcgcctgttcctgacctcgatgtgctcgtccaacagttccatcgttcttcgagcgtcagtttacactgggatgtttttacatttcattggcattctcgcggtgttttcagggaaattctctctattcttcgttgctcaaagggcttcactccgttttgccgggaacttcgcctaaagttgaaaataccgtgaaactcgaagctgaacctccacagccacacattgacgaacccatttccaaggccgaatcggtgggcattccttcgcttttcgaatccgaccaacaacaacgcactgacggtaaacaatttctcggaaatgaacgctattttggtttatcctttcgccctttcctattcagattacaacaaatggcacatggaattctacggtcggcccagtcccttccttcccgggcatccgcccgtttgccaacgtcctgtgccggactcggcagtagaatcggctatttctgtggccgctaaatacgttgcattgcacggcgcttatgccgaacagagactgattggttgagttgtcttattatttttaatttgtccagaagattttttcatatttaccaatccctttgaacagaacacaaccaggacaaagtgcactttcttcaagcgagaagcccttactacaccttttaccagtcccaagtacgacaaatccaatggaaaatcttccagcaaagtcagcaaaatcgtcagcaagcgtttcatgctccgcaactgttcaccacaccatttggcaacatcgccgccgttccatcgcctcctccgccaagcgttgctgaattggtgaaagttccgagtggtcggcaaatggcggacacaatggaaaaaggggaagaaggcatggaactgaaagaagcaggtacaaaaaaggacaatttgatagttatggctaactttaaaaaatggctaaactgctattgaattcagagccggactccaaacaattggaacgccgtgaaaaggctcgactgttcatggaaagaattctgaacgaacggatggcggaaaagcgtcggacaaaaactaacaataagccaaacgaggaggaggataattggtgaattttggaataaaaaatcattttcccttttgattggatgtttactttcagtgtcactgtttcggaaacagcttcaacttctgctgctgcttctgttggtggcgtcgctattcagccgttgccaagcagtgcattgtctccgctcgcattgtcaaaagccatctcctgtctgatcgacgagcaaataaaacggacattgggcacttctccgccacaagcgccagcagaggcgaggaagaaaaagaaggaaaagcgaagggaaggcgaagagaggagacgaagaagaaagaagagacggacacgttcatactcatccgaatcatcatcatcttctccatcatcatcaaccgattcaaatgaggaggaacggagcagaaagaggaggaggagaaagagcagcaaaaggcggaagaggggacgcgagcatggaagtgaaagcgaccacagtgaaggggatgaggaggagaagagaaggcaaagacggaagcaaaaggggcaggaggagggggacagcaggtggaccaaccgagcaaggcgaagcagcgcaatcggagaatgcgagcggacctttgccattaatgcactttttaaagtactatttgtccccgtttcagtctttcccaccgtcgtcatcaacatcggagtcggtcacgttcgccacgtcgatgaaggaaaggaaaagataatttctgactgatcgattctcgattttaatgatgaaaaggacatttgaattgttggaaattgcactttcctttattactctattcatgtgttttatttgacaatgtgaaaaacggttcaattcggagaatatatatttccgtttgagtgggtattaatcattaattatttcacgtgttgcgtcagtttttgattgagtagatgaaccccaaccaacaaaggcgtcgtttgtgctgatgcttctccgtccgcgtgtcctttgctctttcggctttctttttctgctgctgttcgttggaccgtctgctttatttgttttgtttttgattgtgttcactttcatctttgggttggtctccttgttcgtttaactttgtttatgccaggtatttagctttgtcattttccttctccgcgatggcattccgttgaggcgtcgtctccgccattcctacgccaaatgggccggcgagtttcgctttccgattcatgggtatttcattgtttgggttgggcacgtacaattaacatacgccgccccctttggtcattggagtgcatctgccaaagcttgtaacgctttctccgatgagtccatttatgccgaaaagcattcgatgaccaattccgaactgctcgacccaattttggaagaggtgaccttttgcttcatttgttttccattcgttcccatttaacttttagattctggacaatattatgcgtgattgtgttgacccttggtacaatgggcagctgagtgacgacaaattgttccgtttcagtctcatgcgaaccgcgagacggtccctcgtcgcactacggacttggtccgtttatcggccaatccaaacggtttccaagaatccattttagcctttcgaaagtggattggatgactttgctgactcgacacattgtggacgatttcgcatcgcatctgaagtagtcgcttaaccataagaattttggaccaattcatttccttttttccacattaggctttatcgaaaggccaaagagcggctgcattcacagaaagaaatggcgaatcggacggacgacttggaatcggtgttcttcgatttggagttggaaatggagcgcagttattgtcgagatttggtctcaacatcgcaagcctatgaaagcggtttgttttgtaaagaaattcctcaaaaacgggactttggtgtatgaataaaatatacgatcagcagggggtgggattagaaataacagacctggtcaatctcctcccccatgttcaatctgggtcaatggcagttcgtacaataaattttttacaaaatatagcttaagcctgtttaagcctaggcccaagcaagcctaattgtaagcttattgttagttgctgtaaaaacgatcaatgggttttatcttattgcagcttatctccacgacatttgcgatattttgctctatttgctgatgccttccgaagattttcggtcgcgccccctccgttttttgattcgcgagattttcgtgtccaatgttttcctccctctgcttgaccgattgtccaacccaaatgtgatcaaccgaataatcgtttggctgctcagcgagttgcccatcaatacggatgacttcgtggccagcatcgaggcttgcaagtccgtccaggagttggaggcggtcatggaatcggtgcacgaggaaatgaacgctttgcgctcgaaaggcgcttcgaatcagcgtgataacaatggtgctcagtaatttatatttaattttcattacaatttattattctggccgatatttagccattttcccctttttcagggagcattttttcgcaacaattgttcagtttggagttcactgaaaatatcatcaaacgaaggatgtctgtgttggccaatcggtccgcggaattttggcctcagccaacactcacaacggttaacaattccacccattccgtttctcaatacgccaaatttatacaaatcttttagattaattcggtcgatcggcctgtcggaagtgaatttgcggatgattttgaccagtcaaatccgtccttcgtccatttgtcgatcactgtcgtgctgacccatcccgtcgctttgactttttttgtggactttttgaacgaagttggcggtcaaaattacatcgatttctacttggccattgaggtgtggttgttttttaagcagtgcgtctcatttggttgtatcaacagggtttcaacgtgtccatggagcatcagttgagggggttggcctcgggcgacactttggacagcgacgcgcgggagacaattcgagaagcggctctcttcatgtaccatcagtatctgtcacaggaagtgaacctctaaacaattttggtcttcaaaagacgaagatgactcaggcaatcactcgagttccgttgagcgaagcaattgtcaacaagtttttggcccggctgcgcaacgacgaaccatcggatggatggtttgagcaaattcaggaacaggcaaataaaccaagcccaaagcgcaatccgatgcccattttgataacgaaacaccccctgaagattgtcgaaattctgaagagtgaagagcgctttttccccgccttcaaaagacacgcgctgtacggtcggatgctcgaccaactcggaattaccactggagggagcgaagtcgctgccgagtcggccgaatcaggtgctgcccaatgagtcagaccaattaaagtacgccgaagcatttagcaattgacgcggacgaattggcggaagggacgtccgtcggctcattgtccggtggaagtgtggaagaggaagaacaaatcgcggctgcactcgacgattttgaggtgttcgacggtcgcaatgaatatcgaatgcaaaacagtggaggtaatgggtgttgaagaataattcattcattggtcagcatacctgtgcaagggggtggtcagggaaaatttttgacaattaaggtttttaccaaaaaattattaggttttttgcgattataagccaacctttttaggaaaaatatttgaatttttaatgaaatctttaaaaaaagaaagcaaaattttaggaatttttcagcctttcctcttacattcgacgaatattcttcagcagaattcgtcgaacgtaaggaaagtgtcgaatgaatttgaatattttaatgatatttcttaatggaaattagttaattttcaagtctccattttttacgttcgacaaatcccactcctcaggattagtgaatgtaattcacggcactttccttgatttcgacgctgccttttctcccttttttccttcctctttttcttttctctctccttttttcctcttttgaccccccccccccgatttcttacgttcgacacccgttgaccccttatgttcgacgtcatgaccccccccccttgactacctccttgcacaggtatgttggtcagtactgagaagtccatgatttacgccttcgattgctttataaatttcgttgtttttcaagtgtctgcaattgccaatgcaaccaatggcacttcagtacgcatcgaaatgctcggcgttggccaacagggacgacagcttttcgctctttacaatgtgcgggtccatcggacagccaccgatttacgtaccggttcttcgtcaaatgtgaccagacgctattccgacttccattcgttgcataatttgatcgttgtaaaggtggagaaaatatttctttttttaacttttttattttacagttcccaaacctacgaacgttgagctttcctggcaagaaaacattcaacaatttgaacaaaaccttcttggaaaagcgctgcagggcactcaaccagtacatgcgtgtaagcattgaaatgggacagggcggaatagtcccttttacaagtgaatgtttagtgcatcctgcagccgtctctttgggccgctaaccccggccttgaacaattggttttcgattttctcacccaaaaactgtacggtggcgacaaagaggggttgtcgggtgcgatgaacacgatgctcaacccactgatgagcggagtgaaagcatttggcaccgctgcggcagcgatgccgtccgacttaatcgacgggatcggcaaaatgggctccgagttgaacaaggctgcttccaatgtattcaaagtgagtgcttcttttattcattggcaataccttttcttctgttcagggctcttcca

SEQ ID NO: 2501 - DNA, 1439 bp, Heterodera glycines
taccttttcttctgttcagggctcttccaccagacaccttcattctttctcggggtcgttccgtctcgtcctccaccggcaatttgcccgactccgggcgtgtcgccgcccatcttgacgagaatgttgagtccgcatcggatttcgttcacctttcttttcttttccaggattccgtcgaaagcattccgcttcgtgtgctgcttctgctggtcgacgaagtgtttggactgcgtgccaaaaaccaatggttccgtcgtcggctcgtctcattgcttcgccaattcattcacgcggcggtgggtcagtcgatcaatcggcggatcattgacgcagtcaattggctgacttcggaggagcaagtggctcaatatttggttgctttcaggtattgagaaggcttcggcggcacaattgcttctaaaggctcgctgccccccccccttagagattccttttggtccgattccgccgctggctcttcgtcccgtgcagataactcgccccaattagactcgcagaaaacacgcttcctcgcccgtttcctggtgctttccgcagtgcctgaacagctgcgcctttttgtcggttcctcaaccgttcagtccggcgttgagaccgtttgcgaggcgttgcagaacagacacctcaaccgacgcctttgctatgtcatgttggagaggtgagcacgaagtgataaaaacaatcccaaaaccatttccgcattaactaccgtatatgctctaattatagcccatgggggattatttttcaacctcctcagaataggggggataattagatactgggggataattagagactgggggattatttttcgggtgatttatttcgaaaatttttttgaattttttaaacatgtcgccaaaaatgtcatcgagattattttttattgcatttttgttaatgaattttacatgaaaatttaaaaatgtcaaatatttacaaaactttgacaaacccctcaaaacattgaaatacgaatatgaacgatctacgtcagttgagccccacacgtttctccccagaataaccttttcaaaagccaaaaaatctttttgtttttctaagctaataaagcttgttaagagcttttgaatgatcccaagactgttggatttggatgacaaagaaaaaagttataggcatagtggcaaagtttttttttcaaaaaaaaaacaaatgaggctttttaaatacctaagctgagtttttttcgcatcgacctagcactccaaaataaaggacaatcttagaaaaattacattttagctttctaagatcgggcctctccaaaaaaggataaatcttagaaaaaaggacacttggccactctggctataggcaaaaacatgctggggccatacgcgagggcccaactgacgagttccaaatttgaaccttatttttctttcata

SEQ ID NO: 2502 - DNA, 931 bp, Heterodera glycines
aggcctcgaacgtatgaaaatatgttttggttcgttttgaagcttcaaggacgtatttccatatgcatattttgcatctttgtgcattttagcgcctttttatgtttttcttaaaaatgattttcatatttagtattttcgatattttagcttaaatttaatgaatttaatttggaaaaattcgtgtgcatatttttcactataatatgcatattttgcgatttgtttgcatttaattagattagataattaccacgttcactttcttcaagaaggtttaaaaaagccaaagattactatggtaaagaatgaatgaatgattggttgttgttttttttcaaattcgattgggcagtcacagtttggcgcactgttttctctcttcgatggtttcaattgcctttatattccattttaattatttatttttctttgatttttcagtaaatattgaaaaatgcagagctttaaaatttttaggaagttaaatgaatttttcaaattcatttacaaaatttcccttttttgtttgatatttttcatatcttttgcttcataaattctattggaaattgataagagaaagggaaataatattgtaaataaagttcacaacacacattcagcctccattctgctgaatgtttttttctgcgcattttgtcgatttttgcttaattaattaattatttgttaattaattattaataatataattagtttaattatttattaattgctcatttgccaattcccttttagcgatgttctcctcgctttttctccttcccttttccctttttgccctttttctgctgcttatccccgctttttctgaccccctttttccaattgtcccaactaaattcggccgagtcaaaggctttgtccattcccttctccgcctccctccgcttttcgttttcgttcc

SEQ ID NO: 2503 - DNA, 2107 bp, Heterodera glycines
gcttcatgcttttccctgggatttttcagaagccaattcccccaaagcgttggcacggcgtccgaaatgccatccgtcccgtggccccgtgcgtgccgcacgcgcgcaaactgtgcaacaaatgcagcgaggactgcctttatctgaatattttcacgccccaccaacactcccttagaaaaaggtgaaccgaagaataaatccacataaatccgaaagggacggaattaagtggatgaaaaatattgcatttgaattccttccctaatattccttaattgatccctaatattccttaattgctttcataaatcgtcgtctatccgcttcttccgttcatcgccgtcgtcgtcattcgccgcttttccccgtcctttttctgatccatggcggtgctttcgaagtcggatcagcggccgacttcgacaattacactgatttgggcatgcgatatgtgtccgctggtattgtggtggtttccattcagtacagactcggcataatcggtgggttactgtatttgttgtctgggattactgtaaaatttgaataatttattattaaaatactttaattaaaatttgaaaatttaatgccattttttgcaggattttcatcgacgggcgataagcaaatggcaggtgaaaaacaatttgctaattgggaattaatcaaatgagatttatcgcaggaaacttcggcctttgggaccaattcgccgcgttggaattcgtttcggaaaacattgcgcaatttggaggaaaccctgcggacattaccctttttggcgaaagtgccggcgccgcgagcgtttctttcctcggactttccccgcacagccaaggcaaaacgatggagaagatatttgcaaaatttaaacaaattctgcatatcaaatgcacaaattggccaccattttgaaggtcttttccaaaagtgcgtccaattaagcggctcgcctttgtccgcgtgggcactaaatggacgcgtaattaacgaaactgcccaattagcagcagcgattaattgcgctgagaatggacgggaaggaatcaaagaatgccttaaggggaaaacggtggacgaattgttcgaaggggtcgaaaaagtggtaggaaaggaacaaaagccaagtcaatcaatcagctaatgagcaagctgattgcttaattgaatgaggtgaatgtgaatccccttcccaaagggcaaaacgcgccaggaatacgacttcaccaaatggggcccccttttggacggcgactttctgccggcggacattccgcaactgatcgaaagagcaccgccgaagcccacagtgatgggaattgccgatttagagacacttttatggagtgattatggataattaaacactaattgcttaaatttgaataattccaaaagcattggccatcggtcacaacgacagcatttcactttatgcaattccatgggacgaaatggccaattttgacagacgacgctttgaaatgtttgtccaaaactttgtgactaaacgcgaattatttggccagcaaatggcgacggaattgcaacgagaaattgtgcaattttacacaagagacaaagcggtggagagaattgaaaatgagggcgaatattatgtgaggaaaatcactttggtaagagaaaaaggaaaagcgaaaataaaatgggaaataaataaattggaaatggtaattagcaatttaaaatgttttttagcttttgtctgacctccaattcgccgtgccggtcatttgggaggcggcgcaaaaggcgcagaaggggtggccgatttacttcttcaaaaacagttacttcaacgaagtggtcttcccaaaagtggtcaaagtcagacgtaagaaaaacaaaaaacggacaaaataaatgcgtaaaattacggtacttttgcaatttaaatggtacttttaacacacattttttatgcctaaaaatgtacaaatttatattacatgaaatttttagaatgcaattttaaaaaagactacgatttatttattctttgcaaaaaacggaagctgaatttgaaaatttgaaattgaatgaaacggacttagtgagaaatttattagattaatgaatt

SEQ ID NO: 2504 - DNA, 3748 bp, Heterodera glycines
tccatcagaaagttttatgcatttgttgatcgaaatgccaatgccgaaaatgaacccgaaaatggaggaggaaattggcagggcccaattttggacgcaaatgcgaacaaaacacccgaagattgacttaatcaggggccaattttgaccaagccaacgcattttcactattcaatttttactctctttccctatttagaaacataaagggaatattttattttaattaattaacgactaccagttttgaaggatttgctattaattaattgaaatgtacggtcatttttactgtatctttagttcgtttcgtattgacacagtgaaaataatttaataatgaaaatgatttttaaacaaataaaattaagcggcggaaagagaagggaacggcgtttgctttgagatcaccaaagtctgtctctgatgcgatatgtaccctttgattttcttttgcgcaattaaattggccaaaatgcacgacaattcgtccgcgtcaatgtccgtgcccaaaaagcgaaggacggcgaggaaagcgtccaatttgatcagatgggtgttcagaatggaagcactgaaattaaaaagggaagaaaatccaatcaaaaagtgatcggaaaggaaaaagagaagaaaggagcacatttgaagaataacttacactcgcttgaagaggtttctgtaggtgatcactttgagcttttccaacatcaaaaagatgccgcatttgatgaaaaagtgttggtgtttttgcagtgccaagttcaggtcgcgcaaattgccatcccttacggcaattaaatacattttagaagggcaaaatagggggaaaggacatttccgtccccttccattctccgactgacttaacgctggcggcaacgtcggcaaattggccaaggttgtagcggacgagcaattgttgggtgggcatatggccaaggaacattttgacgggcaccaaatacatcagaatgagccgtttgttgtgcatgaaatgagccggacagtgctcaaaagcgaaggtcagtgcttcctcggcacgggaaaggtcctcaaaatgggagaagcaaaaaattaggggaaaggaaagaacgaacgaatagcggagggaaatattggatgaaaattgaaaccatgccgagaaaaatgaatgatttattggcaaatctaccgtattttttaaatatgtctaaaattgacaattggggacaagcggcaaacagaaacgacaacgcattgccatgccatgccagacaatttacaatggaattgcccatccatcctccgaaattgtaatcaaaatgccaaaaagaagaaagaaacaccatgtcaaacatcgcttttcggcccaaaaagtatttgtaagtgattttgtcggccagcgaaaaacggtcgtacagttcgcccacgtggtcaatgctgcggataagcggtttcagcagatgcaaacggttgatctgagcaactcgaaaatgcaattggatttgttaattttttttattagaattgtcaagactctcggcaattgacccgagaaaagtgtccgaaggcattagaaaaagcacaaaagtcaccccaaaataaatgcgaaacaattggttggtcagactgaggatggccactttctttgtggtcgcgtccgaccgctccgccacacaaatgcggtaactctccataattgaggcggccgactcttcgtaaaaggtcgccgtttgcgcgtcggccgacttccgctggtggtggccgccccacagcacacagccgcgcttgtcagcctggaaaaggggcaggagtgtacggtaggcatactgtaattgtctaattgtaagacggcaggtgtgcacagcaggggaataagccgaacacccaaaggcactttgaagaagttggaaacggtaccattttaatttcacactccgtgaaccgttctcctacgcctcctccagagaactcgtttaggtaaatttaccactcatttcgcccccggggattaaattaaacaccaaaataagtgcccacaattcgcgcaatgagtcgcaagtcgctgcacagcacgtaaaggatgggcatgaaccaattggcgtccttttcgcgctgcaaaatttccctattgaacagctgcagggcattcgtttgatggccaaacgccgccggccaatcggacgcactgagcgcgtgcagcacattcaaatgggacaacacaatgtcgtcgaacacggcccatcggaccacggcacggtcgtcgtagcgatcctcgggcgatggcacataaaatggggagggtagattaattaaggtgataatcaacgagggtgggggtgacggttaggatgataattactcggcgtgtcgagagtctcgacccgcgagtagagaaaccctcagcatttctctcgatatcgttggagacttcaataagatttaaggcttttgccaccctcactccacctatttcacacataactgaagaaatttaaggtccgcatgtttgtcacgacaacaaagcaacacggacgcctgttcagctgcttcccacgtttgttggtcgattagcgcagccaaattgtcataataggcgtagaaattggaaaattccatcccaattaaagcactcatatgaattaatgtgcaaaattcattaaataattagtaatttaaagttttctaatacaaattcaaaaaattcaattgaaaattaattcaactaattaaactttatacaaaaattagttgagtaaatttcttacaatagttaaaatataggatggattaaaaaaataaagttgaaatattatgatgtttttgaaagaaccgatgaaaaaggaaaaacaacccaagtgaataacaacaaatgatatggaaaacactttggacagaagtgaataaaagcacaaagcaacggaaaatcgaatgggagaaagtgagtcggacttaccaaaacaatgccaataaaatcacaagcattttggagaaacaaagaaaggaataaatatggaacaccggcggaagtgaacgaacgaacaaaaattgggaaaagcgattcttttccaaaaatgaaagaattacacattttcattcctttttaaaatcaaattcccaactaaaattttggtaaggaaatttggaaaagcgtaaatcaaaaggaaagtgaatgtgtttgttgtgctgaaaagcgacgttgagttggcctttgcttttggaattgcaatttgtcgtcgcttttgctgccatttccctccccctttagactgtctgtggcattttccgcgagtccaacacttcgtcctcctcgtcttggtccgtctcttcccccgaggtgtaaccctgcaaaaagatgcaaattgactaggtgaagtgaccagcaagggcatttaagatcgagagcaaaacccgataaaaacagggaatgggtgcccttcgaaccccaatttaattttggaaagagatatttgcataaaattagccaaattaattcagtgattttgttcgttttgtttttgtctgttgtacagaatataaataaatgtttgttggaaatgcgttttccacctccaccttcaacggcactctctcaaatccgtccggccttcgtttttccttcttcgaccgttcgccctttttgttgccattgtttcttcgcctccatttccatcccccgttaagcgatttgcacagacaatactgaaaaaagcaaaaagtaatcaaatgccaaaatgaaaaaaaaaatacaaatgaaatgaaagca

SEQ ID NO: 2505 - DNA, 5026 bp, Heterodera glycines
  unsure (1)..(5026): unsure at all n locations
agtctccgcagtcaaagggtcgccctccacgttggtcaccttcgcggtgaagccttggagacgctaaagcaaataccaaattttaaattgtttaaaactgctcactctttccaaaacggagagcaaagggcgacgattctccccaaaatgatgaccctaaaactgtgctttgttttgaagagaagccgcctcaaaagtgagaccaaagcaaccccttaccacgcccaatccctcgtaacagcagccaatctgtgccaaaagtacgtccggcgatgcgttccatttgtccctggcgaattgccaatggaattcgcccaaaacggcggtcgacggtcgattcgtcgcgcacatgtccaagttgctctgacaatgagttggtttgtttgtcaaattagatcatttcatcactgacctgtcgcatctgttcatggtgtttgatgtacatttggccaaatgccattggcgttgcggtccaattgccctcgggcagcttctcctccgccattccttgctccgtgcccatcagttcctgctcctcctcaaatggggcggccgtgccgttcttcagcattccgttgtcctccccggggcggagcacatcgataaaacgaacctgagagttgtctttaatgtcccattttactcaattagtcttaattgccttgagaccgccagtggcaattacaatgacaaagtcaatttccggcacagtccccaaaatgttggacaccaaaggaatgaacggagaaattgtggcgtagtcgtggcagttcaactgagtgctaaatgagtctcacgatcagatgggattatatttcgcaaataatactgtgggatttcgggtgccaaaacgatggtggagccggccaaaatgcgtgccaattgtttgtcctcctcctctaaataggcgggcgctgttactgcttcggccatttcggcatccatttgatcgcaaagacgggcccccaattggtagaccaaagcagacgttttctgaaatgcaaatggaaagcgttgccaaacaatgccaatttaggaaatgaccttttcgaccgcaatcaccaaagtgtgtgggccgcgatgagagccgacggcgtgcaacttcatgccatcggccgactcaatcagtcgggcggaacaaacggtggactgagacaaccgatcgaagccaaccgaagtgaccgccgcaatttgcgagggagtgaagtgatcggtcggggcgacagaaggcacaaccaccgaaaactcgtgaacctcgtcccttttcagcacgttgaccatcatctgaagggaaagggacaacattttcgggaagttatttcactatcctaccataaaatccaaatagaaacaataaaattaaaagaaattttatcagaaattgttggagaattaataatacaattgcgatttaagaagggacaaaaaagataattaagaatataaacagcaaaaaaggaggaacaaataatttaagcctcgtttttaagttagttatcacaaaaaaggaacccgccataacataaaatgaatggactaacccgaaaagagtaagtagcgaaaccaagaattgtatgaataaatacaacaaatttgaaagttggctttttaattgtcggcattggaattgtgcgcggaaatcacctcaatgatggcggtcagtgctacgtccaacttggccgagtcaatgtcccgttcggtggagtttccgcaaccgatgccaacgcccaactgaaaaaggcggtcgaggcccatctgatcgaccattgctgcgacacctgcgcaagattaattggaaaagagtgagggggaaaaggagataatgggtaacaaatttggacaaaaactgacgagttgaccaagtcggtcctcacagttttcagtggtcgccaacaccaattgctgctcgtcctcattgtcgacagaatgaggtgcaaagactctaaaatgcataaaataacaaaaaataaattctggtagcagttgaaaagccaaacctaaaaaaaatttcgcccgattttggacagtttctgcccgacccctaaattgcacgtactttttcaaactttctccaaacgttcgttcattgaacagccgaggagtgtattcgcccgcactgaatacaatcgattggggaggacccgaggcgaacacaatcaaagcatcggcgaacacactgcgcaagtagggggccaactcagtttgagtgtactccgccacaatgtgcagttggacactttcgtgtaaaagatgggccttagtgcacaaatttaacgatgaaatttgtcgaatgaataagagtcgtacaagttcanggttcttgttcggaatccaccgggcacgtgtgggcggccagccgagtgagcaattccctggacgacgagtcaattccgaccagcaacaagtttgaggttgccttgacctcggacgaatgtctgtttgcttgnggttgtctgaatttgagaatttgtcacatttttaaagaaaagttcggttggaaaaccttggccatcacattccatgtgtttcaaagtgacattgacctctttaggctggcccacaaccaattggacgtcgaattggtacggtttgtagttttggtgcaaaacttggatctgacaaatgcaattactaatttatttatatgaattcaaaagtataaacaattgttacggtgtaattgcccgggggcaacagtcgccaatattcgccaagtgttgaagtggtcacatttttgccagttccaccgctaacgaggctaacctgaagaagggcagcgcaagtcaaaggcataaattttccgaaaaattaaaaaactgcttattgttagatttttttgttgaaaataaagttcgctattttcctaataaaattttcatcgagttagactagctaccatggcatttgcgatgggtttgtccttctcattgcgcaccaatcccttcactccgccgtgcaccgcctccataaaggcgagcagagagaagcgattttgagcccaaagcgtgggcaccatgtcgtcataggggaacttgaagcagcccatttcgatggtgatttccaacgaatttgagtgcaaatattgccaatcctttttttgggaatgtgaaattggattatttttcattatttttgtaaaatgatttgttttgctcacttgcatcccaccagcgaggtgatacctacgaaaaacaagtgtattaagacaattcccccattattcacaccatccggccccgttggtaattccgtgcagaaaaacgtcgccgttgtcgctgaggccacaacgtctgcccgacttccacatgttcgtgtgcgcccgtgcgtagtcgtaggccaatttgacaaacagcttgtcgtcttcggaaggcgtgtacactccgtcctgtcccgtgtccgagtcgtcgtacggataattggcaaccaatgagcctataaagggtaggcccagtcggggaaaattttgagaattttaacggaatgtgttaaaaaaaatttacatttaaaaattttacctgcatggagattggcggacaacacaaaagggtattggagaagccatttcatcaacgccgcagtttcaggctcaggcaaagtgccgccggtcgcctctttgtggaaagggtaacgggccgggaagtttcggttcaggtcgatgttgtgcgcattggcacgaccctggaagattttgattgagactcattgagtaaaatgaggcaacaaaaacggaccaaatacccaacacggtcgccggctctgtccatttcataaccatccggattcattgagggctgaattaagcaccgataatgagagagagagagagagtaaattcaaattggccgaaccatcaaatgaatgcgcgtgctgttgaccattttggacaaatattcgttgtggccgtaattttcgcagagaatccatgccaaataaagcaaagcttctcgaccaacacctaaaatcgggccatatttgtcatttattatatttctaagtgtgtcaaaaaggcggaaatacaaaagaaaaataaataagttaaaatttgcctcatttccgtgcatattggccacatatttgaactcgggcctgagcaattcgtgttcccgagggttccgtgccactacaagaacccaaaggtcacggccctgcacacttttaccaacgctgtacagccaagtgatgtgtttgaagcggtcagccaaatcactcagccatttggtcatcgaatcgaagttgtgattcctctgactggcaatgggaaaataaaaattttttttttgttgaatatttgatggtcatgtctctttttttatgggtgtgaactgcaaaagagccaaggaatcaatgggagttattttacttgaaattggggatgacaaaaaatttgatttttaaaagaaattaattattcgttttgtgtcggttttcatatttaagactgaattttttcgtttttttttcaaaattcccttaactcactccgcaattggcacatctttaaagtggccgatcagcgctttcatggactcatagcttcggaatagccgttcatcctccacttgggtgccgaaatatttgctgagcgcgtcctgccgctcatttctcagttcgtcaacatttggcacaatgtcactgttccaatcgatggccgaggttatgcgaaaacgaattccttaaatgatttgttaaaaaggaaatgaaatttgattgttttttaaattaattattctcacaattctccaaaacgaaagattaacctaataatgtgcaaataatgaccaaagctttcagtgacgaagcggtcatggtaattctgtgccggcgcattaaacccattagcaaacataaacacaaccgccgctaaacctcaattttaattgaaacaaaaaattatgtacattttatgttttaatgaaataaaaaaacaaatggatcggatataatagatgaacacggcaattagtgatctctatgctgagttggagataatgatgagacattcgctgtaacgatttacgtagaaaaa

SEQ ID NO: 2506 - DNA, 4095 bp, Heterodera glycines
  unsure (1)..(4095): unsure at all n locations
aatttttgagcttattaggggagtggtaagtttttatgaagccggagggacttcattnnntagaaaatagaataatctttttacaaatttgctcttttttatttttatagtgcttattaattcaattccccaatagaaacgtatgattgtgatttttttgtacaaaaagctcagtcattaaagctccataattacaccattttagcagtcatttacaatcgaattcaatattttttttcgttaataagcattctgtgaaaatttcagcatgagagaacaaaattactttatttgacttggacggtcccaggatttcggcgtgaagggcgtaccgcctccgggcgaaaatttatttttcttcatttccatcccttttatgcaatgcacatttctcaaaaaccttttgggaaaggaggagtcagacggaaaatttaaaaaaaaaaaatggaattttgagtgctatttgttaatggaatttattcaaaaagaccaaattttgggattttgagacaattgtgtaagaaaacagaggagttttagggatccgatggtggcgccaccggggaaacattttggcgattttgttaataaatttgcaccaaagattaatactaatttttgaaaaaaacggaaaaattcaaaattcgctatggtcaatttatatggtagggtgaactttattatagaatgcgttaacataaaaataaatgaataattcatgatcagcgcctaaatcacctttcaaaaaaacaattaaaatttcatgggagtcaaaaaacccataaatgaccatttatttttaaaaatttcattctaagaatgaaaaatttaaaccattatattcgaaaagggatgagatttatctttttccatctaaaagtcctatccatgcatatgtacaaatcaacaaattcaaatgaatttgctttgttctcctcatcgtttttcgggtcataattttgccgcaattattttgttattttgtgccctcccgcataaaaaaagtgaagctcatcagcagcagaaaatcctttacattacaaatctttttttacaattatacaatgagtaatgttcatttttaaataatacataaataacttaagctaataataaaatgtaaattatcgtttaaaaattaaaatgttaaacatattttttttctttaaattgacttacgctctgaaaataaaattttctttttaccgattttggcatttgaattgataaaattactagtttggcaattgctttatcattacaatgtctttgtctgtggttgatcggatgaagcggatgttgagcactggagaggacgcggatgtgcactttttggtgggggaaggagaggaaaaggaggcaagtttgaaaataaaagtattaattaattaatttttatttaatttaaaaaaaaagcctttttaagagagttgcagcccataaagtaattttgaagcatgcttccgaagtattcgaggcaatgttccgttttgactcacagaatcaaaacgtagaaaatggtaaaaatttgatgaataaattaattggtcaattaatttgttagcctgcactaattgtgtcgtggaagtgcccgatgttgaggcagcagcgttcaaagtgatgctcagcttcatttatgccgacgatttgagccaattggacggagacaacgcaatggcagtgctttacgctggtcaaattgtttttgtgaaattaatctaacaatttaattattcattaattagccaaaaagtacaacatcgttggcctggttgtcccatctttgcaaattccaatttcaaaactgcacaatgttttctttgcctatgcccaggctcagctctttgaattagaggtgggatgacagagcactcaaaagcatcactctttcaatagattaaattgtttataaaatttttatattgaacaaattcagaaaaggcaaaaattatgcatcaattattttgaaatataaaaatttaaaaattcagtattgggtattgcgagtttcggaattttaaggaggtcggattatggcgattttttcatgcgaaaatatcgaaatattaattatttagttttttgagttaagaactttgcctatcattgtttgttttatattgatgagaatgcggacactttgctcaattcggtggcatttttgcaaattgaccaaaaaacgttgtgtgaaattttgagtcgtgacgaattgcaaatcagtggagaaatttcaatttggaacgcagtatgatattaatttatctaagaaaattacgttgatattttttggctatccgttgggctgacggaaagtgccgtgaaaatggcattggatgttcagcagagaatcgccgtaaaatgcttggcccggcattgttcaaaattcgcttttccgctcgtgtcaaaagaagaattttcaagaaatattggtaagaaactaaattctacaaggaatttaagactttaaatgttcgaaaatatattcccattaaatttaattaaaataatttaattaattccgtttccaatttatttatttttcagttccctccggtgtgttaactgtggaagaagtgatcggcatttatcagttccattgtcatccgaatttgcacatggtttccgagctgtacccattgaaatttccgaggcagggaagaatttcggaccgaacagaagggacacttcagctggaaattgaaaaaatgtcggaatttgcgggcgaaactgtggggagctgccgatacagcaaaactgtgcacatccgagggcttccatttgaaatatttgcaaaaataaatgcgacgacggaaaacgatgaaaattttgttgggaaatggctgggcattttcctttggtgcacagcgccaacagaaggtgattataggcgcaacttttagtgaaaaaactttttttttgctcaattgttttgaagaaaggagctcaaaaaacgcatttctgcgttaaatttttttcatttggacgtcatttttcatcactgaaatcactattttggcgtttcgtcacttaaaatagtgaaaattctctttttcggctttttgtcactgttttttcactttttcgacattttttcgtcactattttagttaactatcgggatttttcgtcactaaaagttgcgaccctagtgattaataaaggaacaaaacacaatgaattaataatgaaagtaaacaatgttcactaatcattggctaaaaaaaggggggggggtcgcttcttttttgctttttcaaaccaaaaaatgttgtaatccgatttgttaacaaagattttgagcaaatttttaaggaaaatttggattttgtggtccggcggtgccgataggcgccgccggaaattttcaagcacttttttccacttcgaaatcggcaccggtactgcctttattctactattggcattaagattcgaattggagttgcaattggtcggcaacctttagaattgtcgcgcaaaacaatgggacggagaattgcacagggaaacgcattgacaatgtgtttaacagcaaatcaaacagcatgggattccccactttcattgctttttgggtgagggcttattataccgtacttacggtattagaacccccctctgtattagaaccccctttcgaggggggttgaaaatagaacccccgggagtactaactaattcagtaattacggtattctaatgagaatattttaatcttctgaatgatacgaagaatataaaacgtctccgactttcagcaattttgccattatttttcatttcccctggcaaatttaagaaaggccaataatggcagaaatggagaaacggcccaataaattcaaaaaagctaccaatcgattcctctcgaagagttaatttgtaagcacgaaaatataggtctccagttgcggaaatgcaaaaaaaaactgttttgaccggtttaaaactcgattgagcaaatttggcacttctaacttttttaaataaatgatcgaattatgacaaaattgggtatcatcgaaactcttgacgaattaattttaaagatcaggggatgggagaccgtattgaatgtgagctgatttttaacgc

SEQ ID NO: 2507 - DNA, 938 bp, Heterodera glycines
tcagccatttcttttttttgctaccgggtcaaaaattctctcattgccagacggcacaacgtcatcccctgattttaagatttagctcatcaaggttttttaatgataaaaatttgtctgggttcgatctttaaaaaaaagttgtaaataccaaatttgctcaactttagggtttcaggttcctttttggcatttccagaaccggatggattacctttgttttcgtgctttgctcctcgagaggaatcgtttggtattaaaatttgcgccattttttcaagggcttcactatgatatatccaaaattaagcaattgatggatccgagaaacggcttttacgacagagacgaggacaaagtgactttggccattgatgtcattgtggggcaagcagaaatggacagagcaatttccgctgatcagagcaaatcgaaagggacactttttatggacattgaaaaagtgtcgcaatttgcgcgagaaagcatttggagtgagcgcaaaagcgaaactgtgacgtgcttagggggacttccatggaaaatatccgttcaaatatttacgattatgggaagtgccgtcaaatgtttgagcctttttctttgttgtaccgctccaaaagaaggtgaaattaaaataatcaaattttgtttttgtctctcatttttttcattgaattgattaaagtaatttaaaaagttgctttttggttgtgatgctcgagagtctcggtctcgactcgggttttcaatctcggtcttcgagaccgagtcttttttacacccctaatgattggttttttgctaacttaaattaatatatttttgtttactcatttttcttctaattttcaagttattcctttttcgatggggaatcaatcataataaaaaaaaaatcaaaaaattggttaagaaatgagtcagaaaattttttt

SEQ ID NO: 2508 - DNA, 3385 bp, Heterodera glycines
gtagtagttagtgtcttcccatccgccggattacggtagcctcccatacctatgggaggggtgcacggccaactgagcgccagccaggtgagcgccgccgggtgagcgcgggccatctgagcgccaaaattttcagtactaaaaccaaaacctattgcgcgactttttttctgaaacccaaacctattgcgcgactttttttgaaaacccaaacctattgcaggggtgcgcgactttttttctgaaaccaaaacctattgcaggggtgcgcgactttttttgtaaaatttttctctgaaaattatttattttttaaaattttttattcgaaaaattctgccgcagactagcgggctcgaacttttggtctgccaccaatccaacacactaccactctgccacgcaaacacttgcatgcaaaaggaaattatccactatatgctggaaagatgatgacgtcaccactgcgagggatactgtagtccggtgaacattcgcaataaaatacgcaaaacagggcaaaacgccacaatatatacttgaagccaaaagtttattgaaacgaaaagtcttcgcgttatattcaaattcaaaaattggcgggaaattcaaattcaaaaaattggcgggaaatttaaaaatggcttgtaattctaaaaatagtaacacttgacctagattccggcagggtggcatataaaaggatgcgtcatgcactttctttcattttttctactgctatatacttttttcttgctgttaaccagggcggtaattctaattaatgaactaccgtttatcctggcaccaattaatccatgttttaggtcttgaggttgtttatgatacattacaaataccacgaggattttcaggtgccctgtcgtcttgtgcttcatgggtggcggtgtgctgctcatcaggccaagattggttacattttgcctattatgccaagtttgctgttaaccagggcggtagcgctaattaatgagctccgtttatcctggcagcaatttcaatttgtattttagaccatgaggtcactcaaactatcttgctaagttacgagacttttcaggtgccctgtcgtcttgtgcttcatgggtggcagtgtactgctcatcaggccaagattggttgatattaataaatcaatttcctttcctgcgcaatcccaatcaggataataaatgataaaacaacctgatgcgcaatgcctatataaggcagcccctttttctatataccgcataattttatttcgcaatgtatcctttgtatcctactgtattgaaacatgtcgtccgatgacgaaattcctccgttcctcgacgggccttacacgcccgtgcgagatggcgatgagccctttgaggatgctccgccccttgtggaagtgattaaccaattgcctattcaactggtgaaaattatttgaaataaaataatattattaatcaatatttagattttggatgatgttaaaggaaaaaatgaacatgtgacaaggagcgattaaacttggaagaatttaacggcgagcatttcaaatgcctggatgccgcacaagcggagagtggaagattcaaaggttgattaatttcttcgagcaattaaacaagttacatttttgttttcatttaagcctaccgttttcttggacgctttatgctggactacatttggaatgccgactaccccgaagctgttttgaagagcctctttttgatgtgcctgtcatactctttgaagggtgcttcggccatgaacatcacggcaaaccatctgattttcctcttaacatcacggcatcttgactacgaaatagcagtgcacttcaaaaacttcaagaaaattgatgacaaaatggctgaaacaattttaacacactttgaaattgtcgaccaaagcaacaaagccaaagagcggccatcacttcttgaggaatcgtttgttattgacatcacggccatcgacagtggaggaaagagacagaagatggcggggaaaggtgggcgtcgccgtgacttcaatgttccgtacgaccttctggagggtgcaacatacggattggagaacaacgatgcgtattgcttgttccgcgccttcgaattccttcgcatgaagcatgtgatgccacatcagagattttctgaatataaacgtgatgaaggacaacaacttaacaacgtgacttctttattccgagagtgcgacatccaaatgtggttgcagttttattccattgaggaatatggaaacaaaattcaggtaatttaaaataaataaatttaagattaaaattacatttaaaaaatactacaacgaaatgcaccctgggatgttccgtctcttctgctttgacacctttggcaagatgaaacccatttggaagtccgccatgagtgattaccggtatgagctctgtgttctttacacgagggagatgatggagctgttggacactatgacgcaatcaaatcaattggaaaaaatttcggctcaaagaattactgattgtaaacttgattataatccctagtgtaagtaaccgatattcatacaaataaaaacatctctttgccttaagcaaaataaaaataattaagttattaattaccgagtctgcaataatataaaatatttgggtactgtgctttgtacaacctctgaggttcctattaggaaaagccttcagattaagcctatatcctatacgagtatgggttttgaatgacaagataaatatatgttaaattaaaatgctgacacaaaagacctatgttttgtagaaaatccctaatagtttcagctttggctagattttcagcgaatatttttgaacgaaacttttctgtatgttgaatttatccagaaattacagacacatttccatgaaatattgtgaacttgattataatccctagtgtaagtaaccgatattcatacaaataaaaacatctctttgacttaagcaaaataaataataattaagttattaattaccgagtctgcaataatataaaatatttgcgtactgtgctttgtacaacctctgaggttcctattaggaaaagccttcagattaagcctatatcctatacgagtatggcttttaaatgacaaaataaatatatgttaaattaaaatgctgacacaaaagacctatgttttgtagaaaatccctaatagtttcagctttggctagattttcagcgaatatttttgaacgaaacttttctgtatgttgaatttatccagaaattacagacacatttccatgaaatattgtgaacttgattataatccctagtgtaagtaaccgatattcatacaaataaaaacgtctctttgacttaagcaaaataaataataattaagt

SEQ ID NO: 2509 - DNA, 1160 bp, Heterodera glycines
tatgtttgtagaaatccctaatagtttcagctttggctagattttcagcgaatatttttgaacgaaacttttctgtttattgaatttatccagaaattacagacacatttccatgaaatattgtgaacttgattataatccctagtgtaagtaaccgatattcatacaaataaaaacatctctttgccttaagcaaaataaataataattaagttattaattaccgagtctgcaataatataaaatatttggttaatgtgctttctacaacctctgcggttcatattaggaaaagccttcagattaagccgatatcctatacgagtatgggttttaaatgacaagataaatatatcttaaattaaaatgctgacacaaaagacctatgttttgtagaaaatccctaatagtttcagctttggctagattttcagcgaatatttttgaacgaaacttttctgtttgttgaatttatccagaaattacagacacatttccatgaaatattgtgaacttgattataatccctagtgtaagtaaccgatattcatacaaataaaaacatctctttgccttaagcaaaataaataataaacaagttattaattaccgagtctgcaataatttaaaatatttgggtactgtgctttgtacaaccactgcggttcatattaggaaaagccttcagattaagcctatatcctatacgagtatgggttttaaatgacaagataaattatgttaaattaaaatgctgacacaaaagacctatgttttgtagaaaatccctaatagtttcagctttggctagattttcagcgaatatttttgaacgaaacttttctgtttgttgaatttatccagaaattacagacacatttccatgaaatattgtgaacttgattataatccctagtgtaagtaaccgatattcatacaaataaaaacatctctttgccttaagcaaaataaataataattaagttattaattaccgagtctgcaataatataaaatatttgggtactgtgctttgtacaacctctgcggttcatattaggaaaagccttcagattaagcctatatcctatacgagtatgggttttaaatgacaagataaatatatgttaaattaaaatgctgacacaaaagacctatgt

SEQ ID NO: 2510 - DNA, 3142 bp, Heterodera glycines
  unsure (1)..(3142): unsure at all n locations
gttcaaaatctcaaaaattttcaatatttttccgccttcgtagatgaatttttttaaaacgctcggagtccacaatcccccgaattagtgtcgggggtcggggggcaaaaagtcgggggtcggggacctcggggggcgacatgtcgggggtcgggtcggggaatatgtcccaaaaaggtctcgggtcgggtcggggaggaaccctagtttaaactttctttttttataaatttcgtggtgccgatatgcttcgtcgacaattttttaaaaatcttttggtgcgatttgttaatggatttacaacctgaaaatggaaaggcataaaataaagagatagatagtttttaataaaaacctccaagagaaaaacttttcaaaaatattaaaaaataataattttaattacaaataaaaagaaaataaccaaatccacctccaatagaagaattgttttttgaatgattgcgtcattttgacccttttcttcatcatccctgtaaattaataatgattttttatagtggcttccgccataataattttttttggcatatttccatttgaatatttaattttttgccattacattgggcccacgtattttttttccggcggaagtgccaaggaaataagcaaacagatgaaaatattagaaaattaaccagcatgaatatgaggaagtattatgaaaactatgtcaaatgaaagtgtataaaatgaagggaaaaatggaaaatataataaaataaaatttaaaataagtacgaaaaacaacaacatttgataatcatttcacaatgaaagtgtttgtgctcttaatttgtttgctgttcataacaaaggcagaatccgttgaagaaaagcagccaaattatgatggccaaggttttgttttaagcaatttttaattaatttttaaataaattttaatttattttttcagcaaaatcttgtgacaatttgttctttttttgagttttagattttgacaaagacgatattcaaacaatttttgaagatgcggttgactatgcccaagctttggcattggtcactttgccgcacacacatgaaggaaggtgggaaaaatgcctaaaaatgtctaaaaattatatttaattttaaaattttaattttaaagaggtgacgaagcattgattcacccgtttacgctctttccgactccatttccacgacaactttacgagcaggcgatagaactacaatgggtggggaaaaagaccaattattatgggtcaaaaaaatatttaaaattttaattcaattaaattaaattaataataattcgtctcattaggcgtacaatttgttgtatttccgaatttcaaatgacttcgattttctcattgaacattatgaaatagcagcaaaaacaaatgcgcacgtcagacactatttgaacattatgaaagaagtcaaaaaggagggcattaaacagaaaaaaacgctgcttttaggacgatcggtaaattttaaaaattattcggttaattaaacaactttttcatcataattaaacattaggctaaatttgtttagagagtgtagcgcccaacgggcatttgcccgtttgacccagtaaattttgagaaataccgggcctgctgggtccggtcattttgactggtcttttacgggcttaaatttggcttacgaatctgtcccatatttaaaattaccttgacaaaatatctttaattcgaacttttaaagatagaacttaggatttttttaataagttgggacaaattcaacacagattttagttgtcggcaccgccggtccaagatttcattattatttaaaaaaataaaattggggctccttaagcaaatttacttattcatttaatataaaaaatccggtctcctcctttccagaatttgaagaaaaagcgcgtcgcaaaaaaacatttcgaaaagcaaaaaaatcagcaaatttttgaatcttatgaaaaagaatttaagttggattcttgaaaattttcggtctcatccctgttatattatgattttcttacaaaaatggaagccttaaagtcacaaaaatgttcctaattaagctgacaaatgagcttaaaaattaaaccttttaaaatatgtgaattaaaatttttcattcttttacattaattaatcttgtactaaaacagaaggttaaacgatttttttttgttaaattctaacacagacccggcagtttcaaaatcccgtgctcaaaaacttataaaaataatattaataattttaaatccaaaaatgttttaggattatatgtgccatgttgtgaaagacgagaactcagaaaaaggagaacgttatgagctaaaacaggcaaagcatcaaaataagccatttatttcccgcaaatcgaaatttcactttttaattatttcagattgaatttaatactggccaacttggcggtgtccatctcgcgcgtcttctcacccaactgcaccgtcggacaatgcaaaaagcgggccttgaagcatccaaagatcagcttctgaacaatgggtcggactttgtcatcgccgaagcgttattcatggcctggtaattttgggaataattatttttttttgggataaataacatcccaaaaacaaaaggtaattttgggaattgtatttttattttttgaaataatacccataaaatttaatttctattttaaatatttaatacctattttcgacctaataaaacaggctgacagataatttaaactttatgaaaaataaataaatttattacacgaaaaaacggaaataaaaaactttttttatgaatcgttttcgaaatttataccatgcaaaaatattgaaaaaaaatttatttattaaaatcagtttaatcaaataattttttaatttgattagtaaatttggtttaaaattttattacggaatatttttgttcgccaggactgcgtttggcgacccgaaagcggtctttctgttcgtggccagcaaaacgagtcgcaatcggtttggccaacggcaaattgagtaccttctcgagaaaatatcaaattacaanatgaaaatcatccgtatntcgctgccagcttgtgcagaaaaatgaggtgggaacagtgagtttnaaactgatggaat

SEQ ID NO: 2511 - DNA, 5662 bp, Heterodera glycines
  unsure (1)..(5662): unsure at all n locations
tttaaaaattattcggttattaaccaacttttcatcatattaaacattagctaaatttgttnagagagtatagcgcncacggggcattgcccgttgacnncagttaatttngagaaataccgggcctgctgggtccggtcattttgactggtcttttacgggcttaaatttagcttacgaatctgtcccatatttaaaattaccttgacaaaatatctttaattcgaacttttaaagatagaacttaggatttttttaataagttgggacaaattcaacacagattttagttgtcggcaccgccggtccaagatttcattattatttaaaaaaataaaattggggctccttaagcaaatttacttattcatttaatataaaaaaatccggtctcctcctttccagaatttgaagaaaaagcgcgtcgcaaaaaaacatttcgaaaagcaaaaaaatcagcagatttttgaaattaaaccttttaaaatatgtgaattaaaatttttcattcttttacattaattaatcttgtactaaaacagaaggttaaacgatttttttttgttaaattctaacacagacccggcagtttcaaaatcccgtgctcaaaaacttataaaaatgatattaataattttaaatccaaaaatgttttaggattatatgtgccatgttgtgaaagacgagaacacagaaaaaggagaacgttatgagctaaaacaggcaaagcatcaaaataagccatttatttcccgcaaattaattcataatcgaaatttcactttttaattatttcagattgaatttaatactggccaacttggcggtgtccatctcgcgcgtcttctcacccaactgcaccgtcggacaatgcaaaaagcgggccttgaagcatccaaagatcagcttctgaacaatgggtcggactttgtcatcgccgaagcgttattcatggcgtggtaattttgggaataattatttttttttgggataaataacatcccaaaaacaaaaggtaattttgggaattgtatttttatttgaaaaataatacccataaaatttaatttctattttaaatatttaatacctattttcgacctaataaaacaggctgacagataatttaaactttatgaaaaataaataaatttattacacgaaaaaacgtaaataaaaaactttttttatgaatcgttttcgaaatttataccatgcaaaaatattgaaaaaaaatttatttattaaaatcagtttaatcaaataattttttaatttgattagtaaatttggtttaaaattttattacggaatatttttgttcgccaggactgcgtttggcgacccgaaagcggtctttctgttcgtggccagcaaaacgagtcgcaatcggtttggccaacggcaaattgagtaccttctcgagaaaatatcaaattacaaaatgaaaatcatccgtatttcgctgccagcttgtgccagacaaatgaagttgggacagtgagttttaaaactgatggaattatcatgctcaaatagtgggaaattggcgaacaaaagcggaaatttatttaaatattctgaggtcctgatttttctgagaaattttatataaaaatcccaggagaaattttatttaaaatatttttggaattatatttttatgtttctcctttttaacttattttagcaaaaaatcttgacaacttggtttgaaagtttaaatttttgaaattccaaaaccccgcgcgagattccgcaacttttaattgcgggataatccatcggagtccaatcacaaaaaaattgattcccaatcccgctgcgggatccgcaaatttgaaaactccggtctttaatcattaacttttttatgtttcattcaaaaaatttgaattcaataataaaaaagaaaatgatgtactaaaatgactaattgtaagatataaattttttaaattgacttttacaaaacctaaatcctcacatattgttgattctttttaaaacataaatatttcgttaaaaaaataaaaatattagataaatattttttaagattaacattggatccccaggacaacacattgcgtttgtatgggcaaaaagttgccgtcacttatatcgcaacggaggcgccaaatccgagcgacgatgaatggaaagtccgacttttgttcgaacgttcgacggccattgtaaaaaaattaaacaaataaatttttaaaaaataaacaattttagaaaagtccaacaattgggcaggatttggcaaatcagaaaaaagtgcagcaggtgaaaaaacgttattttgtgtagaaaataattgggcaaaaaacggacgactttttaatgccaacaaccatttttcagcttctgactaagccgggtatgttggaacgctttttgccggaacctgaacatgccgcaaaggtggaagcgcttcggcgatcctttgccggactgtgggctttgcacgacgaagacgagcaaaccgaacgggcaattcaggcaaatttgaaatggcaattaaacaaaataattacctattttttgccaggatgccattagaaatccgcagaattatgtgataaagccgaaccgggagggcggtggccacaacatttggggcgaagacctgaagcaaaagttgttgaccttcacgaaagacgaacgaaacgcgcacattttgatggaaaagctgaacccggtggttatccatgtgagttaattaaaagccattaaatattttacaattaaaaatgaggaaatattccaatggtttttcggtaaaaaaattgtcggatgtaaaacattctcttttaatgtgaagttttattcattttttttttaaattaataaggtttattatgaaaaatctttaaaaaatcgatttaaaatggaacttttgctgattgtcataaaatccaatgtttacattgattttattactttttaatctttttttctatttaatatttatttctcttttatttgagaatttattggtaaatttcagactgctgcttaatacaattgccttccatagatttatttgaatacataatttatgtaaaaaccatttatttaatttatttattttgtattttatacgatttgaccgtttgtcctttgtcattttggcttctggtcccggcattttccacaaaagcctggtccggtagtgccggtaaaagtcaggattcgaatcttggcatttatcgctttcgattatcattgctgtgccggatgggcgaccttttaattggcaaattcttttccatttccccgttcttttttttcagaattacattgtgcgacctatgccaaacaattacaaatacggcgaaatgaccactgagctgagtatcattggctacgcttttggcaatgtggacgaaatggaagtgaaaaagaatgtgcaaaaggggcattttctgcgcacaaaattagcccacgtcaacgagggcggcgtgtcctttggcaacggcgcttgggacattccctttttgatttgatggcacaaaaagtggcacgcagagaaacacaaaagattcaaaaaatgtcataaaaaattgctaggcaatcaccatgaacgagagaaataataaatattttgcattttattaaatttttgataaaatttggaatgaattaattttgcaattattaaccaattaattttaatgtttaaaaggccaccaaaaagaaaaattcacataataagagggcgaattattctgctttatcagacatgttctgaattcaaaaaaaattcacaacacaaatcgaacctgctttatccaatggtctataacatctatactttttccggattaatgtcacgcccttccctaattagaaattcaaaaaagactaccgttaaaaatttaaaaaataacattttaagacgcaaattgatgctcgaggcacttaatctattaaaatctcctcttctatattttttcaaaatgattcagagtgctgagaaagtttgaatcgctgagccctgtactatttggcataatttctgactgttcccaaattactgctgaattgtaatgtattaatttcgttgtatttaactaaaagtgctttaattttgctccatttcggataacatattttccattgattgttttctttaacggcgtcgtgtgccatcctcaaagaaaacgccgccgtcgatggcacaatatttgggacagatgcccttctcgccctgtccgccgggttgtccaggctgaccagaagcaccgggttggccatcgttgccgggcgatccgggcgggccgggaggtcccttcggaccaggttggcccggcagtccgtcttgtcccgcgttgccaggcggtccggggggcccaggtggtccggcatcaccttaacaatttttttagtgatggatggacaatttttacaactttcataccaggttctccgggtggaccgggaacaattggctgcgactgtgctggctgtccgggctccccgggtgctccgggctgtccaggctggcccgacggcccaggcggtccctttggcccgggctcaccgggcggtgcgtcttgcccgggttgcccagactgaccaggcccaccagcgtctcctggcggtcctggaggcccaggcggtcccggtgggcctgcagggcaaggcttacacggcggctaaatgttgcccaattttaattaaaatttcaatggaaggcgccaaagcgcaattctttctataatcgacacggtttaacaccaaagctgtgcactggctttaaccttataatattttctttgcaattcatgaaaatttggttttacattgttatntagaaaatataaataatcattttttgtaatattttataaattatttcttatttttcattagtttttttataagaagtttgacatttttaattttgataaaacacaaaattccagcctcaccggtgtgactggctcgcacggttgggtgggcggtttgcccgggttgcctggaagtcccggtgcgcccggtttcccgggacggcccggtttgccaggcgtgccggctggtcccggcgggccaggcaggcaacacgcgtcgcagccgcccccgctggccgcttgctgctggccgcctgccaccccgctggatggcgctgcggcttcgccatagcctgccgcttgacgagccgtacgattgtgcgccgctcccccggttggcaccacgtgccgcaactgattcacctccgaccaaatgtcatgagcggaaccctgcaaaaatatattgtgatcaaacccttaaaaactatattttttaattttactcataacccataatagcagaattgtaaccataaaggcattttgtgaaggttcctctgataatcgactattattgtactttacagtatgcattttgtaacaatttcaccgtttaccttacagtagttgacttcgttgttcatgctacggcgcacgtggtgcacatagttgtacaccgaggggaagctgtaacacacaacgctgagcatccgaaacgacggaaaagcaaacggcggaataagccacgaatcggtaggctttgatccgattctcaagctcaacaatcatttccatgatttccttaaaatgacacaaaatgattttttctttttcactgaaagagactaataatttat

SEQ ID NO: 2512 - DNA, 4130 bp, Heterodera glycines
tggtcagatttattgacaaaaaatggaaatttttgaattttcgagatctctgtgatttctaatggaaatgttaagaaaagaaaacgatgggttgaaaccagggctgggcgcaactggattttcaattacggaaatccgcaatccgcaattgcggccattttttcagttgcggaaatccgcaatccgcaattgcgggggtcaaaaaaccccgcaatttcccgtaatccgcaatccgtaattttcaaaaaaatttttttttattttcaaattttatttaaaaaatccaatctaaaaattggttaagagtatgatcagaataaaagctttgcatttttttgaggcgaaaaatcccaaaatatgggccgcgggagaaaaatagtaaaaatggcagattcagagttatggtcgaaaatttttaaaattttaaaattaaatttcaataatctcatccttgtagaaacccttttaaaaccaaattaaaaagattttcctggtttggcggttctggaaggcaaatatttccgtaatccgcaatccgtaattgcgcccagccctggttgaaacaaatattaaaaaaataaagcattcgcattttttggttttacaatattaattactgtaatttgaatgtttattgtttcttcaaaattattttttcagcacatttgcaatttgaaattgcgaagaattcaaactctagtctaatttgaagtgtcaaactacagtataccaaaaattgtctacggtttgggcagttaaatttctcaatgttatttattatgacccaaaatcaactttaattaaagcttcatagttttttttttctagaagaatacaaattaatccttcatgctattattcgagagctctaagaattctcagtctacggaagtttagaaaaaacgacccaaaattctaaaagaatatagcaaaataagtgaaaaagcgaattttaaaatattttggccataattttctgaacaaataaaactttttaaatatttacaggctaatggagaacccttagtgctatcgcatgatagcaagaatgtttaattttggtgcttctagaaaaaactatgaagcgttaaagatccatgttattatataatttttatggtcctgtaaactttagtaaagccgagccatcaaaaccataaagactttatctcatcatatgccgatatatgcacaagccattcccgttcttttgtcacgaacacgagaatggtaatgctaatgaatcagaaatggacagtgatacaatttcttacccttcactttcgtttgtcctaaaattgtctttttttgtcgcaatatttgcttatggtcccaatttgcttttttattaatttttttaaaccggtttccattagaaaataataaataatttggcgttcgttggccgcaaatatttccatcatccgccggccgtaaatgtcattttaccccgaaattcgttcttctttcttcagaaagttatgtgcttaactcaaagcattgaccagcagcagcagataaaaccgctttcagtttgtcaagctcattttttattaaaattattttgtttgttttaaagctgaattcttaaaagagttagcgtcgaatgattcatagccgccactcggcaaaataatttggaaaacatagagcatattgacttccaagtgaatattaagcaataaatgaagctataattggggacgcctagctaagtgaaatcaaaaaaacaaacaaagacaaactcgagattagttgatctaattatccgaaacagcgaaaactaatgaatgtaaataatttaattggtccaatgacaaataattcatcattttaatgctaatgccttttttagcttttcccaaattaacttttaaacaatcattttcagctgttcaaactttttcacatgaatgaatcacatttctcctctataaatatttaaggccaaaatttgttcatccaaaaaaagtcatttccaatttttctattctctctttcgtcactaaattttcattatttcaatttaaaatctataaggcttaaaaatgaaattcataattcttattttattgatgcttatatatcagttatataattccctgcaacaggtataataagttaaggaaaaaattattattttttaatggtttgtattcaaatattctatttttgtataaaatctccaactcaaagatcctttatttttattttatgttttgttttaaaattgaaaacaatttagacataatttgttaacaaatcacacctaaatagttcaaaacataaatggttcttgaaactagaaaatatgatacaatatgaatgaaattcgaatatgtaagagagaagaagctgattgattgctcatttacagacggacaatcagcaaatggaagagcttcggaagcaggaggagcaattgtgggaccaaatgagcgatgtgaaagacgaaaagcaaagggagaaactgaacacggaactgcaagaagtacagggcaaactgaacacaatttatggacagatgaagcaaaaaaacacggaatagagaaggagaacaatttggaagtgattgatgatcgatcgatgagacacaaaatattcgagaccgaaaaaaaagaattttctcgagtagaaaaaggaaaatcacttccctaaaggatgatgaagaatggcgaactttgctgggctcaaaacaagtttcgcttcttagaaatgtattttttccggcaaaattaatcgaccatttgtcaaacaaaaattttgcgaattgagtttcgggggtgttctaaatctctcacaaatttttgaaattaaatggaaaatttatttaggaaaaacgccataatttcggtaattcgtaaactaggaatacgatttttaggttctaaaaaccccccaaaaataattgttaaaaatgggaaaatagttgctaaaaactagagtgcagcgggaccgggaattttgggcttaaccgggaccgggaccttttctggttgaaaaccgggactagtcccggtcaaaaccgggaccttaattttaaaaatcaaaattcttgtcaagaaaataaataaattattctggagatgaattttaagaaatttttcatttattaggagtgtattttcagaaatttttggtcgatttttaggggtgtatttttcgtttttattgcattttgttaataattttcggcaaaataccaaaatagggtaaaataggttgtttcaataggttttttaagttctaagaaataaaaacctatgtatatagattttaaaaactcgaagtatcttaacaacagcaaaaaaaacatgtttttcgtgcttttgaggtcacagggagctcaggaaaaaataggtaaacgcctaaaaatcgtatccctattcgtaacacataattcgtaatttaataaaaattatttattaaaagacaaaaatcattcaattgaatagcctgttaaaagctttttgcatttttagggtgtattttagccgcaaaatcttgttttaattgggaaaaatatgccaatttatggggaattttttgattttgggtttagcaattataaccgatatttatcaagtattaccactaacttttcttagaaagaacttagaaatcttgaaaaatgcatacaagcataactttttatgctgatcaattaattgcttgggaacatctaaaaaactaatttacaatatgtttttaaatctatttaatcattttttgaaaacttgaaaaaacatcggtcatttgaaataataaatgctaaaattttgtccaggaaaaggtttttccgtgttttgcctggacctgattttttcacatttgactggatctggatttactggacatgttggtctcttaactgattaaaatgaggtccggacaatccgtcagtaattgacaatcctgacaatccttcagtggattatccgtcagtggacaattcgtcagcaaatttatttttgagcaatgatcaaaaatcttgtgaaaatgattgttaaatttaacaaatataattttcattgattcttaacgtttctagtttcttgtacttcttttaattgacgatctcgaaaaaatcatcatttaagtttttaaaaatgattatttcataattttta

SEQ ID NO: 2513 - DNA, 3505 bp, Heterodera glycines
  unsure (1)..(3505): unsure at all n locations
agcccaaaaatagcattttctccgaacaatttttggcttagagcgacttataaaaacataaaaacacatattttggcgttttggcacataaaatatgttagcacatattttggggtttggcacatattttgcacatattttggcatttttgagaaaaattgcaataaaaatacaagaaaattgaaaaatacacccctaaaaatcgacttttttcctaattattaacataattttcaaattaaaaaattttttcttcgattgtagaaactaatgaaatctcgaattcattaattcgtcattggatttcgaagttctctgctggaactttcaatttatagaaatgatttatcaaaaaaagacaattttaccccaaacacttcgaaatgtatttgatttgcgttgtatgggctaaaaatgataaagaatgagatttttgggaatttttatgcaaaaacacacttattttttcaatttttaacacatattttagcacatattttggcatttttgggggtttttagcacatatttcagcattttttagcacatattttattacatatttcaggatttttagcacataaaaatccgagccctaattatatggcaccaaattttgtcatgtaccgatttaaatcccccgcataagtcatgggtgccgaaccgtcaatttaaccattttactgattcctaaccaatttttaacacaccaatcaataaaaattagtgggtgtcgcttgttagtatccacttgcaatgaaggggttcaatactcgaacagaacacgaacaaatttatgcacggaaataatcatacggatgaagcacgattttgggacaataattaaatagttaaagcctaagagattcagaacaactagcaaatctccacattacgcaatataaagtcatcatcatagatcggtcctcccattatgctttcttctccaattcgatcaggtgtttcactccgtcgtacatctgcttcaccgcttcgaactccgtgagaccaagacgggccttgttgctgatgtcgtaaacgccgccagcgctaaatagaggaaaattgtttcaaaaacagaacaataaacaattacctctcggaatgttcgccgtgaatcccgcggatttgcaatttcaggccgtcgcagatggacttgaagtcgggttttgcgctgatcttcggaagtcggatatgcacactcgcgcgaacagtcgttcccaagttggtaggacagaaagtcagccagccaagacggtcgtcacgcgaaaacggaactttcgattcgatggccttgactccctttatgagacgctccagcacttgtccaacattgccgccattttgcatcgaaatgatacggaggtgcttaattgaaaatcgatatcaagatggaatgaaacaaacaaacatacatcttcctcgttgacccacaccaaaaaggttttcttggcgttatggaaaattccgcgtccggtgggccaataacggcaagcattggcctcctgcagaaaacggtcgccctctttaaacaagaagtggtcggcaatcagctaaacattcaaaaattaatggcttattatttgttggatcgaacctgattttggacgtccttggtcatgccctggagcggatagtaggtgcctcccaactcggcatctaaaacataatgttacaaagaaaataattagcggttgcataccgcccttcagctgctcgaagaccgctttgacctttgattccatctcgacgtaattctccttggtcaagcatgggttgaatggatacccctgaatacgactgttttttggtatgttaaattcaaacaaacacctgaagagagcggccgcaacgaacgcgagtcgaattgatgaatttcccctccgggtccaagtccgtcagcagttgagtcttcccctcaccaaggtccgttgccggttgcttgctgctcggtccaaagccaccatgatagtcgttgatgatcgggtcgaacaatggtttgaagagtgtgtaagcctcggctgaatgaatgtttaatggttgtgattatgcgtagccatttaactgaccatctggcgcatacacgccgacaccactgtccaagttggcaacccccgactggatgacgtccaaaaaagtcgctccgagcttggtacgcttgtccttgcatgcatcgacgacgtccttggtgaggtacttcttcaacaacgatttgcaatcagccgccgcctgaaagttagttcaaaattagaatagttaacacacacattgtgtgcacctgaagctttttgtagccagcctcaattttgtcaattacttcctgagggacagccattttggtttatttcaaataatatgtgtgtctgaaaataaaaatatgcatttaaagagaggacaaagttagtgtaagaaacagagatgattaaattggagttcaaaaaaatgagtgaatgacggacatacgagaacgcatgaatttatatactaaaatttctctggagactcactttggctatgggtcaacttcactgtgcagagaaaagcatagtatttcatcgtttctctttttctttgtaatttttctcactttggcgtactatctattcattttaattacctatataaaaaacaacatttacttcgtgacgtttacctttttatctacatgttaaatccgctttaaactttgcatatcaatagagaaaaaaattctgcatagatttctatgttgaatttttgaatttatctgttagttcaagttataggacaaacaaaaaataatatttcttttcctctcatcttggcgttcttttttcaagtctctaacacatgaaaaaacatcaattcgcaaattctaataattttgcttataaagatacaaatcactttggacatttagaaaaaataaaaataaataaattttagcattttggttaaaaagagctgcctagaccttgagttataacgtaatgaaaatttgaaactctcacaactttttttatgagttaaattgcttaacgtttttaaagttgagatttgtgtaactctcggggataaaagaataatgagaggaataaagttagcaagcaaagtaaactgagatgattttgataacaaaggcaaaatttttaaagatgcgaaagctgaggtgaagaaagaagtaacctcgacgaggagaaaagtttgtattttatattgatcatctcagtcagcaaaagtccgactcaacttgtctacctgggatgaaaatacaagaaatggagagcagtgaggagaaatgacagcagttatgtctgtcagctctcactaaatgagagaaaagggaaatgagaatttgtgaaaggagcagaaggcgctgcttaaaagtgcagcagcagcagatgaatgaagcgataatgaaaaagaatgaatgaatgaaatgagggagtgacagaaaagaaggaaagatttaatgaatttcgagaaaggatatgaaaangtgtcaaaagttaaacnaaactagagga

SEQ ID NO: 2514 - DNA, 1907 bp, Heterodera glycines
taaatccgcttaaaccttgcatatcatagagaaaaaattctgcatagattctatgtgaattttgaatttatctgtagtcaaattataggacaaacaaaaaataatattcttttcctctcatcttggcgttcttttttcaagtctctaacacatgaaaaaacatcaatttgcaaattctaataattttgcttataaagatacaaatcactttggacatttagaatcaaagaaaatgattagttttagcattttggttgaaatcatcaaaatgattaattatacatttttaagatgctttcaaatcgcataagcattttgttgccgcattgtaaagtccaatttggcatccgaaattggcatgatcgttctcaggtgcctcgcatttttgatgatcggagaaaggcaacaaacaaaatcaaagacgtgggatattactttcgttatcatcgacctggaatcgacgcattgccgcggatccccgactgcaaagagcagctctaccggccgaaatacaaagtggggccagaaaaaggagagtttagactggttgtgtcttccgggaatgaaactgtgtctggaagattgggttacctccattttaaagcacattagcacaacattcggtgaattaccccgttcagcgtttacacggtcacacgaacacctaacaatcgtttgttatccattgggtggttttaaattattgtagaaatacaatatttgatgtctgtttatccctccttaagattcgtgagccttggcgcgaaagtcaggcgagatttggcgagaacgactacatcgacctgctcggagacggctctctccatccggcccaacttcagtaccacgtcccccgttggctgcgcgggtttcccgggcaaaacagagcgattgagccggtcaagctgatccactacagaaacctgtacaagtcaaagttggagcagaattcgcctcacaaatggcaccagctgaacaagcgcatcaaatatttgctgcaatatcacaactacgacaaatcggacgaattgagggccgaacggtcgctgggactgtgggaggaggagccggactatttctacaaggacaaatcacgccgatcataccaagaccttgtgtagtttattgtttcgtcattcagttagtgaaaaatgcattggcaaaattgggacaattacaacacaaattttattggcgtgggaaaaggaaaatgttccctcgtggcacccaattgaacgtttctcgacgtgaagtggccaatttcccggtgtataggtcgatgttgatcggcacgaactcggacccacgaaggggctgaaacagtcgggagaacacttacaattagtcccatgcccggaacattgggtttgagttccacagtgttttgaccaccttggactgtccaaatacgctttggtaacgggtcgacaccaacttccttctgctcagtctctcattggtcatctgtcaaaattggtatttcctcccctttttgtgatctcaaaattcaccggatttttgttgtccttcgtttgcttttgctcttccctttctctcccttttctcgtcgtttgtctgttcgccaatgatttggccattgccttcggctgccaatgtcccttttccccgtagccatcgctcagtgctatccacgggtagcgaaccctcacggacttttggcccttgcgaagaaaaccccaaaataacgaataatttacggtgccttttttacgttatttctctgcgacagcaccaaactcagcaaaagaagcgaaggaacaaatttcaaaagcattggaggagaagaaagggacgcaatcaaaagcgaagcaaatgccgtcgccactggccggaactcatttaaataaattgtgcaaaaatgtaaatgacgactaacggattggccc

SEQ ID NO: 2515 - DNA, 2199 bp, Heterodera glycines
tagtaaatggtacgctcgtccagcagatgggccgggatgacctctttgatcactttctctttcaaatccgatcggaccacctccaaatctccatcgaactgtttgtgctgggcggaaatgacgacggtatgcacgcggaccggcacacaggcgcctttgttgaatttgtactcgacggtgacctagaaaagcaatgagaatggcacggccaaagactcggcacacctgcgacttcgagtcagggaaggaccagccgagggagccatccctcctcagctggtgcaacttggccaagagtttgtgcgcgatgagcagagacaatggcatcgcttcctccgtttcgtccgtggcgtagccgaacatgagacccttaaagaaggcaaaacaataaaaacagcaaagtgagtgccctgcctggtcacccgcgccgatgtccttctcgtccgctttgttcatccaaacgcccgccgcaatttcgggcgcctgctgctcaagttcgacgaggattttgcatgttttgtaatcaaatccttgggaatttgaagtacggtgaaataatgacaagtcccgcgcttcatcatttcgtcccctttcgtttttagatcccccccccccaattttcctccctttcgtcatacctttgttcggctcgtcgtcgaatccgatcttctgcacgacatccctgaccaactggcgatagtccaaattggctttgctcgttatttcgccacacaacaaaatcattcccgactttgtcactgtctctgaatcgcttaagtcgtcaacccaatttgcctctccacaattttcccaccgcaggcgacttttgcgtttgggtcttggccgaggtgggcatccaaaacggaatcggaaataatgtcgcacattttgtcggggtgtccctcgctaaccgattcgctggtgaacagaaaagtttgacctaccgcttctgaatcgaaaaattgtgtattaaacgaatgaatggccaaggaaatgccgaactgaccaggaacgacgtcaacatccatcggaatcggaggcattttatgggaatttggaacaattaaataattcttgacgagctaaaaagctgaggtcgtgaaaagaaaataagaagaaatgagaatcaactgaaaatgcaaagcaaaataaagtaacaaagagcaaagatttgaaattagaaatatgtaaaaaagggggaaggatgggaaaagaattagaagaaaatgaaccgacggacgaacgacggaatgaataaatgaatgagcccttctttgtgtcacccaatatgatcattatttattcaattcgcatacaaaaaaaaattaacaaaggagatcacaaagatgagtccagggaccgctaaaatttaaaaggcaaatgctaataccctaaaagatgttgaatcctgtgctcataattagggctgcctattttatgtaaatacatatttttttcctggcttctccttgctctaaatagcaggaaaacactttcttttttgtgtttgcaaacaaaaaccgggacttttatttacatatttttacatatttcgggattttcttacatatttgtacatattttggtactggattttttcatatatattttcatttttttacatatttttacatattttgaaaatttataaagaaaaaacctaaaaataccaaaaaagtaatttttatgtcattttgtggctatttcatactttacggggattttctttcccaaaaaataccattaaaaaaaatttttatttacatatttggggttttttgtacatatttttggcagccctactcataataaaatgaaatcagaattcgccatttttgttcaaaatacattaattaattattctttaattttttgaagcattattttttcgcgatataataaattattcaggggcgtacatttttcgggggggggggggggggacctgacctgaagacctttttttttttttttgctatttaaccaataactttttttccctgctgggtaacaactgcactttttcactaaaaattaccaaattttggccgttttaaggcaaaaaacttgtaaaaatagtggaaaatgtaggtccggcggtgccgataggcgccgccggaaaaaatttttggaaatttgagtgctacttgttacgaaatttgcctattaaactttttaattttcgtttggggggggggg

SEQ ID NO: 2516 - DNA, 1446 bp, Heterodera glycines
tcttcggccccttgggcacgttcattgcgatcagatcaaatcccccaaccggcatcggaggcacttcccattgctcaatctctgcgcgcattttcgcatctgtccccacatatttcatcagttccacacactcgcgtttgatctgttctctcatttctcctaaaaaaacaaattctgatttggtcccgcctttctgccgacctcccctctcgaaggtttggttcaatatgaaatgtcggaagtacgacggattcgcccgttcttcgctcgcctcttccctccgctcgacaatcgtctcgcaaagccatttctccaaatttgaacatttgcacagcgattggaatttgttaacgtcgtccgaatttgcaaaaagtgcgctgagtgcggtgctcggctcaatactcaatttcccgtcgtcgccgttgggggcattcagacgcgaaaccctctcgaattcatccactcgatcggggcgaagtgcgaggaggggaccgaggccacaatcgaccaacatacagcgcagcacgggggcagccaaccgccccacaaggatttgatgcaattccatccaaattcgctcaccactgacaccctttgggaaggaaattcaaaggcaaatattattaaaaatgagtgttaatgggcacctactttgagcccatctcggcaacggacgatcgcttccaaatttttctgttcatggggcgcgtccaatttggagaaacggccgaagaagcgaaagtatcgcaaaatacgcaaataatcctggaaatgggctgtttatgtaactgcaatggactgacattgagcaaagttaaacctcctgaagcctttggatggggtcaccgacaaaaatgatgcgccgctgtttgacgtcttcgataccaccggtgtaatcgtagatgagcccgtcgagaccaaggaagagcgagttgatggtcaagtccctgcggaaggcgtccaactcccagtcggtggtgaagttgaccttcgccctccgtccgtcgcacaccacgtccacgcggagggttgtcacctcgaagttctcgcggtcgtttatccgacatgtcaccgtgccgtgctcctcgccacgcttgttgaacattctgatctgttctcgctcaaacatctccttcatttgagttggcgtggcgtccgtcgcaaaatccacgtcggacggtcgcgtgcccatcaaaaggtctctgacagcgccgccggcgatcctttttggagaaacattaagagtaaaaaaagcattaagcaccgaatctcgaatccatgcccctcaaacagttgggagagtcgggtaagttcgggagtaaacaacgtacgaaaggcctcagactcatccagcttcattttcacgagttttgacaatttcggtttcgcaaatagcgtttgaattaaacgacgaacgatcacattcatttactaagaattagacaa

SEQ ID NO: 2517 - DNA, 1054 bp, Heterodera glycines
tgtgctgagggtttcgctgatgatgtcgaagcatttgcattgtcggtggagtggccggggacggagagtcctattaacaaaggagacgatggaaaccctaattaagcaatgatgccatttgccagttattacttccatttgccgttgattttcttcaacaactcttccaatgtagtggagggaagaaaatgttgggtcggaaacgtaggaagaagtggacggatggtcgctgcaaatgctgcaccctgtcaaaagctcggccagaaagggcacaaatgcctgaagttcaccagtgtaaacacaaaacgatggaagggaaagacctgcgatcggctctgtgcttcgctggaactgacagcgtttgactggtcggaaggcttggacaattggagcatcacttcgccaatgtgcagattcgtgtcgcgttggatgtcttgctctttggtaatgcttgccaaacagttgcgaagttcattgtgttcagcaattcccgcgttattcggtgactctttgaacgccgtcgatgcattgttcagaatcttccaaattgcttctgagtagcccccgaaaccggccacttggctcagcaaacggccaaccgcagtgtgtggggggagaaccaacgagaatcgaaggtagttcagccagtcctctttgcaagcctaacatttttagagttggcattgatttaataaagaaagaaaataaagcatggcaccttattctgcaagagaacaacataagacttgagcacattggccaacaaaatgtctcctcccaaaacgccaattgtaattgtcggaggcgacaccgaattattgttacaactaaaagcccaaatagtgaaccttcaaaattagttaaaactcacaaattctgaattctccaaatgattgcttgcatcaatgcccgaacacttatcgatgatggacagtcgagcagacaaatcgggtccaacaacttgttgtttactgaaacaattagtgggccaattaacaaattccgaagtttaacaacaaaaaaaaagtatggaccctttgaaatccaaggcaaa

SEQ ID NO: 2518 - DNA, 1932 bp, Heterodera glycines
cgctcattaaggtgccaaactttgctgtccccgtgcactcactgatctggacggaaatgaatacaaaaattggattgcggcggaaaatccggacatggacattgtcatttctgcgcacctttcaccaaattggaccgtaccatccaccgtattcgagctgacgtatgaatcaggcaaggaaaatagaaaaataaattttatattttttaaatttaattttatttttaaattcttttgttttaaatgtttttccaaatcagaaccattattacacaattaaaactgttcaaaaatgttaggcaacgccaaactcatcaattcgagcaaatgccctcatgccgaaaatgtttatgccgagaaaaggaaccccggcaccggcactttgcgttgttataacccgacaaagaatcaatattatgactgctcctgtcacggtgataagaaatgcctcgctgaagaaaaatgggcacacgaccgctttctttgtccaataatgcaggtaattaatgaattaattaattattaatgtattaatgccaattaattgattaattattaatgtattaatgccaattaattaattaattattaatgtattaatgaattattaatgtattaatgccaattaattgattaattattaatgtattaatgccaattaattaattaattattaatgtattaatgaattattaatgtattaatgccaattaattgattaatttaatgtattaatggcaaaggacactgtgccgccgaaacatttcatataatactggcaatttaatttttttggccataaaaattaccattttttgtatcaaaaaagcggaatataagaaaaaaataaggacaacaagcggaaataaggacaaatatggcaaatgataaaccctcatttattaattaatctgtaaattcaaggtcaatggaattcaaatccaaaaagatcctcgatacaattggactcgtcttgatattgattgctatgtgagccgagttttactgtaccttttcaaaaatttgtttgattgactaattttacagaaggccgaagcgggtaccgtaagcttttggggctacagtaagccggacacaaaggaaatcattcgggtggacgaaatccactgtttgactgatggagtgctaaaacggttcaagagtttgcaagtcgatgaacagtcgccgatgaaaaaactgagtccaacgagtccattcttggccaataatgcttcatccctaatccacgtgttcgtgccatttgtttaagtccctctcatacatttatgtatttttaaacacataatccaccagcatgggcaaatataatttgttggctaatatctctcccctaaatacacaaaaaaaaaacaatgactaaattttgatttaaatgcatataaacaattaaacatttaattaatgcctgtggcggtgtctgtttttgtttaatttgttaatttcatttttatgacatagcaatgtattttattcatttatctaattattttgttgttgtttttatttcttattaaaatggataaataaaaaatatctcttgaaataaaaaccgcaaatttttatttgatttttaatttttgaatatttaaatacagtaactatacgcattttttaacgaatcatccaccagcagcagcacagcacgtgctataatttttgacagaaattacacaaataattctctcataaatagaaaaaaaagacaaaatttgaaattacaattaaacgcatcgaaaaaaaaaattaataaaacattattcatttattattttgtctttgtaaaatccgtgccaaaacccttccagacaaaaaagtgcaatgaaaaatttacgtacaaaaaataaatttcaaattaaataaaattttaaaaaacaatagaaaatatataatattttttcatttctgggagtg

SEQ ID NO: 2519 - DNA, 1146 bp, Heterodera glycines
caaattgtagtaattatttgacccgggagccgcgcaagatttttgtcttgggctctcgtacttacaattcaatgacattgaaatggttttacggcaaaatcaaattgttactgagattctgacctcatatgctttggtgccataaaagccccccccccccccttgaaacccaaaaaataaaattttccagtacggatgattttctgatgattttgccaataatttgtaaaaataatgaatgaataaattacttttgtcatttatcggtgtccacaatctctgctacaaaatgtgtggtcgtttgtccgctttttcttctgctggtggcttttcccccacttttttacacgtcgacacagaaaattcagtgatttgtccaacgacggaatttactgcaccaaccaattccatcccaccattttcatccattcatttcatttgatcatttgggaataaatattttattcgtaaaataaaataaaaatattttttaatagtaaataaattaaatataattaatattaattaactagcaaatgaactctttttctctattgaccgtctttctttgcttggtcattaattgctcagctcctccgatacggtaatttcataagtaatcaaaaaccaataaatattttaaattttaaaagcatttcaaaataatcgagtccaagccttgattcaggcctaatcaaagcctggatatttggcctgaatttttctaatttttcaaaattttcaatttttcagccctttgtcgtccgacgttagcatttggaaattgtgcaatggcaaaaatgggaaaattttggtggaaaatggctgcacaaagtaaaatatttcaaaaatttattttaaattaactatttttaaaccatttttaggcttcttctctgctaccaaagcgaaatggccaaaaacagaaaaatcggaaaacgttttggggtgggcaaaggaataattggcaaattgaaatttgtggaatgtgccgaagagattgccgaagaccaatggcacggtctgatcattacgaagcaccaagacggagtgatcagctacgaatcgaggcaaattgggagagataaaatattttaaattaaggtgggagttaattaagccatggattcgacgacattttcggca

SEQ ID NO: 2520 - DNA, 3291 bp, Heterodera glycines
caaaagtaaagccaaattaataataatattttaataataattattattttacagatgctgaaccactcggaaacgaacttcgagaagcgctttcttctgccgcatttttggatgattttatgccatttgttttggcattcgaatttggcacaaaattttgcgcagaaaaggccggcaccaacaaattgtgcaaagagaaagtccaatttttttatatttaaaattctcaatttaattaattttgatttttagtgccttacaaaggcaccgtttgttggcacaaccaaattccatcgcccaacaacagcaacaacaacaacttcaatcccgacaaccacggaacaacaaacattttcgtttcaaccattttccgaatttgtgtcccattttggcactaattgttcgaaaatcgttttccccgtggaggtggccaaattcattgtgaacatcaccgctaggccctaccgaattgcgtgcaatgactatgaaaaagagtacgaaattggacaattgccaaaggattatgtggcaaatgcatacaaaggtttcttcaatgcttgcatgtcagtgccgacaacaaaatgcgcaaagtgattgaaattctggcacaaaaatttggtgccaaattctcacaaattgtgttttaggcatgcggaactgaacgcatgctataaaagcatgaagccagtggtgccaagcaataatgccatcgccaaattatgccaaaaccatcttaatgaatcgaatgctgccggatttgctgtacaaatttgcatccatcgcgatgaaaaggaacagaagcttgtctttgaaacatttttgaacctttccaccacagacgaattgtatttaataatctcattaattaattattaattgggttaattaagcatcaaaatgacgcgcagctaccaaatttccattgaagaaattatagagacaaagaaaactattcccattttctttctcgaatttggcaccgatcaccaacaaagcgcaatccgtgaaaaagccaatgggaaagtgatcagcgaatcactgaatgaaaatgtgaaaacaaaatcgatttttatttatttttaaataattaattaattgaaatttaggccattggcattggcaccgttctcaatgacatcaaatcagaaaaattcaatgaaaatttggccaaaatgattcatttggtgccgcctgttgctgatcggatgctggcatttttccagattccaacgccggagttctccaaactgatcagtgcccagacgaatttgaagccatacgaaaataacccaaaagaagtggtaagaaaaattgaacaaaatccggcaaaaggattgggccaaaccatcactttttaatttaagccgagacttggaatggagccgaactttttaaaagtttttcagaaaattatcaatcatatttaaatgaaattaatttttaaaaatttacaaataattaattttatttgttccaatcatatttgtatcatcggtgggcattgtttcgcggagtgtcaaccaaaattacaaaaatgaaaattacaaaaattttagggcagatcatcaagatgcgacacatatggaaaagactgtgcagtgatcacgaaactgttgaacaaaattgaacaattgagaaactgtaaaaatgaaaccattgatacggtaattaatcaaagattttctaaaaaaatagaaaataattatttgattcttttaaattcgagaaaaatttagtttttttgaaaaaaaatgtgtatttttatttttattatttttatttaaatataatttaaattgttttctatggttgggttgttgtattcacctgactaatcctcttctcggaattctaattatttctgctccgtgtgcttaaattacgcttttaagtctggttttcgccttcccccatcggtcgatgttccgtcacctgcgataccgtacctaagtccgaccaaaacattgacgtgcttcggtgatatgtattgtaacaaagaaatactgcagcaacaatatgaccgagaacgcgaaagtaagttgaggaaggaagcattttaacttactgtagtcgattgttactgtataaaaacgggtttgcttcttttgcttgggaagggagcataaagttactgtaggtactttacagtaaaaaatgtttagttcttttgcttaggaggaaggattatttactgtagttgactttcacagtatgaaatgggtccgttttttattggggttgtagagataatttactgtcgtcaatttgtaagtaaaacaccaataagagcttgtcttgggatgggaaatgcgcacgggattttgctggtctctgtccgtgatcccgcattttttcgagcaggaattaggggttagttccgcgagatctctccggtccaacaaaaccttagaaaaacggagtattggaaaatggctaggcctaaataggtatgtgatcaatcaatcaatcatcaatcaatcaaaaggatgtgggctcaagccagaaaatctgatcagccgtcggaaaaggcaatttcgtccgttgaatggaacacaattgggcaaatggaattcgtttccgatcatgatcagttccgcagaaaaaacgtaagtgattttaattaaaaatgaaagccaaaatttttataaattttaaaatccgctcttggccaatgcttcatccatcacttatccatgtgtttgtgccatttgttgaccgtccatgaaaaagagagatcagtgatcagtgaaatctgtcatcatttgaaagctttatgtgtgctccatatttacatgtcaaaatataaatgaagaatgcaaggcgtacaaaagttatattgctggcatgtggcgccgggaaagccaagaaaaaagtcggcgctacttgcaaagagcacaattttgaaaattttttcaacttttttttggacaaaattttttttgtttaaaaagtcctgaaaccaagtacccggtgattttaaaggtagctgatctaaaatatgacaattatttgattctatcgcgaatatacctataatactgcgtaatcgtgctgctaatgctgattatgctatcagagattgaacaaattgaaattgaatccgattttggacatatgcgcaaatgtttgggcacgctttttctaccttaaaagacacggcttaagaaatttctatctttatgtatttttcagtgcgaccacaattcttaacaattacatcattgccattgttagggcaaccgattatcagaacatcacaagtaattagaactatggaatctcgaaaacaca

SEQ ID NO: 2521 - DNA, 1552 bp, Heterodera glycines
tcaagaatatgacaattatttgggcctatcgtgaatatacattttattcatcataattgtgctgttaatctttaatattcatcattatgtgtaaaaaaaacaaaaaaaaattttgaccaaaaaaaagttgaaaaaattttcaaaattgtactctttgcaagtagcgccaaaaagtctatttttgtggtttttgtaaactgacaaaaaaaaaaatttttttttgaagtttcgcaaactaatcaagaaccttaaaagtttcgaatgataccaaaattatttaatttggtgataatgacaaaaaattattaacagtcaaacaaaattcttctccgagaaaaattttggtaagtcttgaaaagtgtcgaagagaccgaaaacccgagacgaaactcaaaaccgaggccaaaaagagcccgagacttttctcgagtcgagactcaagactgtgaatcacgaacaacaatgtatgcgaattgcttttgtacgaattgctgcaattgacccaaatcaccgggaaccaaaaaggcaatgctcgcagtgaattttttgaattagcgctgcaaaaaatagtcctttttggcgttttgagcgctttttatctgatactgtgggtggaccacaatagatagtggtagtacattacaacagcctggtaagtttcaaatttgcggatccctctcgctgtcccgctgcagaattggaactcaaccattttttttttctcgggatgagatcccggccggattaatcccaacaaaattttgtctaaatttttccaagttttaactaccaaatgatagtttagggaacacaaaattttatttgcaatggctgaacccgttgaaaaaaagaaaaaacttttccccgccgccgaacattgctcaagttcttcagcagccgaaattggtgaaaatcagcagcagagctcgtcgttgggttcatttgtggcagaaattggaagacggcaaggattttattttgaaaatcgaacggaattcactaatagagcccgggattttgaaagtaccgggacccagggttaggcatttgaccggcccgaggcctattttggtcaaaatgacaattttgggtaatagtaccgatggtatcacaccttttttgaaatttttttagaaaatgtctttctccctaccaatattgatgatacggttttcaggggcgctgaactccactatggcatccatgtcactcgcattcctacccctgtgtgcttttcttgcgatcctcgtcctcttcatcctctcgaaacgcaccagttgagttgggatacccgcacatcagctgcattcgattgtgtcactgcccctcgaacaaaagaccagagcgccaccgacaaactaaccctcctccagggcaaggctgttggcataagctgctttattggacaacatcatccactttatcaccacaaagcacatcgacagttgtcgctatccaagaaacaaaatggacctccaaaaggcgtctcgccaagcgccctggactttcactatccttcgcaaggtacagacccctctgccgagggtggcgg

SEQ ID NO: 2522 - DNA, 1528 bp, Heterodera glycines
  unsure (1)..(1528): unsure at all n locations
gcttaaggcttggcnctaagcctaagcttgcgcttaagcctagcttaaggctttggcctacgcctaagctaaagcttgcgcttaagcctagtctgggctcttggcttaagcctaagccactgtacgagttgcgccttttgtacaagttttgtcatgacaccctctccattccgcaacaatttcagctgggtgagcaacgacgtgtggatggacatttttccccatttcaaccgtccccaactcggcctcaaattggcgctgctttcgccccgttttgatgcgttggtggacacacatttcaatgcccaacacgaactgacactttggcgacccatcgaaattaaaaaacacactgtcgctggaagtgaaagggccgaactttctgtatgcgtcggtggtgaagatcggaaatttacgttgcccgaccgcccgctgcccaacaacatccgctttgagagcctaaatattgggtatcaaattcttcaaaaatttagggggggaggcggggtgggggcaacgccccgccgggcattcggcgcggtgcggagccccggcattcaaggcccggcttttgcgcctatgccccaaaattagtttcaaagttcaagcccttaaattacgaaaacccagttttttcactatcggggattaacaaatgtaagtttgaacccgatttgagacataggcgcaaatacccaagacgcaaatatctgtacacgctcgagacttccgttggtcttgaaagattcgggggtggaaaagtcggcaattttcgggatacgaaacgggccaattccgggtgagccaaagttttttctttgtttttgacccaatccaacaatcttgtgatacatatgtatcattcgaaagctcttcataggctctattagcctacaaataattatagagaatgtcgaactgtaaaaaagagaaaaaacttcaaaaattctgcctttttttgcggttttcaagtgacaactttttttgtgagttaattagtcacttagaaagcatagaaatatcttctaaacatcaaaagctttcgaataataccaagattgttggatttgggatgacaaagaaaaaagttatagccaaaaacatgttggcgcccaaccgtgagtgcgccaactgctgacggattccgtttttttaaactttgcttagatggagatggcctctacccggtaggggtcagttccgtctgagccaagcttaaagcattataatttttttttcagtgggccaaattttataaatttagtatcgttcgaaagatatgcatgtttagaagcttttgataagctatttctaagcgattgaacaacttataaaaaagttgcaacatgaatattaccaaaaagtcagaatttttgtatatttaatttatatcttttttacatgtcggtatttctttgtgatttttgggaagccaatagagcttgttaagagctttcgaatgataccaactttgttggatttggtcaacaaagaaaaaagttatgatgatctaaacttggctcagacg

SEQ ID NO: 2523 - DNA, 2721 bp, Heterodera glycines
tcctacaattagttggttgagtggtagtttccctgtcctctcaagctcgggttcgaaccctcttccgggaattaattttctttttttattgaataaaattccgccgatctctctactaaataccaatttccatccatcttcatttatttgatggtctaaatgccaagaaatatcaaatggctttttatgcaacattttgatggcattccgttccaaaaattgttggtgtacaatacaaacgcacatccaacacccaaatttgaatgtcttccgtcagttcgatggtgtgcctcccgttcagtttgtagttgagagtgcgcaacccgctcaaagtgttccgtttacgcctcctctgtaaaaaaatgttggattatcccaaaaaaaattttgtttcaaaaattggaaacgcacctaaaaatgaaccatttttggggatttggcacctaaacccaaggttattggatgcttttaggtccctatatttcaacaatttttgaaaatgaaaagaaatagaaaaagttttaaatttgaaaaaaatgtgtgcctcattacgaccatatttattgttaggtaaatatccaatttctgtcatttttgacaaaattacgattttcaattcgtacaccgtccaaggcctccccctcatccaaatttctcaaaaatccacaaattagcaattcttgttgcaagtttgttgaaaaatatggccagaatctcaatttttcggcacttctgagtccctccctccccgaaagtttttttgtggaaaaaaagtcgctaaaaaatgcctgaaaatatatgttgagctaaagcaaaaaaaaaaaaacgcccagagcggcagcccaactcgtactattatgtagtaaatatagaaacagaaaaaaacgagacagcgttaagtcatcagagaacagagaaaaaaagatactctaaattctcagcggggggggggggtaaacaacataagtgcactaaaatttcatttacccatgcaattttgacggaaacactgcaatctgtacaaaagtgatgagcaacagcaaaaacacagcgacgaaaacaaccaaaaaacttctccgccggactttacgatggaaaaggaccattttatgcttaaaattcggcgtacaaaaagcaaaaattggacgaaaaatgttaaaatatacacagaatttttaaattattccaaaaatgaaattctttgcaagaagcatggaaaaattgtttatcaaaagcactaacaaaaaacatttgctcatttttttattgaaaatgtattttgtcggtgtcaaacatcacacgccaaaagttcaggtcgttgtcagtttatttcccattcgttcgcttcgctcattttccgaactgttgattcgctgccctcagccggtctgatgcccacttggccctggtttcccgtgtaccgcagtcatatatgcgtcctcagcagcgcgcaacaacccgtccagcagattttcgaaattttgggggtttccgtccagcgcatcgccaacagctcgcatgtactcggcatgcggaacggtttcaaacgacacttggtgctgttggcatttctccaaaacaatatttcttaccgccctagcggttcgtccattaccatcgccccaaacatgggctttgacctgtggaaaacggttttgattttttctgttatttatgtggtacaaatttctattttcacgagactgttataatttattttactaaccaatttattatggacttccgccgcaaatcgcaagattccgccttccctttcattgttttgcacttttactatttcgctgttcagccatgtcaaatagtcagagtacagcgctggcacctccttgaagtggggaggctgatgctgactagtagagccatgtacaaccacatcgtaggtacgcgggggcagcgaacgcagttccttgatcgccttttttcgaatgtgaagcattttctggttaaaaaatgaataaattcaccaaaattgttaaaacaaataccccaaaacgaccaaagtttcacatatttcaaatcccggacccgaattgaaacaaaaggcgaaattaatttttcaccaaattcacatttaaaaacgattcaaatagacgggaatataaaaaatagagattcacggccattcagtgcacttgaatcgtttttggacaatacatgtgaaaaataattttcggcttttgttcgaattctggtccggggttttaatagatggacatgaatgtcatattcgtgatcagcgtacccgaaaaccccagaaaacaaaattttaaaaaattataaaagtacccaattaaatggcaaaaattgtcaaattatggccttaaaatgcttaaaaaatcacagcccgaaacttaaaaaggctaatttctgattacttcctctgtgaatggcaaattaatgttgatgtccaatggttcggcggcattcaagttggttgttgatagtatatgacgcatttggctattttgaccacgctcctccaaatgaacttcgcgcatcatttgtgccaccaattctgcaagttcttcctcggtgaagtcctccggcacatttgaccgactgtatgcgttaagcagccttggtcttcgattgacggattcgtttcttaattaaaagaaaattaaaaaacggaaaacaaaattttaaaatattttggaaaattcagaaatcggaattggacctcgtagaaggtatcccccc

SEQ ID NO: 2524 - DNA, 1056 bp, Heterodera glycines
aaaaagcggaacacaaaatgttaaatattttggaaaattcaaaatcggattgttttctttaatttttggttgttagctgcctgccactcccgatcactgatcaaacaagtgccatttaatgctatttagtaaaaacctgcgcttttttacgagaagagaatgagtcgagcgaaggcacgaatgaagggaagagacaaggctgaaactaacgaataaaaaaacaaatgtaaaaagcaaattgggaggaagaaaaagcgtagattattcgaaaccaaaaagggtaaattaaaaaacaaataattaattaaatttttaataattaagccaattaggaattatgggtcggtcggggttgtttcggcgccagcctaagtttttttggatataatttttttcattgtcaaccaattacggaagttttttctttataactttttttacaggctaaactttttttgttttttgtaagacaaatagagcatgtgaagggctttcaatgataccaagattgttagatttggttgataaagaaaaaagaaatatccaaaaaacttgggctggcgccgaaatgacctgttcactatggttcatttaagcgcaaatcataaattgagggggtgatttaaaaatatgttgtattatatcttaatcataccttaaatgttcgatggattgggacggaaaatgccaccaacggagtgatgattttgttgttggaaatgtctaaagcaacgaacggacggataaattgaccgaaagtataaaacaaaccaaaaaaacgaattggcggaagaagggaaaattggcaaatgaaaaaaagtaaaaaatggccaagctaaaaatgaaaaattgaaaacgtacattatgtaaatactttaaattatacaataagaaaaacattcccaaaataataaacaagcaacaaaagtaataggcaaaaagtgcacaaaattttctgttttattatgcccaaattgggcggatagcgttggccttcatggacggtaaaaaaacgaaaaaaaattgccaaaaaaaattggcgaaaaatgacattct

SEQ ID NO: 2525 - DNA, 1418 bp, Heterodera glycines
agaagcatcccgtgagtgcagtttatgaacatttaacaggctccgatcagttaatccgtcagtgatcactgatcagtctctcctccggtcagtccgtgtcttcgctgtccctccctccgtcctcctcatcctccgaactgctctcactcagctgcaaatcttccgccaaaatgctttccgcatgaatgacgccgtcttcttcaccggcatcgggtgtttctgttgtggcgattgtttctcctccctttccgtcgttccttttgcactttcctctctttgattttggtgttcctccgttttttgttgtgcttggtgaaaaacgtcctcctccgcctccgaccgttcgactttcgttggtgccttaacaaaattccttttttttgttgaattactgaacgacgacttaatcgaacgcacacaccccaaaggtttaaaaattttctgcaggaacaaaggattttctaaaaaacctataattttttcgtttcggtaccatttccaaaccaaaatcccggtacttgtccttactgaaactccctcgccccgcaccgaccgccgccgtacctccgagaagatcagcatcagaatcccacaatgccggccatgaccactgaatttttggatttttgtttaaggggggaagggagagaatggaaaaaaagatttttcaagaatatgacaaaaaaaaattttttttttgtttttttacagccgataaggtctccttgtttgttcaaaacaattttcaatataagacattttgtaaatctcgcaaatttttttcgaattttcttgaaaaatgtcaaatgaaattttcatccttccctacaggcatctatcaaaaaaaccagaaattttaaaaaaattaaagaaatgccattttgaaaaaactcataactaaaaaaaaaattttttttttaattttctgtcttaccaggaatgatcgccttcatcacgaggtcaggccttgctacagccatacaagcaatgccagtccctgaaacaaaggagggggcgaaggaacaaaagaattttaaaaaaacctttattttttcttttcggtaccatttccaaaccgaaatcccgggacttgtccctactgtaccctctcgccgccgtacctccgaaagatcagcatcagaatcatgccgacaaacaggcgcggctgctgcgacaggccgcgcacgcccgcgtcgcccaccacgccgatggcatagccggtgcccagcccacacagaccgcacacgaggccggcagcgaactggctgaacccgcggtcgatggtgtatccgggcccggccgcctcgagtcggccggaaatgatcaccgccaccaatggccacaatgccggccatgaccactaaattttcggatttttttaggggggggggagaatgtaaaaaatgataaaaattgat

SEQ ID NO: 2526 - DNA, 1773 bp, Heterodera glycines
aaacccgcaaaaggaaccccttttcactgataagagggtccaataggcaagaaagggcaaacaattaattttttcttgaaagacgaacactcaagatacaaaacggcagaggcaaccctcaaaaaaaattcttttctctgataagagtgaccaatagagagtgaagaggcaaataaagtttcgtattttaatgtatgaatatattttcattatttatggcatacaaatgtattatagttcatatgaaattataattagttcatatcacttgcgtttttgaatttattttaatttttgataggtaaattttttttaaaaattatttctcactgacgaaatcaattactgacgaaatcacttctgacgaaatcaaccactgacgaaatcacttctgacgaaatcacatggcaccctacaggcatctcatcaaaaaaaccagaaaattttaaaaaaaattaaagaaatgccacatatttatcaagctttgtaggtgaacagaaattttaaagttatatgtatgtatatgctcgacaaaaaatgatattttataaaaagtaattaatttgtgtgtgaaaacagctaaccagactaaaacgaccccctgactaaaacggccagactaaaccgaccctctgactaaaacggccagactaaaccggccagactaaactgacccggtccgtcgaagacaatctaaatttcgcaaaagggagcatgcgaagacttcctgtcatttgcttactttttatttcgcttctctgccggatacaggaacctgtcaaattgacaggttttttccactacgaagacggagcaagtagttaggctttgaattagcgcgaagaaatattcgttttggcgaaatatttgttttttaattttgtttttgtgttgatcgacataaagtgtttttaaaagaccattttctccaagatcttcataaattttgctcaatattttcgataatgtgtgttcttggtttattgggttaacaatgcataattgtgatcattttagtttgaaaatctggcgcacgatttttcgtcggaacccccctggcaaaatttcaaaaaccctatagaaaacctgacaaaaaccatttaaacaattatctattgtttgattgatcattgaggggtaaacccaactcatccatacccaactcaccatacccaattcatccatatatccaactcatccataaccaacgcatcaatccccaactcatccatacccaattcatccatatatccaactcatccataaccaactcatcaatccccaactcatccgtacccaattcatccatatatccaactcatccatacccaactcatccatccccaacttatccgtacccaattcatccatatatccaactcatccatatatccagtacccaactcatctatatatccaactcttccatacccaactcatccatatatccagtacccaactcatccatccatatatccagtacccaactcatccatatccaactcttccatacccaactcatccgtacccaactcatctatatatccaactcttccatacccaactcatccgtacccaactcatccatatatccaactcatccatacccaactcgtccatatatccagtacccaactcatccatatatccaactcttccatacccaactcatccgtacccaactcatctatatatccaactcttccatacccaactcatccgtacccaactcatccatatatgcaactcatccatacccaactcatccatata

SEQ ID NO: 2527 - DNA, 4850 bp, Heterodera glycines
  unsure (1)..(4850): unsure at all n locations
atttgccggatcctgcgcaggattgcggatttttggaaattttgaaaaaatggaccggatccggccggattaatcctgcaaatcctgttttttccaaaaaatgcaggattgcggactgggatcctgcaaaatcctgcgcaggatccggtcctgcgccgggctctacaactcatccatacccaactcatccatatatccaatatccaacgcatccatatatccaactcatccatccccaactcatccatccccaactcatccacacacaaaaaaagccacaagtagaccgtataatgtaaaaaaaaatgccacgactaagaccgcacaatcaaaaaaaatacacacgactaaaccgcacaatcaaaaaatgccacgacgacgattcgcaatgtgtaatggatgagtgggtatggatgagttgggcgtgactcatcattgatcacagatagatcagttgactgattaagagcaatttgaagtgattaaccttttgcttttaactataattgataagcgctttccaaactgatcacagatttttgatcacaaatttgatcggctggaaaaatttttcttcatgccgacctgcacattctaattagtaccaaactaattaattggtactgcattaaatactacaactattatattcgcaatccgtaaaatttctaaaaaaattttttttttctgacgggacgacggggagccaattacatcagcggcggcaacggtggcatgtcaccgtttggtgcccaagtccgtgactcgcgggaccgggagaagaaggaactcagtgatctgaacgatcgattagccaattacattgaaaaggtggggtttgggtcggctgagcacggccaagcgaggcccaagcccaaacagagcacaataagcaccaggacaaatttaggtccgtttcctcgaagcacagaaccgcaagttgaaggcggacctggacatgccgcaaggacgccgcggcaaggacaccatcaccatcaagacgatgtacgagagcgagattcagacggccaaaaagttgatcgaagacacgggccgatcaaagcacgagttggagcaggacgtggccaaactgcaacgtgacttggacgagcagcgccgcaaatacgaggtacgccatcatgaatagcaaaaaaaacatcacccgggttgattgggaattaatattttctaaaatacttattggattttctgtttttttccagaaaatctcagggttggactaaaaattatggattacggaaattgtaccgtttttggatccctatgatgacggattacggatttccgtagccagttacgcccagccctgatttgaacccaggtaaactcggcactttacatttgccaactctttgggggccagctttttccggaacttccaaaaaaaatttgggtgcgttaactcattgaaaaactcaattaactaaattaattcggtgcccaattttccaagattgcaaaagtgagactctcgagcactataaatagggactaaatttatgtgtccaatttttgccccaaattttcagcattttcaattccacacaatcaacaacgggcatcgccattacaaatcttcgtctgtttgccggttacggaggggaagcgattgcgttttttcccaccttttcaccttttttgttctcatcttctcacctttttcaaataaattgtttttcatcaccttttctttgtcatcaatagggtgagtatttttaggggcgaaaaagtccaaaatagggaactaaatatgggcaaaaaaataacgcaaaataagggcgaaacgccaaaatttggatttctagggtcggataagggcgttaaaacgaaaatgattttcgtgcatttctcgtcgagttaaagccgcagaaaaaatacataagtaaaaagctaacaataagaatccaattttgaaaattttccattttttgttcgaattctgctccgggactcgtaattggtcaaaatgaatgtcagattcatgttcagcgaacccgaaaacccttggaaacatattttcagtgacttttaaaagttaattattttctttttgcaccgcctcattttacccaaacaaattgtagacaataggagtaattaaatttagtttagattttttttatttccattttttcgaaatttaaaactcccgaaatcccgggggtaatcccgcaaaggtaatagtttagatggtacccccccttttttaaaaatttttttcaactttcaaaaaatcataaaaacatgtttctaggggttttttgggtcgttgatcacgaatctgacatccatttcgaccgattccgaacccctgacccggattcgaacaaaataaaaaaattgattttttaacaaaatttacatttattgctaaaaatcgattcaaatgcacgaaaaagaaaataatcaatgttcgcatggataaaactcagagacatgcaaccaaaaattgtaaaacgcattttcacggtctccaaaacgctgacgccaaataaattctgggaaataggtgtcgtatgtttcagtcttgttcccaaactgctttttttattttgttcgaatccgggtcaggggttcggaatcggtcgaaatggatgtcggattcgtgatcagcgaccccgaaaacccctagaaacatgtttttatgattttttgaaagttgaaaaaaatttttaaaaaagggggggtaccatctaaactattaccggacaaagacactggtagtctcgcgcttcagaattgtgattatgaaaaaatatttattcaaataaaataaaatccaacgaaggggtgaccacttacacgttgaattataaaatagtagtagtattatggaagaatgggtacttttagagttaaattttgttagcctccagccacgtctgtattcgctttttgaagcagtcaacagacggggcatctgttaacactttgttaagtttggaccaaattagagcagttctattaataaaagaatgggatgttttagtgcattgtgattttaacacaactttacgtcttaaattgtatggaaagtgatcggaaattaaaggaaaaatattttttttgagatgggttagaccattaatgattttaaatgcttggactaggtctataacttttcttctttcctctaaagattgtatcttgaaaaaactgagacgttgttggtagggaatataaggtaatctacatttgaagagagcaatttttgtaaaatatttttgacatctttcaattttaatgatatccttttttaacttaggattccaaatttcaggtgcgtattcaaggagggggcgaatgtacgtcttgtaaacagtagtccatacccgaattgagcgggattttagaaacttggctatatatctgatccttaaataagcagccttagtaattttaagatagtgatcagaaaactttaacttattatcaattaaaacacccaaatcattaatcgattcaacctcattgataattttgttgcataatttgtattgttgtttagagttgtttttgccaaaaaatataataaatgttttatcgggtgagatttttaaaccgtttaaactggcccaattttcaatgttttgtaaagctgtgtttagcttaatgcgctcatttctttttttgtatgaaacatatagtttcacatcatctgcaaaaagcttaacttttatttccgaaggaataaccttcggaagatcatttatatagatcaaaaacaacagtgggcctaaaactgatccctgtggaacaccagacttaatcggataagattttgaatatttgttattaatttttaccgtataagttctttcctttaaaaactcagataaccaattaagcagttttcccttaattccgatattatccaacttttgaaccataatgtgatgaggaagggagtcaaaggcttttttaaaatccacataaacacagtcaatatttctgttaccatatatgctgtcataccaatcctcaagtacagagataagttgagtattggtagagcgttttttaacgaacccgaactggtgttcagatattaatttatttttatgaagaaaatcgtatatatgccttgctaaaattttttcaaaaaccctacagagacagcaggtaagagaaataggtctgtaattatgtggatcatttcggtcaccttttttaaagagtggtataacaatggattttttccaaatataagggatcttgcctgtatccattgatagtctaaaaagttccgaaataaccggtgtaagaggaaggtaacaattacgtaaaaatttaaaggaaatttcatcaggggaagtagattctctattcggtaaagtcctcagcatacaggatatttcacctgcatcaaattcaatatcagaaatggttggataattagaattagaggaagaattgataattggtaaaatacctgagtttgaaaaggaatcttgaaaaattttagcaaatatttctgctttttcagaatcctcaaatacaattttattatcatggaataaagaattaatctgaatacaatttttattaaattttctcatatatttatagatagcatttcttcctttgtttaatattttattttcgttattaacagagaaattatttacttgtatttttatatggagggaaatgctatcgtataaagacttatatttaattggatcaattttttgtaatttaaaaagtctggctttttccttaatagatagtctaagactgaccgggtagttaggctttcttggttttagatcggaatatttattttaggcaaantaataatcaaaatttcccctagtgatttcataaaa

SEQ ID NO: 2528 - DNA, 1706 bp, Heterodera glycines
tgtccccgctttttctccactaccgtatgtccccgccttttctcccactaccgtatgtctccccaccggttctctaatttaccgtatgtaagttgatcagagcgcgagccccgagtacagcttcggcgacatttcttaccacagatgctataattttgttaataacgatggacatcttttcaacactgctaaacccctcgcgctgttcgtacgatttgacgatctgaaaatgaaccgataataccgaaaataaaaaattcccaaaaaatcgagaccgagactccaaaagaagcagagaaaatttcaagattcaagtaatcgagaaccgagacttacataaaattcttaggaagtatgagaaaattggatgttcaagctttttaagaacatttgattttctttaaagaactctaaagtttttagggagactttgagacataaaatttaagaagtttttttttaattaaaataattccttaaaattactttttgaagtttcaaatcaacattttgaagaatttgttgttgtcttttggcgagaaagtaattaaaaactgaggaagaaattcgaagaacggaccaacggaaattgaaacgaaaggcattggccaattcggaaagaaactcatcagggagtttaatttttgaggcacaatccatggcttaaaaattttaaataatttatggatattagtgaaataattaaaaaatttggcatggaatatgaataattagtgagtgagttggtggtggtcatttggaggagggaaatggaacacaaaaacggcaaaaatcaattggatattaatacaaaatagcacttattgtgtgtaaaaaaggcgttggttctcaggtcaatggcaaaatgtaccataaaaagcaaaaaactctttaaaaaggtcccaataaaaactaaaaaaatatataagaaatctatacatattttcttaaaatttatttgaatttttcaaaaacttccggcactgattagcggcactgccggactttaaaaaatgcgctgaaaacattttgttgaaaaaatggccgttttaagccttaaaattaacttaaaatgtgcttatttttgtccccaaattcttcgtttacaaatgatttgcttattttaattaaacaagttttgacaagccgtttttcctgcaaacatagatttttatctaggaaatccagttcagacgaaatatggaaaaaaatccatgtccaggtctaggctttttttcaaaatgtcgtactctattattttttttaataaatggcaaggcagtccttttctggcatttgagacggattttccttccaacaaaaaatctgtttttgccaacggggtgaaaaacccggcattttcgaaaaagaactttgctaaagccattgtttaataattggattttttttagtccaatgatttggatttccgaatgaaacttggtgtgtggatagggtaccttcttaagaaaagtgtttttattttctgcgaaatgagcccatgtgccgagttatgacggccaagctctttcccccaaaatcgaattgccctctatttctccgagtttttttgtctcagtcttcctgaaatttttagggttctttaaaaaaaatcaaatgttcttaaaaagcttgaacacccaattttctcatacttcctaagaattttatgtaagtctcggttctcgattacttgaatcttgaaa

SEQ ID NO: 2529 - DNA, 2178 bp, Heterodera glycines
  unsure (1)..(2178): unsure at all n locations
atcaaggtgttattgaccatttccggttacctcgagaggcatttttcgactctgtgcgatggtttctcngaaattgcacccgctttacgacaatcgatctacagacatagtgcctttacatcaacttcaaattgctcttttatattatgccacaggtgtcatatgttgagctgattgctagattcaattgctagtttcccaaggtgatcatcaaaatactatggctgcagcaagcggggtgcataaagcaactatctcgagagcgatcactgctgtcactgatgcattgctagaattttgcccttattatgtatctttgccttctactggaacagaacaaacacaaagaattaagaccggattctattttgtttgtaacattttttggcgttttaaatatgagcttaagaaggcgcgtatgccgcaagtgattgggtgtgtggatggaacttttctgccgattcaacggccttcaaatcaattagattatgcatttatttgcagaaaaggctttacggctctcaatgcgatgggtgtttgtgatcactaaaaaagatttattgcatttttttgcaattaccctgggtcttgtcatgacagttacgtattacggtatttcattacagttgacaaaaaacattgtcttaaatttcaaagctcctcacaattcttctcaagaatggaagaagggggtcttgatgggataatattgggggattctgcttaccctcagaaaaattggttgtttacgccagtaagatttccccgaaatcaaaaagaagaagcatataatgccgcacatgccgtaacacgtgttactatcgaacagtgctttggtatttgcaaaaatcgatggagatgtttaatgaataagtgtaggctccaacccggtataaatttattttttgcttttttcacttttaaattaagaaaaattggcaaaagtagcaacagtttgcagtatgcttcacaacattgccattgattgtcaggcaccacagcctgcttttgatgatgatgaaatcgaaaatgagcaacaagaaaatttaaatgatgaaaatatcgcattaagtgctgaagctgttcggaccgattatattaatcgtaatttttaattatttttaaattaaaaataaattatttgactccacaataaacccgggtttgcttaacccgggtttacttaacccgggttaaagacgagcaacgctattttcaaaaatttttaacccgggtttacgaaacccgggtttaatcgttaacccgggtttactaaacccggagacgagcaacaggcccctggctggggagttcctgcgatcaccaaggcagggctcctgtggcgaggctccaccattgcactttcggtcggggctgacctggcagggcggtcccgaactgggataggcccacagctaaatttttgagtgcagggaacggcgttcgcgcctcccctttaaaagctttgcttcatctatttgcttgccgtttatccttttcaacactccgagtgccgtgccgcgttgatgaattctaattgtttttctcataattttaaatgttggatgatttaaagtcgttaagaaaactttaagaacgagaacgaaaatgtccccctgccgtacaaaaacgtctcccttacggaaacaaccataacgaccctgaccgtgcacttccggtttacctcagttgggccccagcatatttttggactatatatattttttccattagaaacttaacgatattggcatcattagaaagctgttctagtagccttacaaaaaatcaaaaagatattttggcttttgaaaaagatattaagaaaaaatttaactttacgcaattttatttcttggcgttctgtcaaaaaccaaaaaaaaatacaatgaaaaaagaatttgcttaattttgttgactcattgaagtggatatgaacaagtttttgccttactcgtctgacaaaaccataaaaaccacttttccaagaaatggcttcttctgctgctggatttgccattgtcaccggtgccaacaccggcctcggctttgcattttgttaatctctatatgcttccggcactattccgccattgtgtggncctgtcgaagtgacagcgcgcgagagcgcattgacnaatttgctgtggcaatcatcgccggcggaaatggcaacgc

SEQ ID NO: 2530 - DNA, 1054 bp, Heterodera glycines
cttctcattcttgcgccaaacccggaattgctaacaaattaaatgtttattttacattaatgtggcttagaaacaaatcaaaagcatttattgttgctttgtttttggtaaattttgcgcggttcagactttgaagaaataaacatgaaattcagaatcggttttcttatttccctagaaaaatttctaatttaaactgatgccctttgacatgggagattaaattcattttccattttttttttttgtaatgacaagtttattgggactgtaatacatattttttagttggatttgacctgcaatgattcggtccgcactttcgtctcccaactcgacgagcgtccctatcaaaagggcagtttgcgattgctcgtcaacaatgccggcattatgggccatccctttcaattggtcgacggcgttgaggtaggcagacaaaaaaattaaaaaattaaaaacattttccctgggatttcgaggtcgctgctcacaaatatccatttgtaccttaaatacacggaaacaaacataaaatcatgatcagcaacccctgaaattttaggaaacttttttatgacatttaaacttttctccccaaaaagggggttgacgcgatcttaattaattgtattcccaaatgtttatgcattgcgaaaaaggaaaattccctctaacaataaaaaaacaggattttttttttgaaaattgcaattttcaaattttttaggtgcatttcgcctccaaccatttgggtcattttctgctcacaaatttgctgatcaaacacaattggttggcttccgacgcgcgcattttgctggtcacttccggcctctacgaaaaggttttgtcccaggattttccacagacgcaggcttcgaaatcaaccaatttcggcacttatatggattaggggtcgacaaaactaaagagtggaccctaaagacaatgagaattacacacctttttaatgttgctgatcaagaatatgctaatttatttattttttctaaaaagaaaaaaattttcttttgccattagtgtagggtcc

SEQ ID NO: 2531 - DNA, 4610 bp, Heterodera glycines
acgaccctgggacccaaaaacgagggcccaaaaacgggggcccaaacgcccccgactctccctgggattttcatccccatcttccagttccaagtcaaatatgagaaaaaaaaaataccaggtcccatttaggcacgaaaaacctggattttctggataatattttagaatttgtgattactagggctgggatttttatgtggtaaaaatcctgaaatatgtaataaaatatgtgctaaaaaaactcaaaatatgtgctaaaaaccaaaaaaaggcctaaatatgtgttaaaaaatgcaaaaatatgtgctaaaaattggaaaaaccaagtgtatttacgcaaaaaaaaatcatatttaatatcagtctttatcaatttcgtgagaacaaatgcaaatcagatgccgctgttccgttgtcaaaactaatacttggtgaaggcaccgttgacaaaagataatttttccatcagttgaataagttccttccgggcactttgaaatccagtgacgatttaacacagcgtttgatttgggctgctttaggcatttaaatatataaagaaattttccaaatgcttaagaaacgtaaagtagtcaatttttagggtgcattttcagattttcttgtatttttcttacgatttttctcaaaaatgccaaaatatgtgcaaaatatgtgccaaaaccccgaaatatgtgcgatatgtttttaggtgccaaaacgccaaaatatgtgtttttatgtttttataagtcgctctaaatcaaaaattgttcggagaaaatgctatttttgggcttctctcgccataactaagccgcaaaaaaaatatgttaaaacataaaaatcccagccctagtgattacgaatgctgtgaggaaatgacaacgcatttatgttcccatttaaaaaccccgaaatatgtaaaaatatgtattttcccactatttagagcatggagaatccagaaaaaaacatgtattaagatatttttagaattcctaagcaatgaattgatttcttttctaacatttgtttgctctttaaaacaaatttcaaaaaattcaggtccagctggatcaaaacctcgaggatcctggatttttccgacatgtttcaaaattcctctagttttcttctgctcaaattgaatgcatttatgccaacaaaattttgccaaaaattaccttttctcagtgccaagcaaccgctttttgtccattttaaatttgaagatgcctttacttactttattatggaaagaattttgggcgttttaaacaatattttttgccaaattcatttttggccttaactttttcttttggccacattttcatctgttcagcattttcccgtaatgactttagtttgttgctattattcaaaattggccaattaaggggtaattaaaatattattatagccatcataaaatgcatttgcaattttaaatttggcgcaaaaaagtaatccaaaaatttgcgcacatttttccaatgaattttccggcattcaacggatttgtggtgaattgtgtccaaattgtcctctaaatgagcggattccatgacggacaattaattttaaatacttcccaaaaatccatttgtctatttacattctattaaaaatattattaaaatttaaatttgctagtgcgacgacggtgccaaagaaaaattccattcttgttaaaatctggcaaacatttttaaaatttcgtggcaccaacaaagtagtggcaaatgaaaaaaaacaaattgattcaaaagctttgatttcaaaatcctggcatccaaaaattactccccgaaattttgattcattatgcaaaaggaaatgaaaaataaataaatcctttaaaaaataaattgattattaatccacgctatttccaatcagtttatttttttatttaattcttatttcaaaatatatttataaaaataggtaaaattgggctgtccaatctttcggtgtacaaaatttacggttggtccaattttctgacacctgaaaaatatacggtaaaaattaatttgctgccctatttcttgtattttcctatttttctttcaagaatgacttcaaaaatgcaaaataaaccttttaactgcagttttgttgccactgttgtataggttttttggtggtgccattgtttggcctatttttggaaaatgaaaatttgaatttcgtctgagccaaaaagtgccgtcggcatacccccactattcttttattctgtccactccgtcgtctcagccgccgcgccatttggcatttcatcgccatgtgccaccctctggcaaagtgccggctggtttggtgtgccatcattcacaaccctcgccacaaatttgccgaaatttaattttaccaaattgccggttgtcacagtgtttcgagatgaagcggcgaattgggaacaatgaagcggaacgggggaggcgcaaaatgccgcgagaccaaagaccggacggaactttcgggcggtgacattttggagattaaaggtcatcatataaaaatttgttccaaatttgtgccctatttcgattggcatttttgagaaattcttcggctatggccaaaatgctttaaatgattccgaactgctgctcggaaatcctttcttccaaagttgcgataagtttttttagaggtccattactgcaattaggcaaataaattacatttgagtaacaaaaataaatttatgcattttggaattgcctcaaattttcaaaattcttacctaatttttcttaaatattttatttttttttgtttttggactaaggagttttatcactgactactgacctctgaaacataatacagctccaaagttgatcatattttaaataataataacttttcgagaatgtcagacatattacataacaatggattaggtatatccgctaaggtttaggattgcttgggattaacaacggatttaaaaatttgatcgagacaaagccgggccccgagcaattcattttcgtccaaatagtgtttgaatgtttttattcatcaaaatttcagcatccatccggaagacaaaaaaaaggaatccaacaacacttggtgtgctgtccggtgcacaatttcaattccccaccggacgttcattcattcctcgttcctccgatgggtaaaaacccacgcgcaaattggcaaaaaaaaaaagaaaacatcatgcgtacccagcaaattgccctacggcattttgtatgccgaatgcatgccaaaaacataaaaaatggggggcgggggaggaaaagccggggccaaaaccaaatccgatccgtctcattttcattgtgcgcgccaatgccttggggcataaaaaagtgcatcatccgcccaccgccccctttaattgcttatgaattcagctggaaaaagcagcaaaaaatggtgggcggagggggcggacaatggtagctaacaataagggaggtgcttcttcttcttctgcgcgggaagtgtgccgttcagcagcaggtggccgccccttcaattgcacaggagtgatgggtttggcacaaaatgtcatttttttgtggcaatatgtcatttatggcgaaatgtcatcggcaggcaatgccaaccccaacggcacaccgtttggccgtttataagcaggccatgttccaaacaaatggacaaatggcctcattttcactcatccatacatctgtcagttgcacttgcattttgctgagattttggcggtgttatgatcaaaataaaaaatatttttggttataactttgctaaaaagcaacaagattttttattcttgatatcatttaatagcactaaatattcttaattatccagccaaatttcagaaaattatgtaaagttttcaaaaagttatgaccaagatgttcaaaaaccttgtttttgagttcctatggctctaactttttgatagttaataaaaatttttaaattttgcatgctaatagagaacttttagggctatcgaatgatatcaataattaaaataatattacttttttagcaaagttatgggtaattttttgttgaaaattttcatttgatgtttttgagtaacgacccgacaccttttgagccttctgcttgagaatttagcccctgggtattaaaacgtcatttcttgggctaaaatagctcaattccgattgaactcttaatccatcagcagcctattttatttttctattcccctttttgtcacaatttgtgcctttttaagtgcgcaaagtgtcaaggactgctgcatgattttacaccctccgccggcggaaatgccaatttgcgcaccgctctgaaggggacgaagggggagcggtaggggtcagtcaactgcgtctggccaactgcgtctcaggcaactttaagaattcataacttttttctcacttgcctaatttttaaaaatttggaatcattcgagagctctttatgtttagaagtttttggtaagcatttctaagcgattgaagaaattattaaaaagctgcaacacgaaaaccgcaaaaaagtcagaatttttgcatatatttatttataacttttttatatgccggcaaatctttgtgatt

SEQ ID NO: 2532 - DNA, 2518 bp, Heterodera glycines
aaaaaatttggccaaaggttacaaagtttacatttccagactgaaaatgtggatttcataaatttgcgccccccaggccccgtaaccagaaggaaaaattgggggcggggcgcacccgaagaagcttttcccctaaattttggccattttgagacaaacttttggaaaaatattagaaagttgggacccgtcgcggaaaatatagggttaatttcttaagaaaattaggtaaattacccattttttcaataacaaaaaaaaagtttggctctccctatgccatatccctcctatatttttcaaataaaatggtcgatttttcaagcccaacggactaccggcccatggcgctggagacgggcgttctgctgggctccaacgggtccgcccggcttcaactcggcgccaccgatgtgctcgtcgcggtcaaggccgacctgcagctggtggagccgtccaccgaagccggggacatccaacgcgtccatttctttgtcgatatttccgcaaatgcgtcgccacgctttgcgggacggggcggcaacgaccaggtcagtgagtcatcccagcggattgggggcttcgacggtcccaggatttccgcatggaggggccaccgccgccctgggcgaccacctcctttcacaccattttgttgcgacgttttccagggaatgagagggccccgtcggtgccaacaagtgtcgtcgggggaaatttttttttataattttggctacaatttgcactaaaatgataattttgtagatttttttttaaattagcatattttcatattttttgggacgtttgggtgaaggaggccttggagagggtaccaatgagcaaaagcgaaaattttgatcaaaaacaattcttaaatgcgcatttccaaattttaacactttttgccatttttaaattttaatttgaattgcattttttctctggccaggctgaggaatgggccaagtcgctcgcgggtgcgttcgccaacaccgccccgtcagcaatgcccgacatggccaagctgatgctggcacccacccagctgtggtgcttgtacgtcgacgttgtcgtcctccaatttgacggcaacgcaatggacgcaatttcgttggcggttcgtttctcactgaattattttaaaaattttcaaaaaatgtgtttttcggtagaaaaaggtttaaaaattctcaaaaaaacaagctttttgaccgttttataagttgtacggacgatagaaatgaatattttttggtacttttcggttttgtggcccggatttgaaatttaaaaaacaacaacaaatggagcatattgttagtgcaagaagtgcacaccaaaattattgcggagaaataaatgccataatttgagatattttcaaatgcctttttattaatttattcaatggaaacgtaaattgttgttttttgttgctgttttatgccgtgctgagacgatcctaaaatagtatcaatggggcgttcctaaaatagtatcaatgtgggcgttcctaaaatagtatcaatgtgggcgatcctaaaaaagtatcaatgtgggcgatcctaaaatagtatcaatggggcgttcctaaaatagtatcaatgtgggcgatcctaaaaaagtatcaatgtgggcgatcctaaaatagtatcaatggggcgttcctaaaatagtatcaatggggcgttcctaaaatagtatcaatgtgggcgatcctaaaaaagtatcaatgtgggcgatcctaaaatagtatcaatggggcgttcctaaaatagtatcaatggggcgttcctaaaaaagtatcaatgtgggcgatcctaaaatagtatcaatgataaaattaattaaaataattattattcaatgaaacaaatattttgcaagtaataaaaattgttttctacataaaatattattacgtcggaaacgataatcaatgtatgtcaatatttttttgccatataataacaaatttttaatttaaaaatatatttcccttcagtgttaaattcattctttagattgactaaaaaatgaaaatattttttattagttttatttttcccttaattttacttgattatttggaaggccataaatccggatttgaaggattcgtaaaaaatcctcaagcaatatcacttgtcaaaagctatgaaaaaaaggaaataaagacacttgatgaactacatggacaacttatgcataaaggcatacggatttctatatgcactttgaaacgctacctgcataagataaaaattgtttttgcgcccaaaaaagaaaatgttgattcatcacctaagcttgaagtggaaaaatgcttctccaaaaagctgactaacactatttatataattggaaatggatcaaattggagaaaatacattcagactaatgaaaagaataatgatctctacatttcgtgctccaactgtttgtatttacgtgaaaaggaaaacaatactagatctattatctcaacagcagtgcttcgacaaggagttaa

SEQ ID NO: 2533 - DNA, 2548 bp, Heterodera glycines
tatataaaagcaaattatgaggtaccgagtcaaatgctttttgaaagtcaatataaatacagtcaactttttttccattaataattgcttcataccaatcttcgacaactgttattaattgatttgttgttgacctatttctaataaaaccaaattgggattctgaaattttattgttttttaataaaaaattgtaaatatttttgctgagaattctttccataactctgcacagagagcaggttaaagaaataggtctataattttcaggattgaatttatccccctttttaaaaagaggaaagacaattgattccttccaaatgtttggaagagaaccactgtctaatgatagtctaaacaactcagtaataacagttgccaatgaaaaatggcaattttttaggactttataagaaatgttatccggagagttccatttttatttggcaattttcttaacagtgtttgagtctcaatgatgttaaaatttatgtccgatataaagcattgaatattaccataggagttgtccaaacttaaatcgtttaggacaacttcggagttattaaatgaatttgcaaataaaatggcaaataattccgatttctcttcactttcatgatagcatttattttcaaaaactaaatttggtatttcaaagggattgacattgtgtttttgaatgtatttaaaaattgaattttttccctttgaaatagccttatgttcaattaaattatgtatttttttggtttggatttttatatgtaaagtaatgctatcataaagtgctttttttgttggataaattttacactgtctatataattttgccttttctttaatggatgccaataaatgttgtggatattttggagctaaatcttttttttagtaatttttttattggaatacactcattcaaggcattcaacaaggcgctattgaaggcacagcatttttcatttatactaaaatgtgaaagagaaagagaacttaatctagcagaaattacagcatttaaatgtgatacattagacggagtaaaccgtcttaggcaaatttctttaggctttggtcttatttctggaacactcagcacaaaaagctgtgctaaatgatctgatgaaaatatgccaccttcaacagaacaatgttttacaattttatcatttgctgataagatcaaatccaaccatgatttacccctagtgggctcattcgtggcatttataaatgtaaatttattaaaaaagtcgcaaaatatttcaccaatatgatttatagcgtgtggttggccttgcctccataccaattctcgatttgacaaatttagatctcctaagattatataattttcacaccaaaatgtttgtataaatttaaaaagttcttttgtttgttttaaagtggttttgggaggccggtaaatcaatgcaaatcttattgatttcagattttgtaattgattaattaaaatttcacaattaaattttgtaccagaaaattttacaaaaaaggctatctcatttttgattaaaataccacaaccacctccacgtgaactgttttcggattttcttgatgcaaaaatataattataattctccttaatccatgggctaagaggaattccctcattgtcttttgtccatgtctctgtcagtaataatatgctaatttttttatttattaaagccagtgaaatttcatcagttttgttcattatagagcgaatattagttaagcaacagataaaaccttctaaagaattaatatcccctttgtttagtggtagtgaattagaattatttatattttggtaagaattttcttcttccgaccggaaagtgtaatctactctttttgtaaaagtgttttgttttttttgtgatttggtgtaaaatttaaaaatttgattcacgaattgactgactccggaagatgtgcacttcatctctcaaaataacgttcccagcatacacaatccaatcttgcccatctttctgtcgtttttcaacgcattgcaaatgcaggcgacggcgttcctccaattgtgcctttgtcagcgattcacggagacggacatggtgcagagacgaatcagcagcccgaatggtgttttgtttttttttgccatgcagcgagagcctgtttttggaagccacgggaaggcaagagaattttcaatgggcgaggacttttttgggctgggttaaaggaacgacccatgcgataggcaatggtaccgcattcgatccccagcgaatcgaataagcaattgatttttgaccggtccatctctgcccgctttgctggtgaactgtcgttgtgctctggcatgccaataatgacgacacttctctgtctttccaattcctccgctgaataacaagcaatataatttattttaataaaaattatttgtttttatgtttactgtcgaaaagtccactattttttgtgtttctgtcgaaaagtcctttactgtcgaaatgtcctttgctgtcgaaaagtccttctgtcgaaaagtcctctgtcgaaa

SEQ ID NO: 2534 - DNA, 5119 bp, Heterodera glycines
  unsure (1)..(5119): unsure at all n locations
cggtgcgaatgggtgagcattggtgagtgcgtgcgcatgtggtgtgagtatgtattggtataagtacatgtgtgtgaatattggcatgtgtatgtgtagatagaggtagggtgcaagagcaaaggttttgtttgtgcattgcgatgcgtgtgagtgcatctgtgcaatgcgtgagtgtttgcaagtgcagatgcaggttacatgcaaatgcatgaggcgtggatggtgtgttttgcatattaagcctgtgtgtttcgggtgcagggcagagtgtagatgtatgtgtaagtgtgttttgtttgcaggtgtatgtgcaaatacaggtaatgtgcaaagtcatattggctgtgtgttttgcgtgcagggcagagtgcagatacaggttagatgcaaatgcatgaggcgtggacggtgtgttttgggtgcagacaggtgtatgtgtgtgtgggggtgtgggtcaggtggtataccaattgtatgttacatggtataacatgtatgctaatggttaggatgcaggcaggtgtatatgattgtattggtcacgaacaggtgtaattgtctgttggtttgcaggtgctggttcacatacagccattaatgtgcaattaaatctcgggaaaaggccccctatgccccaggggttcgagaatggttcgtaaaaatgtcagattgtatctgggaaatttacaccgttctggataaaattaatgcagagtctgaaagggttgagacgatgtggcttgagattgaacgttctaaagatttcgatcagaccacaaaacttgaggagaaagtatttaagagtttaaacgaaaccaagaagttgcatttcgagtcccgtcggattcatactaaaatattggagcaagaaagcagttcagtctatagtgttgggatttattgagcttcacgagtaaaatggaggcaattcagtataattgtcacgtaattaacaaatttgggatcaaaaaacatattacaaagtttattttttccggtgcatctgattgtgaatttaaacaatctctagaaaaaatattagaaaatgcatatataaaagaatcaggaatttttaaaacaattctaaaactacaatattctaattttctagtagtcttgccactacgattatcacaggaaaatacaattgacgttcttttagaacaacctatattttcacacttttttaccattggatgataccgtaatttttgaaataacaattgttaattttaataatgacaactatagaccaagaaattaattttataaagacacaagtcgaaaaggcttggaaaaggggtagaaaattagttagagaagcagataacttggtatcttatgcctatgagctttcgaaaatagctgagaattatattacataactaaatacaaaaaatttgatgatttgccaacgagcagagaaaattttgaaaaaagccaagaattttttgatagctatcaaaatcaactcacaaatgttagaattgacttagaaaaattaattcaaaaaatacttgagcctaaacaagtagagcgagaaatattctttacaccctaccgtaggggacagtccaaaattaataagtcttatgaaatatattatacaccctattatacatcgacaattaaatgaaatattttacattccatatagaagggattaaaatttaaaaaatcttaattccttaaaaaactctaaataaagtaaatttgaaatttagtagcacaaatggttgtaaattacgtgttaatacttattattttaaatatatcattattcaagttcaaattaaaaaattaaagtaaaataataactgcaaaaataatgtgttccgaacacaacaatctttcaaatattcaatctaattaaactatttaaacaattatttcgaattattgttattttctcttttcttataagattttataaattcaatttttttatatttattatattccttaatttttaattatttttcattacctttgattctatccttaaatttcaattttttaaaaattaaatatttccaatcaatttccatgtggatcgattaaagggaccatctccaaaaagacgatggcagcgcaccacctccccactatccgcgcggattttacattttttatcatattatatcttccattccccacaactttttttttaaaattatctgtagtcatcaaggttttaaaattaaataattttatttcccgctctaaaaactaaaaaatccgacatttttcatataaattttgtttagcattttttttcgcgcactctcaccatttttttatgttccacttttaaaatatatgaattatcttttctaatttaaataataatttttctgttaaattcccaataaagttttttttatctgtacagttcccaaatggtttattatttagagggagaggcaaaaatactagccttttaattgtttattcatcacatgaaaaaacggatatgagagaaaaaaattttattacagaactaaaaaaatcccaataaaattatttctaatatttctccgctaatatctattaactggggacacaaaagcaaaaaaacggctgaacactcgcgcagtggcgcaaaacatacccgagaatatcattaggctcgggttttttgtattacaactaatgaccggggatccctttacaatttaatcatttttccttcttttagaaattactctttttctctgtttctctcctctctcctatagtgaatgcgcatctctctgcccagggggggccaagatttctgtcctaatactactcctgtgtatgagttgtcatgataaccttaggtttaacaacgaaatttatagttaaaaactttattgaatacctaacaaaaaaaagtttttctcttagttattaggacaactataataccatgagaccagggatggcacggaatttcgatttccgaaaatttttggggcctcggaatgccatccctgccatggacacaaaatgccatgggacgcgtaaagtgttgttgggacgcgtaaaatgtcatgggacgcgtaaaatgtcatgggacgcgtaaaatgtcatgggacgcgtaaaatgtcatgggacgcgtaaaatgtcatgggacgcgtaaaatgtcatgggacgcgtaaaatgtcatgggacgcgtagtgttgttggggctcgtaaaatgtgatgggacgcgtaaaatgttatgggacgcgtaaaaccgactagaaccaattttaattattttttccgtttgacgcacatccgaccaaactgacaaattattgtagaagatactagccgcaagaaataaaaaagttaagaaatttgtccgaattcgggttcgggattcgaaacatggatgttttgcacaaatccgaccaatttcagtcctaaacaggtactcacgcgaaaacgtaccccacgcgaaaacggccacgcgaaaacgtaccccagccacgcgaaaacgtccccacgcgaaaacggccacgcaaaatggccacgcgaaaacgaccccgaccgacaattatttatgaagttcattttacaaaatttctttttttttatttttggcttaatgtcctttcggcgctttaattcaaattaatagttgctaggcgtgccaatgtgtggcctaaaccattttgttgtcttatcatctcaaacagccaaaatgaataagcttattcagaaatacaaatgaataaatacccaatttagcagcagcggcagcagcagtagcaacaaatcacctcccccccccccccttcctattttcaaaataatcccaaaaaggcagcgccataacaattactcaaattcagaaaatgttggatcacccagagaaagtggaaaaacatatgtatgtggtaccgttttctgtaataaagccctgggtctccgttttctgttcgatcgttaaaagtggacccctctaacggaacaaattgtagtaattatttgagcccgggagccgcgcaagatttttgtcttgggctctcgtacttacaattcaatgacattgaaatggttttaacgcaaaatcaaattgttactgagattctgacctcatatgcttttgtgccaaaattggcactgaatttgccattttccttatgggtagaattgttgatttattcacccgttttcccgttttaaacaaacacctgcaaaaggagaaggatggatttatcacaggggatgttgggctctaagggccttggaaacaggaaattttggaggctgttaaaaaatatccaaatttacaacaaaaaattcaaaggcttttagcttcatttgcggcgactgctggctttcgctgttccatttgctgccacctgacaaagttgggcttgaaattgcgctgctcagctgccgttttgacgctttggttgatgagcacttcaaaacgcggcattggacattgggcattattgaaattcgcaacaagtttcggcgttgctatcgggctaccggcaaagcggaaatggaaattttaaatgccgaaggcaatgcgatgccaattccggacagaccattgcccaacaaagtcgtcgggttcggcataatttgcacagagtaagtagtggtgatacacatatgtttacattcttattctcattgagaaaatttgtattaaatccaaaaaattagacaactcacaaaatttttagcattttgcgcgggaaatggttcagaaagttgttacaaagtatctttattgaccaaaatatcttaaagaatgactattttccgattattttttacgccgcgagtagagtgtcacgggaccgggacctggtactgaaaaacacggacaactgaataccgaagtcccggttttgaccagttttgactgggaccgggaaaagtcccggttttgccaaaaattcccggccccttgatactctaaccgcgagccctatgattatataatagataccaatgttaaatttagttgacgttgacaaaagttatgaatagggaacagatttttaaggacgaaaaagtacaaaataagggncttaaataagtgcgaaaaaaattggttaataaatggtgaaataagcacaaataagtttccaatttagggggtgaatttattaacagctgtttt

SEQ ID NO: 2535 - DNA, 2151 bp, Heterodera glycines
ttttttgcgtgttttctttttgcagttacattgatcacaatgcgatggcatttttgtgcagatttcggcaactgttcgcctctcatgcaaccaaagtgaaaatttgtgcaagaaatgattgtgcttcggagtacattgtgcgcaacttttgctcactgctcagtggtaacattttatgcatgatgatcatacaattttcggcaaatttgtgccgtcaatttgcacaaaaattgtctgacacacaaaaagttttttttttgcatttttctgataaattttcccgaatttcaaaacattcgtcccaccatggtgtggtgcttatacccgccggtatatgctgtttattctacaattgaaacaaaatgtgccaaaagcaacaaaatgcggctccttaaaaaagctccgaaagactcaacccgcaatttcggaccccctgggaaccgatcaattaaagcaatttcccagttgcgtgaagccatgctgcaagccctgtatttaaacaggtgaacaaagtgccaacgcgtcggatggccatacgccgctgatcaaatggttgctacgctcgtcgccttatgataacgatagttttgttgtgccaccacccaaagtactcatctgggcaattcaccaatcgagggaatggtcaccaaaaattcaagcaatcaaatcggtaattgtacttgataagcaatagataccaaacaggggtcggagggatccgaccgaataccggttccgtcgatgaagattttgggaaaacgatcagtaggatcgcgagtagcgatccaaatgaaatcccgtctcgtgatcccgagaatggttatttattttatatgtttttgacagacttatttttggattgttagtgagctgatttatctatctttaaagtagggttacatgggtccgggacccgaccgggtctcagacccgggtacccggttttttcaacaccggactcagttttttaaaaatgcaatacccgacccggtaagtccaggtacaaaagtacattggtaagaatgggggtctttgtcaaattgttgagtaaagttggaggaaagaaaatttttttaaattttaattaatatttactttaaaaaagttatcctttagtgattcagtggcttagtggttagtctctttgacccaaatcagagaaaattttcaaaaattttctggggatccctacacagtccccagttttaaaaaaaaacgtcgcaaaaaagttggtttgaatagtagcaaaaatttgtgcaaaaataaagcgtttatttgtaaaatataatatttttcctgttttttagcttttattttcatgaaaaaaataaatttggaaaaaaatttttttgttttttcagcgcccggttggacccggtacccggttgaaaattttggacccggacccggcttttcaggacccggcaatacccggaccaggtttttgtccaaatacccgggccagatagagcttaaatttcaaaatttgctcggcggcgcaaaaaattagccaattcctaaatttggtcattttttagacaaaatctgtgcatttatgccaaaaggaattcttgtttcacaatttttttttgcatgtttatgtgcatttttttaccatttttcttacttttaatttgcattcctagtcatttgtcaacgcttcatctcgcgccagcttcatcattgtcattgcatatgctttggcaaacccaattgaaccgttttgcttgaccaacgcattgaccggcgaacaattgacgctggaacggtgtgaaagaaatagtgttaagcctgcccagaccctcggggagagaaaagccgggatttgattggggtggagcctcgagaaaatttattgtttactcataatgtcttggagtacaggcgagattttcccgcgcagggtcgcggggcttaacctaatgttaaactttgtaaatccgccatcttgacagtctttgtttttgacactcataagtagagctcgacttttgaggcatatgccttttttttctgcgcactagtttcgaaatatattaagcataaataacaccttttccacttggtttgatgcttttacgttaacttttattatgcctttttttgcctttttcgggattttcgtgcctaaaatgccttttttggcatttt

SEQ ID NO: 2536 - DNA, 1529 bp, Heterodera glycines
tgatgaaaagaatgtgtgggtttatgggtgacctttctctgatcagttgtggaacttttgaactggtccaaccggttcagcgggggccatggcatgggaaagtgcgcaagtggggcgggggcagggagaggcaagaacaggtcccacccacccgacacggaggcaacccagcagggggatggggaggggctgaactgaacggtacagtccggcttccgagactggacatgacccagatcagggtcctgttagtcttgtttcctgttttatgatcattttgctaggctttgtggtgccaagactaacccgaaaatcctctaaatcccatcgggccccaattttcatatgcttaagcatcgtgatcacaggcttctaactttttttttgtaatcgttataccatgttcatcattggtcagtgcaatttaaccgggttcatctcccatttttcgggatgccaaatgccattttctattgccggcatcggaataatccctaaaaatttgctggcttggtcctgatcccggcaaaatccgattgttctagggagatcgatcccatccgcactactgatcgtagcatttttgcattggctttatgtttgggagagatccatgcgcagataacaacaataataataattattattatacgccaatttcatttaattgattttttggatgctaaaatatgatgaagcactcaatttttatgtgccgaaatatttggcgaaatttatgcagccgataataaagcggacgcgaagcatatgaaaacgcggaactgctcggaacaggattttgaaagaaaaagcaataaaatggatagagtctagcgtcgaatcgcaaggactgactgatcagagacctcggcggggctttgatcaagtgatcaggcaaacattttcataatggagtatgctaaataaatgagtgatcagatcaattattgattgcggggaattgttgatcacaaattgggcggtcataccatagggatcgatcgagtaattttatttgcgttaattgattgatcaaattgggagtagattgggtaatagccacgtgaaataaattatggaggaaaaaacaaataaacaaataaatgtgacacaaaaaatacagttgtattgatcagcataagtattaatataattccttgatcaaaatgaggggtatataaatcatcgaacaaaatgctttttgagtagtgccgaaaatggcgcaggcattccctcatataccaaaactaatcaggagactgatcacaaagctgatcagaggggaatgaggccaacagggccaacaaatctgtccggattagctcccctctccaagggacaatcgctttgcgacgatcagttgggggattgatcagagagagcgtctgatctgaatgcaatgatcagagccacaccaaaatgttgtgttgctgatccgcatcaacaaaattgtgggctggttggtgtgctgtgcgttgccctcgctgctcttctgtctccctcattgtctcagcccgtgctgctccaaa

SEQ ID NO: 2537 - DNA, 7943 bp, Heterodera glycines
ggtttaaaggaacaggcggtcaaccgagggcgggtgaatcccaaaacttttggttcgtttttggggaaaggaaaatttttatgggaaaatgaagtgattgaaaaaatatttttttggttttggttttattttattataatttgccggtcgggcttaagaccttccctgaggaattaaggggagttcgagtggcccgggatgccccgcaattcctttgacggcaagaaggtttttcgacgcaaagccggtagtacacggcaacgcatttaaaatgtgaaatgaaactgatcactggaattcgatctttgaaaattggatagcagaaggaagttttggggaaaagaatttggcctttgcaaaatgtcagtcgaccctccccccccccctcccccctcgaggggaagtgagtgagtgtaagtgaactcgttttcggagaggggaccccgcactgcattatcagcaagtttggcgcgcgccatgttccgcagctgtttccggcgcccccttcgactgggcaattttgtccatttttgatttgggtgggcaaaaaaggaaaactgttgaaaatttaaaaaaagaagttcttggcataatgtttaagttttaagagcattttaaaatgccaaattaaatgaaaaacaaaatttaactcatttttaaatattatttaaaattaatttttgttttaccgtgttttttaaactgacactaccgtatccctcccccccccctccgccgcttgttgtccaatcattttttgccccgcgggcatttgggcggagtttctctttttttcgcccagcagcagcagcaacacaacgccaatgggccggggggagccaataattgccacagggctcttcttcgcttgagttgttgcgccctctcgcgttttacgattctcgggcatcaaaatggaacacacaaattacacgcgccccgaggggggggggcattttgccaaaaatgggaaatttaaaatttaaaaattaaaaaccaaaattttgttcaataattaggccacccttttggtaaaaatgccgtaaaacgcgggagagggtaattttgccaaatgtacacattaatttttaaaattcattaaaaacacccccctgagaaaacggcactgtcgattaaattgtgccaagaaatggcgattttaaaatttaattttaaaaattttgctctattttatggatatttttttatgtctaaatattacttatttcaaatgaatagctccggataaatgtgctagtaaaaccccaaaaagcttatgaccaattaatatgtcccatttgtggtcattaaaaaatgtaaaacaattgcaacaaaataatgcgctaattaaattaaacagattgtgagtcatacggtagataatgaaatacggtggtggtggaacaccgacagcagcagcaaattttgaccaccaccagcagcaacagcaacaccaccaacgacaacaacaacagcagcaacaacgaggaggagtgatcgctggcaatacaaacaacgccaacagcagtaacaacggcggacaaatgttcgtcatggatgggcaaagctcggtaagtgatttgggacatgggtgatcactaatcacttgtcaaatagtgatctgatcaaaaggtgggggcgggggtaaagctgggattttgatcacttttggcaatatcaaattgaacacaattgatctgacccacttgatcactttaatgataaatctgatcaccttggctagtgatcaaaaagattaagtctcactcatttccaagctgatatgatcacatttattttggttgatcaatgtttgattaattaatcgattattattgttgattaaattcactaattgacaatgacaatcttcctctaatttattagtgattatccttcaccttttgctctggtcactctttgtaccaaatttcccccgtctgttcaggtgatcaaaacggcaccgccgtgccgtgccaatgccagcaatagctcgtccaccaacagtgccatgatgatggacttttcgcccaagcaggagcccatcgatttggccccgctggcacatccgtgccttcaggtcagtgcttgaattgccaatttcttgcaaaattatcaatgcattcctttgataattatcagcgtccaatctcggctgatctctcactcaaaatccgagtctaatctccactctctccaccaccgtcgttgatcagactcaaaatcgttgtcccggctgatctcggatcagtcccaaattatcccatacaaattttttctccgatcattcactgccaaccaacaaaaaaaaaacactgtctctccttatcacacacaaatgagtctttgatccaaatcaccttcacacctttgctttcacctttaaattcttctagcgccacttccgttatcaattatcacatttatcatctctatatcatttatttttttcactttcgcctccgcacattttaatatgcatctgtcagaaaatcagtcaattatcaacagtttgtttgctcacgttgatcaatgtgatcagccgaggcagaagaagttcctttacccttcggcgcgagcagaacatcaatcccctccgctgatcaatttgatcaatttcttccgctgatttgtatgatcagtcccatccgcacgccgatcagtcccaaccattggtcactcacttcctgctgccgattagcccgaccgatcagtctatgccgcttcattaccctttcaccgagctttcggatctgtccgatcagttccatcagccgctttctgtcctaccctttcatctgcttgaacgtttcgatcaaccccatcctgatcagtacaatctgtcgatcagtccgaaccattggtcactcacttcctacagccaattagcctgcttgataagtcccattgctggtctccccctctttcgctgatcattcggatctgtccgtccaatcagtcccatcagccgacttcggtcccactcttccttctgctccaaggttccgatcagtcacatcctggtccaatccgatcagttccatcagccgccggtctctgccccacccttccttatgctttaatgttccgatcagtcccatcctgatcagtccctcgcgccgatctgtccgatcattcccccctttccctttccctttttctctgtttgttgttttcacttttgtctctgtcgtccccacccccactttcccaaatgaaacgaaaattggtgaacatttgttggatgtgattgggcaaaattgtagcggcgggtggcggtaatcggaaaattgtcgtcgtcggcgggtcccaaaaatgcgcgaaaattggaaataaattgatcgatccatttgggacgaccatagggggggggaggaaatgcaaaattcggccaacacaatgagacattttggtagtacgtcaaaatgagataattcaatcaaagaatggtcaaatcgaaatatatggtgtaaaatttgagtcatcaaaaaatgagtgatcagagataattctttgcttctaactttttttatggtggttctgctgatcagcacctttctgatcggcagacattccgaatcatcttcggttaaaggtgaaaaaaacatagtgacgcacggcttgctgatcaaacagtgtttgtgatcattgtgctgaaatttcattcacgtgatcacacacaggatgatcttgaaaactcgtctgacaatcaccagcagagctgatcagttttttgcgcaccagtacttctatatatcaataatacaatcagtatttgaccctatcgattcattgcttttcggcactaaagccacagtcaatcaatattttcccaatcgattccttgattttctgtgtcaattctacaatcaatcaatattggctttcggcaccaaatccataatcaaggcattttttcccgatcgattgattggttttctgtgccaattccacaatcaatcaataactgcctttcggcactaaagccacaaatcaatcaatattttcccgatcaattacgaacgctatttaaccccctttttggcacacaggacctcagcaaaatgcccacccagctggagcactactatgtggcttcctccaagggtggcattggcatgccggccggctacggcgccaccgctgccggtcccgcctactacgagtacctcaacgtcggctcggccgcctatccgacgcccacgcaaccaggcccgtccggcgtcgccggcggcgcgtccgccgcgctgctgcaaccgaccgcggcggcggttgtcgcgctgcagggcaccgctgggggccaaccgcacgcggcggcaccgcaccaggtcatacagagactttaagggctcaattgatcagagacgaccaattggtcactgatcaggggctggtcaaaatgatcattgctttgggtgttcatgtgaatttgcatccgggatgtgagccgatttcgaattcctgttcccggcacttttgcaggtcttgcccattcttgattctcgaactttatgtgaaagtctagtctaccaattcgaatagagctccaaattatgaaaagcgtggattaagagtccaggaaaatccagggcttggttggacccaggttcagattgagccctaaattcctattcgaaatttctgaatttttagatatggactttcatccctggtcctgcagaacatgtgcaatatttcattaatatcaaattttgtaattgaatttaattagggaggttttaacaattcaattggggaaggggaattgagcttagaaagacgggaccgaaccgccggaataagccaagttgtccttgacagcaagggcatagccaaccccttggcttcggggtgggttgaatgtatttttatttttttaataaaaaatcttaataattttattttaacaatttcttacttaattattatattttccaggactggccctacatgtcctattcgtccgtagccgcccacgccggactccaccagcagcaccagcaacaactgcaagcagtacagcaacagcagctaaacggctacctggacgtcgtcatggagcaccagcaacaacagcaacaacaacagcagcagcaacggttgtattgcggtggcattggcaccggcggcggcaccgccaatggtgcggagattttcttgttttttatttttttatatatttccctcatttttttatttttgatcattacctaatcacttttggttcggctcttcaggtgtatttaatttaggtcaagcaaattcaaattttagcggattattttggaaaatttcaaagttcttgagaagagaacataagtcgaggccaaaaaaaatcaggaagccttttgaagagcctgatcacttttcagtgggatcgtcgaaaattttcaatgggatattttcttcacatatttcaagtgaattgttgctttttgatcgctttgggcactttaatttgtccatccctattccgatcactttttgtcttgatcatttttcaattcccgatcactttatgtctttgggaccgtttttcgttcattacccaaaaagacgaggccattataattcattgtttgccactgatcaaattaacacaaagcgttgcgcaggtaaagcgatggacgcggtcacagccgcaacgctggcggtgaacgcggcgacgggcggcattggcacggtgggcgccggcggcggcggactgctgtccccggtggactcgggcatcggcacggaactgtccctgctcgagcacgccaaacaggtgagagaattgctgattgatcagtcaaacttggtccagggattctgatcacattttgttcaattgatcaaaattttaaaaacataaaactagcgacctgtttgatccacggggcagatttttctgatcagtttatgattttcctattaaaattttcagcctctgttagtcagatctgaaaagtgagaaatgctaataaggctgatcaataattatttttaccaacttattatccctgcaattggatctgacggtcttctatattgatcagatattttctttgccagtatctgatcaaccagaagatctgctctgattatctgataaaaaattctaagttgatcgctgatttattccgatctgataatttctttgccaacatctgatcaatcggctctcttatctggtctgaatgatctgatcagaattctaagctgattgatttgagctctcagatttctaatatctgaaatttgacctgatcattttcccagttgcacgaatttttcgcgcccggctgttccctggcgtccgctgccgtcctgcaacttccgcagtccgtccaagcgcagcagccgtcatccgcctcctccgcgctgcaatccgtcatccatcaccagcagcagcaacagcagcaggaactcgttgccggagtagtacaacaacagacgcagcaacagaggcgggatcacaacaacggccgaagtggagccggcagcagtgaatcggtgaggcattttttggcatggcattttggcaagaggggggccgcacgagattctcggtctcaaatctagagaatttctctgtcttctatgtctcggtcttgaacccttggataagccccgatttggtagaaagtctcgaaaaaggtcggctctcgaagagccataattggcagtgtgatgtcgggaatggaaaattcatggcactcgcgagacgcaagattggcattagcacacctgtccaggcagggaaacaaggatgggatttgtcaatcccgagaatgggtgggggcccagattttcccatttcagtccaatcaaatctctctctattcccatttcagtgccacaaattcccccatcccatttcagtcccaccaccgtgagtcccaacaccgggaacagtccctgcccattgtgatccccaaattggaaaatcctttgggctttcaatacgctttggaggcgcccatttccacgtccattcggaaggaggacgatcggatgacatatgtgaacaaagcaagtgatctgtggaggcgtttttttaattttcattaatagtttttgttcgaaaaatcgaaaattcatttttttaaattttcatttaatttattttttcctccattttcagggccaattttacaccgtttcgcttgactacatccccgacctgcactgtcccctcaaaggcttaaccgtgagggttggtttattgtttttttgaaattttcaaatttttttcgaaatagtaaaaaccggtaattgccattaaggatggtttaatatattttcccgagactcttgagcattttttttaaaacacaaacacctccttccattagagcaaatctcgaagcttttgtgactgattttccaataccggcaaccattaaaaatagcggtttcaatttctggaccaaaatccaggaaaatccagatccaggaaaaatccagggtgccgaaaaatagcctggatcttgacctagatcaaggaaaaattcaggcctggatccaggtcgaggccgacctctaattaccaaggcattttgtaattaattaattttcccattttcagagtcaaattatggtcgttttccgcgaggacaaaacgtttgaggacgagctgaggacgtggatgttgtggcacaaacggcaacattcgcacaagcagcgaatcatcgaagtgagaacatttgggggaatttggaggggaaagtcagaaattacgaattaaaattgaagaaaaaaaaacaaaataaaatttaatttaataaaaaaacataaataaatcgagacaattaaactaatattaaaaatatttaaaatttattttcaattttttatggcaaaaatgctttttaaatgtaaaataaataaggaaaaattaaaaaaataataatgaaaaatagaaattgataattaaaatattgtggattatggactcgaat

SEQ ID NO: 2538 - DNA, 7739 bp, Heterodera glycines
tttttaacgatcactttagggtcttttgcatttctccgtatcaataattaattaggacttaccagacggagatgagccatagcagcaaatctcgccagttctccttctccttcatgcagcttttcctcttcctccttcagccactgacaaaattccgtcatggcgcccgggatttcccatactggcacgccaatcgggtcttcaccaacaaacacatccgtcattcgataaacgcctgctgcggcagcacggtccttttccccgaccattatcgtatggtgcagggccagaatcctcttaaaaataattaatggcttttactttaaaatgttaatgcttcatagattttgttttcattttgttaggcctcgcgttagggtccccgacttacaaaggaaggtccccaggtgtcagtgggatttccgaatgaaattttggatagagcacccatggcttcttaagaaaagtgcggaatgagcccgagtgccgagttgtgacgtgccaacattttttaacgaatacacaaattcaataattgttaggctctttttgcagtgttcaatggtgcagcggtagtgcgctagtccgctttttttaagccccaggttcgaatcccttacagtgctagcgaaagataaagaatgagactctttttttgagaattctcttatttttgagcacatttttggcgttttttagcacataacccgggccctgtttattattattggtgtaccattttatagtgagcagttgcggcgaaagtggcaacgtcatttgtttgggcgtcttcggcattgagccattccacaaattgcgtcattttctcaggcacttccgcagcagttgcttccaccttctgtccgcccacagtcacttcgtccactctgtattcccccggcatcgattccttctcccccgacatcacattggcatgcagcgctttgatggtctcaaaaatgatgtataatttttttattttgtttggatgaatcatatgggtaggaaaatcctaggaggtctggaaatttttctcatctagagggcgggaaatacaaaatttgccaaaaactacggctctatcaaaactacagtattaacactataatgccaacgatcaggaagacaccgattagaacaatggcgagaagcggatttaataattattttttacaaacaaattaattcatatacaccatcaaaggctcacgcacggaaaatgcattagagttctgtgcagtgagtatttttttaatcattttaatttttgaaatgttcaaaaaataataaacattttccaaaatccattaaaaacaaacataatatgaatggattactgtaggtttatgaccatttacaatcagcttaaatttactgtcagcatataaactgtttcgtttttcatgaaaattttgattcgctaacgcattttccattgatccattttccgtccgtttttactcaactcttcaccgcacacaaccataaaatttaattcttgtaaagttttctccccttttcttttgcagcaaaaatattctacctgttcagaaattgtttttgggtccattccttcggtgtccaagatgtacaagtatttcgcgtcatcatcaaacgacgcggacacatcgcgatcgtgccgcatgccgccggcggtgtttcgtcccgcgtctctgcctctttgcatgtccactgccccttcatcagcaccatcacagcggacaaagtgagcacgaacaggaagcaaatttggtaaagttgttcgcctgttcaggggggggctcatttaacgaaatgaatgataattttggtggggtaacaagcaaattttccgggttcgactcggaaaaccaggtcttaaatagcctgggtttttttcaaaataccgggccttttactggaaatcttgacgggtaaccttttgtttgtagccccttattcaacatttaaaacattttcccccaaattttgctcacctctcgatcgagcaggccaactttactgtcaggcaatgtcgtcatcaccgatctgaatttatttgtaaatgatagaggcggcatcaaccaaaaacgttggcaaaaaaattgtatagaaaaattggtgtcggttggctctcacctcgtctcccgcccggtgtacaccaccagtccaatggctgtaccgcttgccaacactgtgttggcccacaacacacagcacattctccacagatagagctccccccacccgtaacgtctcctaccctaattttttaaaaattttcccaaaaaaaatcgcttaaaattttttcaaaattttccctggaattttggatgacactgacccggtatgtgccgacaaatgcgtggttgtccttctgcagcttctccgcatacacctcacagttcaggtccaaaatttgcatgtcgtccaacaggttttgcgtgtacgggatggcaatgcgcagcttccaatccgtctctccatcaagctaaacccatcaacaaattcagcaagtttttttcggacgccaaaacctggtccgttcggatgaaacacgcgcccgacttttcggtggtgcgcatcagcacaacatcggccggcactcgacggtccttttcaatgatgatcaaatcgccaacatggatttcgcttaaagtgacattcattacgtgacaaaaggcaaatttttcatccctttccgtggcccggattcgaaaaatttgattttttaattattttttttccaaattcaaaaaaaaaacgatggaaaacgtacgcgcttttgatcagaacacggccctcaagcatacttttcactgttcacctccctgtcgcgcaacagtcggaccatgtcgtccacaaattcgcggatgagtgtgatgaacaggataaaaccctgaaacattttttgaacccataaaatggtgggggaaacattaactgaccaatggaccccaataagtgatcggagacccaatttggatggccgggaagaactgactgcaggccatgagcaggaagtacaggttgagaaagaatttgaactgttggaagagtacctgaaaaagaaaagggaaaattgaattttcgctaaaattttcggttttccctcacgtaaatttctcaaaaaaaaattcgcgaaatttttccaaaaatcaacaaaattatcatttttggtgataaattgttacccctggaaggtaaaaaatgtgtcatcgtccgggggcgaacccacccaacgccaaaatttcctgggaccgtccctggatgggtgccatttctgacctttgtgaatatggcaatgaaataaactaaatggacaaacgaccgaaaaaaacaatagatatacaattcaaggaaaaaacatgatgatgaaacatataaaatgatcattttttctgatgtttctgagaattaaaaaaaaaagagagaagtaaatttttgaaaaattgtacaaaaaagaagaataaacataaacctttgtaacagaaacggccacacatattttttcgtaaaataacacctgtcgaacaaatttggtaaattccgtggccccctgggcactgcacagttccacagtcgacgacgttcagccggctcatgagcatggtcggcaaagactcggagagcgagctgaaagcggggaaattgctggcataattgtcaccatttttccatccattttgctgttttaaaaaacttatatatctactaaaggtgtgtaatttcacgacgccttcgaggggggagggggggatttttcgtcaattcaactgaattttcagtttattggtcgaaatatccccaaaaatcgattgaattttttcaaaattagcgtttatgatgaaggaccaatgaatgtcgaaattttttaatgcctcatcagagctattttattaaatataacttattttatgttaattgaagttgggtttgaacccaggcctcactcaaaaaagcaaatttaaccaactgagccattcattccctcttttcctcgccatccctaggaaaggaccctcaaggaatatttcaaaatcggcataagagtaaatttaaccgagaaggcgcccttcgaatgtcgatgaactgggcgattagttggcgaggcgaacaacgggccggaaaatgggcaaatcttccattggtttccggcactttgtgcagctccaaaatgtgttcagtgtccgctgtttcggcacagaaacccaaccttaaaaacagcaaaaaaaacaaataattattaaacgttctcgttttgagcacaaagtccacctcctgttcagggttctcgaacagcccgttgaacgagtcgccggcgtcacagtttccgaacagtacacgctgttgttgttgctgatcagtcaaattaatattattttcgggacatgcctcacctaaaatttcatgtatttgctgaagattttgaaaaattgatagacaatttcttgatggttttatgcatctctttctaatcccattttttcagcgtacttctcttacttattaaaatattaatttttatggctcaattcggctctcagcagactggcaacgcttcgggattggtgggtatttatcgtttagttttttatatcctttttttgcatataggtgcggtgtctgtattcatcgcaagcccgttacccaattcctgtggggggccttttcccattggcactgatggaaaaaagcgaacggggcgaattgagagagagaaattgggatatgtgggtcgttaaaaacgacagttatcccagggcgtcaaataaagaggtcagaacaaaaaaaagagccgcaataattaagtgtttaggaagcgaaggaactgcgcattgcgcaccaaaaacgccgccggacggaggacgaataccatctgtttctctggcggatcatctccagccgaattcgtggcgaatgttcatgcggaccgctttgtctgcacttcagtttgcgagacctggaggacatttgcatcggccaatttgggataatcgatgtaaaatttattttattcagtaatttccataatcccattccccctcattgttatagcggttggagatgggtggccaaaaaaaaatccacttggtgtacgccgacaaacctgtcagtgcactggaggaggaatttaatgccgccgggaagctgtatggccagcctgtgcctgcactcggcgcgtacaaaaatggccgctcaactccaattgagccgcggctggactattcggcgcagtccaacgctgacgaccacccaggacttggctacaagtgtggccgttggcaggttaatggcttttaacaattaagctcttaaaaatgtgttttttttgcactccaggtcgagggcatggtgcccgaaattctcgaggaggacattggcgaacgtgtattttacacacaagcccaggtggagcaaatgctggacgactttaaggtagcttttaataaatgggcgagatttttttaaattttcattaatttaaaaaagcatttttctacgattttattactttttttaaagttatatgtgggtcaactccacagtgaatgaaaagttaacaaaatgccaaaaaagactatttttagcgctaattcaattaactgatcatgatcattgcctttttgtgattttattcactcataactgccttcttaatttgattactgattcagtcataactagggatgggatttctaagtttttacttatttttctgcggctttaactgaacgagaaatacacgaaaaacacattttttgtctgaaaattttgcgttttcacgcccttattcgaccttagaaatccttatttttgatgttcgcccttaaaataagtttttgcccttattttggcgttttgtccaaaatttattaacaaaaatgcaataaaaaacgaaaaatacacccctaagaatcgacccaaaaaaatttcgaaaaaatacacccctaagaatcgacccaaaaaaatttcgaaaaatatacccctaagaatcgacccaaaaaaatttcgaagaaatatacccctaagaatcgacccaaaaaaatttcgaagaaatatacccctatgaatcgacactaaatttttcaaaaatagaccctaagaaatgaaaaattttttctaaaatatagcttatttgtaactgcaatcagtgaataaaattgtttgccttagtctgaaattatttcatgtaaaaaacagcaattttaaaaattataccctaaatttgaaactttttcgaccttattttcgcccttatttcgcgaatttttcgcccttatttacggccttattttggactttttcacccttaaaaatcccatccctagtcataactatgacatctaaaaatatggatgaatatcgcgaaatttagccataaaataatgacaaaaaaaacgcaaaaacatgaacataaaatagcaaaaatatggtaattttgcaaataaggttacaatttaaatttcttcagatttgttaaatattaagagcgaaaaacaacctgagaaatgaaaaatacgcttttttgacataaatttataaatttgacgaaatttaaaatttttcaacatttccacgaaagtttcaaaaaatatttttgtggtaatttttttgaaatttaggggtcaaaaaaaccaattttcagacggggctgttctaatagattgtttgaaaaaagccaaaatatgcagaaatatggattttaatctcctaaaacatgttttgcatgcatttcaggtctcccacagtccagtaaaaatttgtattttctttttatggatgccttgtcataactcgcgaatttccaattagactgaacaaatttgacatcaagtgaaaaatgaaaaagtagtacaaaggaaaaaaggcaatgaaatagtgcagacctttctttacacactggagttgacgcatagtgtgggggtggggctgtcggcaaatcggaggaaggaaaaaattcttgaaatttagtcaatttttcttaattaatttattaaaaatcttttaaaaatcgggtaaaatttcgaaaatgtcctcattaacatcgatttttttttgacaaactgttaataagttgcacaaatttcaaaatttttcaaggagtgctgaatgtttttgaaaaaggcacataaaaaagtggtttgtaaagaaaaaagaaagagtcatcaacaatttctgtttatggcctctggtccgaactaaatattttctgcaaaattttaattggtttttggtcaggtgtccactgattgggccggtcataaaatgacaaagaaggtgttcgtcgagacggatgctgcggtcgatgggaggcgggacgcaattttggctggtgcccgccgtaaagcggcgttttatcagctgaaaaaaggtgtcgtcatgaggatggacagcatgtatcagcaacaacagcagacaggccaaattggacagaagggggagaatgaagcggagcaacagcaatggggcaaagcgcacacggaggaacaggccgcttttgaatttgtcgacgttgttgtgcatcccgaggaccttttcgtcaacgaaacgcacagcacttccacctttgtctaccaagccggcgacaaaattctccaaaacaattcactgcggcacagaatggcgagatttctgttgccaccaggagaattggtgtggggagcagctgctccaacgatcagcaaagcaagaaggacgcgcacacagctgattgacaagcaccgcaatcgattgaaagctgaagtgaaaaatgaaat

SEQ ID NO: 2539 - DNA, 2148 bp, Heterodera glycines
atttagctgatgccgacaaaggaccgtttggaagcgttggaggcgttcgcgcaaaagcggccccccaaattcaaaggggaatgaatgatggcgagagaattgcggcgcgaatgcatattattgtatctagtcatatcagcagactccagcaatgaaaataagaatgaagatgacaaacaacaaaaaacgcattgtttttttttatacaaattttgttttaattatttccctttgtttttgccccaaatgccaaaaaccctttcaaaaagcgaaatgcgcctttgttttttattattattgcttattggaacaaacaattataataaatgaatagcgaatttgaagcaacaattaaagggataaatgatggaatttgactaggaccaaacatcttcaattaggcgctccttttcacgcagttttttcaacaaatgaatcgcttcgacaggggaaaagcctggaaaaaaaataattttcggtctgatcaagtcgaccaaatctatcctgatttccctgtcgggttaggggccgaattggggtgcggccacagggattttgagtgggcccgaccttggggttttttaacgaatggatattcgggatttgtctcaaccaaaaccatgggctcaatgccgtccctgtttaagtcagccaaataacgctcgcctttctcgcgctgcaaaatatcgctgagacatgcccacaactctctgctcatgttcttcacgtcgccacacgcgtagaacagaccgccctcccccaactcctccgcctcattgtcagtgggcatcaaaaagtccgcaacttcggccgaccgttgccgcaacgcgtcatacactcgctgcggtcgatggcactgttgctggtggtgcggttgtggcgacgtctcattgtcgccggttgtgcctgctggtggcccagcgttctccgctgacgccgccgcgtcggcgactgttggacgcgactcgcacagcaccaactcgctcagcacaccgtcagcgaccatctgctgcagttcagacatgaaatgtgtgaattaaccatttggaaaacttggcacttggcatgaatatttgtgcgtggtacctgaacaggaattcgtcgtccaaattgctggacgcatagaacagaacgcgtttcactcgtccacaatcgccgcccattcgttgcatgaaatgcctgcaaaaattttaaaaaatccaccttttgaaagaatttttttataaaaaaagacaggcagatagtgtgaaaagtttctagaaagaattaagtcaatttcaagttgataaatttcaatttgctcctacagcgccacaaaaaattttatatttccaatttccggaaatttttgaggcctcagaaaaggtgaaaaaagggggacctgattttttgaagaaatgcaatgaacggagcaacaccagtgcctgggccgaccatcatcaacggcatgttcagcaacaacagcgcatggtcgggctggtcaaccatcgtggagtcgggggacggcattgaggcgggagaggggacgaaagaagggggcaaaaaacggaatttggacggctccttttggatgatctgcaatttttcaatatggaaatggatttctttatgaaccaaaaaactgtcaaaaaagtaaattggacgaaaaattttcatagcaaaaattaaaaaagggtaaaaaaaaactgaaaaaataaaattattttcgaaatttttcacaaatttttaggttgagcggaatgcaagagaaaaagcatttcgtttataattccgaattatcatttttggtaaattggaaccatttttggtcaagttcgtcagggttcttcaaaattagaaaataattgcaatcgcaccaaatattttatttatttttttaaattttacgggtgtccgtccccacctgaacagtttggccagtccgttgctgcaacagccattgagtgcatgcgccgtaccgtttttgttgtttttggccctcaaattccgcacattcgtcaattatcactgacgggggcatttggaggacggagtaaacgaagcggaaacgcaactgttgctgcttgtgaggttgtgccgacaaatagcagcaaagtgtgtaatggcggggcaaaaggcgcggaaggcactctgaaatttggggatttt

SEQ ID NO: 2540 - DNA, 1516 bp, Heterodera glycines
  unsure (1)..(1516): unsure at all n locations
tttgtttctaccaattaaacattccaacggcggtgtaagtgaagagaatgtgcacagcaattccaccagggaaatgttaggctaaaaaatgaaattttgaaaagacaaaaaaaaagttttttaattaaacctgtcgaacaaatttggtaaattccgtggccccctgggcactgcacagttccaacagtcgacgacgttcagcaggctcatgcgcatggtcggcaaagacacggagagcgagctgaaagcggggacaaattgttgatatttttgtcaccgccactgccatccatgttttttttgtgtgtttaaatcccgaaaatcgaccatttttggggaaaaacagggttataaattagttgtaaatgaaataaatagggtctccgactcatctccaaaaacttattttatgagcctgattgttagtggcagtaaaattggaaatttaaatgaaaatttactcgagaaggcgccctgcgaatgtcgatgaactgggcgatcagttggcgaggcgaacaacgggccggaaaatgggcaaatcttccattggtttccggcactttgtgcagctccaaaatgtgttcagtgtccgctgtttcggcacagaaacccaacctaaaaacgaaaaaatatatatttatgggaaattttggattaatttactccattttagaatttgaaaaattaaaaaaaaaatttacaacctaaattccatgggaatgccggaaaatgtttaattttattgcttattttgccaccttttaagcacaaagtccacctcctgttcgggattctcgaacagcacgttgaacgagtcaccggcatcacagctttcgagcagttcacgctgttgttgttcttgctgatcatcagcaccatcctgatcagtggtgatcagtgccaattccaactcccattttgctttgccaattcggcccgtgtccgtccgagtgacgcattcgttacgcaccacgcgcgtgcgcaacagcgggccaaaagcagttggaatgggcgcaccgcattgccaaagtgtattggaagaggactaaatcaaaaattgttgtaaaatttaaaaattttcaattttgggacatcccttatccctataaaaatcgtttntaaacatgaattttggtttaaatttgtatttctattaccaagacttgaaaaatccactgaaaaaagttagctaatgaaattaagacgtcttaaaaatgaaaattatacaccccactccccatcctcaacaaattgacctttacatgctcattgtcagcaattcgaatgctcagcaaagattgtgtgatggccggaacactcaactcggttacctgtcccaaatgcttggcacctgaacccaaccattttaaatacataaaactgacggttaattggagacgaagattttttgaattaccaattttcaaggatggaacttggtccatgaaagcgctaagcgttgaatcgaaatgcaaatttttgttggcaaatactctagaaattgttgtcttataaa

SEQ ID NO: 2541 - DNA, 1864 bp, Heterodera glycines
  unsure (1)..(1864): unsure at all n locations
ctgatcatttatcccctntttgttcatttatccaattttccgtgatttataccattcgcttcccatttattgcctaatttgtttttgtgtcgatcatttgtcccattttgtgccatgtttcttacatacactgagaacaggtgttccgtcaccgcagcagtcatttgttgcggtcgcttaattggtgtgttccaaaagccgcgcagcaccgggtcaatgccgccctcagacaacaatttttgcgatttgaaagtgcctttagggggataaaatttgttggcatttttttcaaatgccaaacttattgccttcatttaatggaaatggacccgccgctattgactggccattctcagtgagtcgggaaaattgttccttaaaaatgtcaatgatcagccaattaacaacattagaacaccagttctttttctacttgaaaatttattttaaaaagttttgccaaattctgaaaattaaagttctcttataaaatttcaacaaatttcgaatttcgaccgcgcgcttttggcgccaataacaatttatttcaattaactctccgacggatccaatcctctattgtctgacccgttaattagcttctaaaacccattagaatggcaagtttcgtggcactgcccttgaccaataaaattcatcttccttaatcacccgattatcctgtaaatccgtcaaaactgactacgatcgttccgtgcccaaaacggaaggcggcggcggtgaactcattggccacggtggggtccacattttggtcgtatccgttgtagggcccgatcagacgttcagcggatgggccaagcatcaacggaatgaactcgttgtagaggacggcttggatttcggcaccgacaattttgcgggtctcctacgattttttagtaggcccaaaacatagttcaagatccgtttgaaggaccaaaacatccattaggttaataccaaaagtaaattttggcaccatttttgccgtttttgattttttgccttttttctcacttgaaaaagtcggtcaccactccatgcccggttcaacgattgcaattctcgggcaattctgtcagatgtatttaaaaatggcatgcaattttggcataagaaatggcacctgttgtgctcccggacaaaaagtgtgtataacgaggaaaggccaatgaactgtgaaagtgaaggaaatgcatgacaattttgtcaaaaaattgatcatttgtcgtttagtcaaatcataattaacataattgtcatttgtcgtctatcaattatttaattggccttagatgtgaggttaatcttcatttaatagcttttggatgtaacaatcgcataaaaattccaaaaaattacgggaataccgccagatttcaaatttgttaaattcaaaaatagcaaaatttcgttaccatgttcacacggctgtcccccgtgacaaaagttgctgctgcgcaagtgccgcggttggtggcggcaccgcaacggctggcatcaaacggcagaaccatcattccgttgaagctggacatcttcaggaaaccggtacgaccgtctcggaccttcagtctaaagcagttgctgatcactcagctgatcagtggcagcgagtggaaagattcgtcttgcaaccaaaatccagctctgatcacgggtgatcgagccaaatatatcaaaagcatttttttagaattgtcatcatttcagtcattggaaaagggctcctctttttgtgatcagagcacacttgttcagcagatcagtttcgataaataattaaattttaaatttaaaacgtacaaatccttggcatttgacccgtaaattgttgatccatccacaaaggcagtgttct

SEQ ID NO: 2542 - DNA, 4203 bp, Heterodera glycines
ctctccaaactgacgagagtgatcaacaattggtgccaaagctttcaaaatctacctcatatatgcccggaaagaagcgccgagcgtcggtcgtgccaaattgttgcacactccgtcaatagaccggtacgccaaatggtagcacaacgcttgggaacaatgagcactgtccgcacttagctgaacggagttgcggggataatccggattagtggcttaatttaaagtcgaaatttcccggactcgagaacagagccgataattgatcaagaaactcgagttgagaattgactccaacaccgagaccaagaatgattggaagagtcaagaccgaggccaaaaattcaagaaatattctcggcacaaaaactgagaaacccaaaggtttttaattgttattacgatatattataactacctgaggaaaacatccgccggacttgttcgtcctggcaaagtccgctgcgtacagtgtataacgctgtgaattgtcctcgatcggattgatcagtctgcctttgatcagctgttcgatcgctgttgacgggctcttccgaatctgatcacaagaatttgatgctgcttgacgatgatttgcgcctcctccttggctcgtcaaaatgttaacttccgatcgaccattttgttctctgttttggccattttgccaatttctgcctctgaattggccatgttggccttcgaatcgtccagtttgccaatttccttctccaaatttgccatttacagcttaaatttggttttgtttcatttgggtttttacgggtcatcaataaccataactttcaccgtaaccgccaccatttgactcttgtccatagattactgtatttattagtaataaatactgtagaaggcaaagaaatagcatatttttattttgttttctaaaattacatttttattttattttctaaaaattttaacgaaaaatccaaattttatttaaatttaaatttgattttttgaaatgaattgaagatgaccttaatttgtttgtgtatttttaaacattttttggcaataaaaaaatatttttcagttaatttatgtgtcaacaaattttattaacaattagggagggctccgactcaatttgacaaattacccaaaacgaaatgaaaagaatgcgcatagacaaaagaaaatgaattaattaattggtgaaaatgggaccaaaaaaaaatcattagtggttttaaaattgtcaaaactttttcagaataaacacaattaattcaattgcctaagtgtattcttaattggcctaaaaaatgtcaaaacggtttcaaagtttaatcaaaaaaaaaagtaaatttttgaatcttttatccaaaccttttttagggtttgaaaaatttcttattgaaaaacaggaaatcgagaacatgaagtcggtcgaacattggaaagagtacaaaattctctacaaaatacaaaagtccacatctctacgacttacacccatgaggtatgggcacttcaatttcggtgttgatcatttctactgtaaactgcaatattttcttaagaaatacagtactttttgtagacaccgaaattgaagttgacatatctcagcgggtgtaatttgtagagacctgaggtcttttacatattgcagagctttttgtgctctttccaatgggtctactcaaaattttcaaaaaaaatttcccaaccccctaggaatttttttttctaaaatgttcccgattttcagtattttggggtgtctagatcactatgaaggagtgatcggatcaacttgttgttaaatacttttttgatcagcatcaaaacttatgttagcatgaattatttcagatttttctgtgctctcaaatttgagattcaaaaactggtgttaaacatatgcaccactgaaaatggggtatggtacacaaagtcaactgtaattcgggtttgaaccgatattttgcttaatgattggtatcatttgaaagccattaaaaattatacaaaaaatgtcaaaacatttggtcatcaccaaccatttaactttttatgaagccaaatttctcgaaaaggctagtggtgttagacttatgctcctaactgtatgcactgtgaaaaaatttttaatttttaactttgttcacaaaatttattcacactcatacataatatgcaatgaagttttgtatggaaatgtcaccgtttttgactgcctcaacttgacctcaaatttgcactgattccacgtttcgatacgcgctggtgtacaaacatttctatgacataacttaattgacaatttggagagcaatttgcaattcgcaagggcaatggaatgccgaaatcatttttcgagggcaaatcttatggattcatacttggaaaaaaaattttccttgtgcacaggttttcttaaaatttttgcataggctagactatttttgaatcttttctactaaattttattttttagaaatttgttttctaacgttgtctcctgcatttttacaagggcatttttttaattagaggtcgtttttggctggcatttcactctagtaattgttttctttgtcatcacgcgtgttttttgtttatttttaaagttctgtgctttatcaaaatgcaaacatatggatgggcggagcgagtgagtaattgaaggctaattaatattgctgttcgagattctcggggtcaagtctcgttctcggaaatttttctgtagcgttactaattaaccgtaggtttgggtaaaactgcagaattgcagctcgcgccaattaaaaaaaatgcgaataaggcaatacgagatgcactactctgaattatgcattttattttaattctgcgcataaataaatttttggcattatgattcatccattacattagcataaactagcggtaggggtcaactgcgtctgatcaaacaaaattggtatcattcgaaagttctatatatttagaagataatgcaagtcttttataagcaattaagaaacatgaaaaaaagttaataattgaaaactgcagaaaagccagaatttttgtataccgtaaatccgctatttgaaggcccgggccttctattgttcaacccctcccaaaaggggcctttaattggagggggccttctaccagagaggggccttctattgttcaacccctctataagtcaaatgtgaattgcctattttttgtacctctatttattcattataagcatttttacattcaaatttcatggtaaatttgtaattttgaatcaatttagttaaacaaatttgcttataccaatttctctataagatggacccatcaattgaatgtggcaattcaactaatttagtaaagcctcgtttcttattcatttgttcgaataatttttattaaggtctgctgcttttgcaacaaacccacgtctggtgctcacgctgtgtccctttgttttactgcctaagaagagacctgtgcctgagattgtcaaacgttttaagaacgatttagtgttgtgctggtgtggccgtacatggatggacaacgaactaacgacaaagtttttagaggaagtgcgaatgcttatttatgtctttaaagaaattatgtaattaaggtgcttggcggttttgcattcaggacccggcttctcgtttgggacagctttcgttgtcacatcagtgacgataccaagcagacactccgacgtttatccatcgaatctgctgttattcccggtggcactacgaaatacattcaagtactagacaattcaatttaaatcaaagaaaattattttagccaccaaacgtgtgttggaacgcaccgtttaagaacaaatcaggcaaatttacgatgaatggatggtgaatggagagaaagaaacaacgtcatccggaaatatgaaggctccgccaatggagacttgatttgggacaagacgaaagcgatgtctctgtcgacgttgctaatgaataatatattgatcaaatttaaaaactgtgttttagggggcctttaattggagggggccttctaccagagaggggccttgtattgttcaacccctcccaaaaggggcctttaattggagggggccggccttctaccagagagaggccttcaaatagcggatttacggtattttattttaaattgtttttaaaggggctattccagtttacgcgtcctatcagtgaccat

SEQ ID NO: 2543 - DNA, 3284 bp, Heterodera glycines
cactttcacagacgcgttacggtgacgcggccattcgtcgcgcggtgccgttggccctggcgctgctgaacacgtccaacccgcagttgacaatcatcgagacgctcagcaagtacagccacgacgcggacacggagacggcacggaatgcaatctttgcgctcggattggtcggcgccggcacaaacaatgcccggattttggcaattctgcgccagcttccactccaatgaccaggtaattattgaaaatgcagtaataaatgctaagtttagtgcagtaattagtaacaaggaggattttgtttctttgccactttttataaacgggaacttgggccctgacaaattccaccaaaagatatttcaatgatgatgatttttcatgtagagcatggttgatttactattgccaatttcggcttttttggctccgttgccgaaagtgatcagaaaaaatcgatcaaatgaaaattcaaccaaaaataccttaaaatttagtgccattttttcttacgttcaaatgaccatttttcatgggttcgggtccgttcggcagacgatgaattattttgatttttcttctaggtattattccacctagcaactttggtcgattttttctgatcacttttggcaccggaacaaaaaaagccgaaaattggcaacagtaaattggcaatactctacatcataaaagtgtcagcaattaatttttccatgaatttctcttgtttttaaaaaaaacattattttgcacaaatgcacatccaacacacagaacacgatgatgctgctacggatcacccagggactgatgcatttgggcaagggcactcaaacgttgaacccattccaatccgaccgtcagttgatgtgccccgcaattgtgccatttggattggtgaacgaattggaccaatgaaaagctgatattgaagatgatcggcggttcagcagaccggtccatttaattttgctaatagttcagatggtacgactttcattattgattttttgcataaatgcgaatttttgggaaaatgaattttagacttttgttcgacattcaaaaaaagagtcataccatctgaactattaatccatcttttattaatgttatgacataaattgcatacgaataatatataaacatttgttttgtttaattcattcaaattgccatgaacttttagcctttgttctctacccggggccggtcaaagcagctaaaataaactttttggaaagcaaaaatacacaaaaaaataataattcgatttttacaacattttattgaaacaaaatatttacatatacatacaattgatacagttcacatacaatggtggattacaaaaaatagttacatagttagacaatatagttacataacatatacaaaatatttacatacacaaatgactaggaggaggaggagggaggggagagatgggggcgggcgcacggtcttgagcacactgctgatggaagcagacgaaggtgatgaacggtgtcatgttcttcgcctctgacgatgccgccaccaagcactcgtagtactcatcgcgcttctcctcgggcaggatgatcggttggaagccgcggcgcatcagaacgaagttcatcagcagccgagcagtcctcccgttgccgttgtagaacggatggatgtacacctgtttttaaaaaatcttattttttagcaaagcttttttggggaaggattagcacattaacagtttatggaatttaatttagaaaattgtacaaaatatgaaaatttgttgtttttgggtaaaaaaacccgaaacttttgatttttacgatatattttggccttttttttgggttttaacacaaatttttgtgttttttttcacatatataccgtatttcctaaaatagagttcatgggtctttgtttttaatttgttgattttggcaaaaaaacggaatttgcttttttttcgtcattagcacattttttgatgtttttttttatcatatgtgtaccgtatttttcagcccgtcaaaaaatgggggggggtgtacttaaggaaatacggtatgctttgtttcagaatttaaactcaaaattcagattgccttgtaggagtgatctgattgatcacattggtgcaattggcttttttggtcacaaacagttataatagcgtgactttctgatgatttcgcaaaatttggggccattttttaaaataaacattaatgccgatagtatcgattctcaattttttaaaataatttattggttacaaattgattagcgatgaatttttgagcaaataaatcagctcaaaacacagtaaaaaatcaaattcgatactgtcggttcccttttatttatttatttttcaatttttctcacgagagtgtggtgcgcccgcgccgcaaattccccggcggtcatcgacttggcctcaagatgttgattgaaccatctgatgaagtcctgcattgctgccggcacttcctcatgtggcatcggctcgaagtctccgaccgtcatgttgaatgtgcgcaagcagcccgcccgggagtcgcgtcggcccatgacttccaagtggagttcaaagaaggtctgcaaaaagtgttgtatttccaacggaagggcatgtgtaggcagcttttcaccttgagcgtgaactgctcgacctggaaggcgggcttcagcagggctggcagcagcttggcatcatcggcgaacggcgaatagtggggggtgtcgtcgtcgtcctcctcctccgcttcagcttctgcagcggctgcttcagcttcatcattctcgccgtgcttcaggcccttttcgcgcggcttcttggcttggaagatgggcttctgcagggctcatcctgcccgagaaggcacgtgatgagtactacgagtgcttggtggcggcatcgtcagaggcgaagaacatgacaccgttcatcaccttcgtctgcttccatcagcagtgtgctcaagaaaccgtgcgcccgcccccatctctcccctccctcctcctcctcctagtcatttgtgtatgtaaatattttgtatatgttatgtaactatattgtctaactatgtaactattttatgtaatccaccattgtatgtgaactgtatcaattgtatgtatatgtaaatatttttgttcaataaaatgttgtaaaaatccgaattattatttttttgaatttttgctttccaaagtttattttaacctgctttgaccgggccccgggtaaaaaaacaaaggcttaaaggtcatggcaa

SEQ ID NO: 2544 - DNA, 4796 bp, Heterodera glycines
cggtgctggtctgtgcggaagtgatttgtgagcggtgctctgcgcacggggtggagctggagcgggagccgttgcgccgagcaccgcgctgtcagtgcggcgtgccgtggcggggcgccaaccgtcgacgccggtgctcacgcatcggtgaacagctcgttcgacgacagcggcgtcgacattggagcggatgagctcggtgtcgtcggacaacaacaactgccgttggacgggctgaacccgcgtcggctgcgcttcttctgcgacggggagccaggcaccgggcggggcgcgatggagcaatttgtcgactttctgctccacaccggcccaaaaggtgtgcgcaccgtgatgcttgcacataacggagtaagctttgatgcctttacaaatgcgttcataatttattgttatgctgcttttctctgtccgcttagggccgttacgacatccatctgttgctggaggagttgcagcgtcggggtgagcggccgcgaaaggcggttcagcatgggttgcgcgtgtacatgttggagttgcgcggcacgcaccagcgggagctgatctgcaaggactcgctgaactacttccactgtgcgctggccaccctgccgcgcacgtttgggctgcgcggggtgccggacaaaccgttcttcccctaccatcacatccacgcgcgcaacctggatgttgagctgccggccggcacgctgccaccacctgctgcctacgacccggatggtgcacacgccggagggcggattcctgcgcggacgccgagcatcggtggagtctcggcgcttcttcacgctgctggccgccgtacggcccgacctgggcccgcttcgcactgcccgctggtccatcggcgaagctgttgtgggggacagcgggcgctcctaccaccgccgccgccgcgacaacaacagcaccaacagctgtgccggcgccgacgatgacgtattccggctcgactgcgtgggctaccgtcatccaccactgcgaccgttgtgcatcgagttcaacggctgctacatgcacggtgggacacctacacacacacacacacttacaataatgttttaatttctgagctcaattaaggttgtcgggagtgctaccccgacacatgctgttggcggggggacgcagcgcggagttgctgtgggcgcgcacccagcaacgggcctgggagctcgccgagctgcacgggatggaggtgctgtcggtgtgggagtgccagttccggcgcactctgcgcaccaacatccgcctccgaaagctgtacaaggagaggtgcgtggatgtgccgggcccgctcgacttgcgcaagcatgctctgttcggcggccgtgttgagcccttttggctgttgcacaaatgcgctcccgacgaagagattgtgtacattgacattgtatgtttttttgaatgacattattttcatctgaattttatcaaaatgtttgtctctccaaggtgtctctgtacccgtactgcatgaaggcgcgccccttccccatcggcacaccgcacgtgtggaccggagagcagctgtggcaggcgggcgcccatgcgtttgaaggtatttgtagctgctgctgctgctttggtccatattggaaaacagcattttcagcttctgctccacctccagcagggctttgtcctcctcctgctctgccatggcgccgcccggaggacaacccgttccgcggcttcctcttctgccgcgtgctgccgccaacagcggaggagctgggcgatcgcgagccgctgctgccctaccgcacccaggcggatggacgtctcatcttcggcctgtgcgcgcgttgcgccgagctgcgccagcaacgaatctgtcatcacacggagcgtgagcgtgcgtggaccgctgcctacacgcacgtggagctaaatcgcgcgctgtccatcggctaccgtgtgctgagcgtccatgaggtgtggcactacgagcgctgggcgtcaccggacaacggcaacgggctgttcaccgaatacgtgaacaccttcctgcggctgaaggcggaggcgagcggctggccggccggctgtgacaccgaagcggcacgcgcggagcacatccgccaatttgcggagcaggagggcatccatctccggcccgacaacattgggcacaacccaggtctgcgtcagttggccaaggatttgctgaactccctgtggggcaaaatggcggagcgtccggagcgcgacgaggtggtgtacaccaacagcgcacgcgacttccacgagctgctcatgcgtccggagcaggaggtggtcagcttcacccacctcaacgaccagctggaccgctgtgtggtgcgcaagcgggagccgttcgcacgggcgccggagcacaacaacttggccgtcgcatgttttgtgacgtcccatgcccggctgtacctgtacgactggttggaggaggtccgacgggtgggcggtcgatctctgtactgcgacacggacagtgtgctgtacgtgaagcagcgtggcgctgaaggtgtgcgcgagggcaacgcgttgggtgacatgaagcgggagctgcccggccgtcgcatcatcgacttcttcgccgccggcccaaagaactatgggttccaacacgtggacgcgtgcacgggcggcgacctgaaggcggagcgcaaggtgcgctcttttgagctcaactatgcggcggaccagcagctgcagtatgagcgcatgcggcagctggtcatcaaccactttggcgtcgggtaaataatatgacaccactcccctgttgggtcgaggggggggggggggcactgaggcactctgaacacacacacacacacacattttttgatgattttcaggcagcaccatcaacaacaacaacaaaggggtcccgcggctgatgctgctgacggaagcgatggccaggaggagcgcaccatctctgtgccatgccagcggtttgtgcgcaaccgccaggcggacatcttcacgcgtcgctccacccgcgtgtaccggcccgtgtacacaaaggggcgcgtgcttcggcggggtgcagcagagtgtgttggtgagtcacaaaagaaaacagaataaccaaaagggagaatagcaactagattaccacacacacacacacacacacacacacacacacacacacacacacacacacacacacacacacacacacacacacacacacacacacacacacacacacagcaacaacaatttcaatttttcagatgaagtgccgccgcaatccatacgcactcgcccatttggatggagctgttgtgccggtgacgtggaatcacccgacagctcagtgatgaacgaggaggaagaggaggaagagcccatgcaaatggctcccgatgaagctgaccagggggaggaagaccgatggggggagcatgtttggccggaagaaattgctgatgataatgatgagccagggcctgaacggaagcgtgcaagggtggaacagtgcgtggcaccgccgccgccctccccaccaccgtcgccgcttcgcgagccgcatgcggagccggagccggtggccggctgctccacatgggatcagatcacacggcacacaaaacatatttgtagaaataatttttaattttccgccatttaaaatatgcacaataaaatttaaaaaatattattttctttgatggttttgacataatgctcgaactgacgcaactgcttgctccagttcttccggttgtcgcacaccagtcacaataacagtgccggtgatgaagaagagacatgttgccaatgtgttttcccctatttttttttgtttgttcttttgctcgtttttcttcgcccccccccaccatttgaacgcctgcgtatcaccagtgtacagcgaaggccggggaaagtgcacaagtcgaggcacacccgtttcacatctgaactgctaaagtgttgcgtttcgcaccctcccctccctcgacccgtctctcaccgttttggccaagagatggcaagtgttgtgccatctgttcaatgttcagtcggtagggcaagtgcagggtagtgaccagattgcgcaactccaccgcgttgacgctcagtgagagcgccagtgcgggaaatccgccccatttgagtgccgcaccaactcgtcggcaaacccttttggtttgcttgacacattgtgcgtggatttggttgggcgggacacccccaatgccggtcagcaccacacgaccactgcgaaagatgagtgcagtggtggtggtggtggtcgcggtggcggcgctactttgctgcctaggtccgctacgcatgcgcatcacaatggcgtggaagcggtggggtgcgtactcggtgcacaccccgttgcgtgccaaagccaaaaactgtgcaagggaaaagcactgctgttgctgctgcgacggtgagcgattgtttccgtttaagggccacacagcaaacgtagccgtgctgtttatgatcgctaattgctctggcatttcacaataatgcgtttatcttctcaataaaagaagtaaataacgggcttttaaaaaatgtgattgattgattgattgctttcattgtgcccgttcttagtttgtgaggcggacacacgcagtcgatgatgcggtggtggtagtggtagtggtggtggaggtggtgctggcagcgtcctccggtgcagtcaccgcgacgtgcacctggatgcactcaagcgggtagtaagaagcatgcattccacctccaaattccaccagagtgggaagactcggatggcgaagccg

SEQ ID NO: 2545 - DNA, 5382 bp, Heterodera glycines
cacagctacagcaatttcatttgttcagatgaagtgccgccgcaatccatacgcactcgcccatttggatggagctgttgtgccggtgacgtgggatcacccgacagctcagtgatgaacgaggaggaagaggaggaagagcccatgcaaatggctcccgatgaagctgaccagggggaggaagaccgatggggggagcatgtttggccggaagaaattgctgatgataatgatgagccagggcctgaacggaagcgtgcaagggtggaacagtgcgtggcaccgccgccgccctccccaccaccgtcgccgcttcgcgagccgcatgcggagccggagccggtggccggctgctccacatgggatcagaccacacggcacacaaaacatatttgtagaaataatttttaattttccgccatttaaaatattcacaataaaatttaaaaaaatattattttctttgatggtcttgacataatgctcgaactgacgcaactgcttgctccagttcttccggttgtcgcacaccagtcacaataacagtgccggtgatgaagaagagacatgttgccaatgtgttttcccctattttttttttgttcttttgctcgtttttcttcgcccccccccaccatttgaacgcctgcgtatcaccagtgtacagcgaaggccggggaaagtgcacaagtcgaggcacacccgtttcacatctgaactgctaaagtgttgcgtttcgcaccctcccctccctcgacccgtctctcaccgttttggccaagagatgacaagtgttgtgccatctgttcaatgttcagtcggtagggcaagtgcagggtagtgaccagattgcacaactccaccgcgttgacgctcagtgagagcgccagtgcaggaaatccgccccatttgagtgccgcaccaactcgtcggcaaacccttttggcttgcttggcacattgggcgtggatttggttgggcgggacacccccaatgccggtcagcaccacacgaccactgcgaaagatgagtgcagtggtggtggtggtggtggtcgcggtggcggcgctactttgctgcctaggcccgctacgcatgcgcatcacaatggcgtggaagcggtggggtgcgtactcggtgcacaccccgttgcgtgccaaagccaaaaactgtgcaagggaaaagcactgctgttgctgctgcgacggtgagcgattgtttccgtttaagggccacacagcaaacgtagccgtgctgtttatgatcgctaattgctctggcatttcacaataatgcgtttatcttctcaataaaagaagtaaataacgggcttttaaaaaatgtgattgattgattgattgctttcattgtgcccgttcttagtttgtgaggcggacacacgcagtcgatgatgcggtggtggtggtggtagtggtggtggaggtggtgctggcagcgtcctccggtgcagtcaccgcgacgtgcacctggatgcactcaagcgggtagtaagaagcatgcattccacctccaaattccaccagagtgggaagactcggatggcgaagccgaacgccatgtttggcgaaaaaatactgacgcacctgaagccgaagatggacggacatcattataatttaattatccattgtttcttggtcaaatgggtggctgactcaccgttaggttcagataaccaccgcaggcaaaggtcagactggcgctccgtgcactaaaattgtgcgcgtgcagtgtgatgttgcgctcggtggggcgcaaatggacagtgcgcagaaggcagcgcttctgcagatgggtgagcatgcgaccacgtgcgcccttggacaggaacaaggcctgcagctctcccacgctgcatccatggttcagcgcacacaggtagtcaatgagtggcattttgagcacctccaaagcatttcgtggtagctgatgcgggtggtgacagtgaccacatttgtccgattccgcacatccgctgactgattccatttcatcatcatcatcatcatcatcatcgtcattgtcattgtcatcatcatcgtcgtcgtcttcgtagtcaaatgatgagtccatgccttgccttcgatgcgttgttgaaatgtcctcatcttcctcactctcctcctcctcattctcctgttcatcaatgaacaaaaggggcccttttgcacaatttgaatgatgtgcatccatgccgttcctgtccgcctcctgtttgacctgttgtccagcctcatcatcatcatcatcatcatcatcaccattgtcctcggcggacagctccactttcggtgcgatgatttccgctgtacgcccctgaatcttcttgataaaaaattaaataaccgacaccaatttagagcaaacctgttgttgtttctgctgctgctgctgctgctgctgcgtcggttcaatctcactgaatagaggcggcggcgctgccgccactgtttgttcatcagtcataaaatcaattttcgtgtcagtgatggcgggagtgtcatttggcgctgccgacatcttttggtcaacagcactcgctgcctcggcagcagcctcagctgctgctgacacatgagcttgctcttcaaccaacaacggcattgtgcgaggagacgcaacctcgcgctgttggcgttgttgacattgatcgtgtgcagcagagtcggcggcggcgtcgtcggtgtctttgacagcgttatgaacgttgaaccggaacatgtccattgaatgattattcaaaaattcggaagctaaaaactttatatatgtcaatatgcgaaatgtgcgggaggggggagggggaaggataagttgctttttaatatatatatatatatatatatatatataatgagtaaaatgtctttttagtttatattttgggacaagagctaaacggcataatgaagcagcagcagcagcagacaaaagagcaacctctccgccatcaacaagtgccccctgttttcaagcatccgttcacaatgtgtgtgtccgggtgtacgggcagtggcaaaacgaaatgggtattgcgaatgttggccaacctggacaccctggtcggccccgcacacatttcgggtgtgctctactgttatggggaagtgaatgaagacgtgcttcgattacagcaattggaaactgagtcgggggatgaggaggagaacatggggggtcaaccgcggcgacgctgggtccgcccctgccacgcgcttcccgatgaggaggcggtgaagcgggcagccaaagcgtgcggtggcagactgctactggtgttggatgacctgatggtcggcatgcgtgccccgttccttgacctgctgttcacccgtggctcgcacaattggggcgtcagcgttgtgttgatcacacagcatctgttcacgcgagagctgcgcatcgcgcgcaacaacgcgcactatttggtgttgctgaggaacccggcaggggcgctacaggttcgcacactgggcatacagctgttcccgggcccgggtgcactgcaccattttctggaggcctatgatgacgcaacagcggacccgtttggctatctgttgatagacatgcaccccaccacacggcctctgatgcgtctcaaaacgcatatataccccgggcagctgaccgtggtgtacgcaccacgtgtatcagcagcaacggtagcaacgacaagcatgttcaatgcggaagaacactaggggcgttaggcgccgcaacaacagcagcagcagcagcaaaacgaatcgattacaaaaacaacaacaacaacaaccaccacaaaaacacaaagggccaaggccgagcaaatacatttcgcgcaatcttgccttcttcaaactgttgagcaagtgtcgatcggcacgcgggcgggcctatcgaaagctggtcagaagtgcgactggtgagcaactgctgtgtctggtggaaagtgcattgaacatcctacgctcccgggtgccgcttcgtggaaagcatttggacggactgcgtgcccaggcccagcacgtgcgtgcgctcgtccgaacccggagtggacacggggcgcgccgagtgctgttaagacaacaaacgggcaggggtgtgccagcgttggctggcctcctggccagcgtcgttctgcccctagtggttgataagctgatcaaaaaccagcagaagcagcagcagtagcaatacatcaacctcgacaagaaggacaacaacaacaacaacaacaacaacaacaacagcactcattgacagaatgaagcacacaacccgaatgttgttggtgccggaagagatgtaccgctccctgttgtcaaaggcgccaggtgctgctgctaccgatgctttggatattacacccaccaccaccacaacaccgattgaacacgttgccaaacgcatggcgcgcgtggcgcgcactgcacagcagacagcaacgcgtgcattgatgaacgacgatgaacgcctgatccactaccagcaggagtacaaacggttcaaaaagctgttggcagatgagcaggaacgaccggcacctgtccgcctcaatcagctgccgaatgatccggcctcaaaaggggtgttgcgtgatgcgctgacggaggccgccaaaacattgcaacaacaactaccgcagcaactgcaacattcacctccctccttgacaaagcgtcgcaggcgtacaacagcggtggtccctgcccgggctggtgttcattcgacgccgccagtatccccacagccccctgcagcagccgcagcacctcaacatccagagcggcggcaagacaaagacaaatccggcattactggacaaaaagggaaaaggaaacgaaccaccaccgcctcatcgtatacgtcagccgcttctggagcagaaaaagaagaagaacaacaacaacagccagcagctgcatctacatcatcatcaacaggcgccgtcgttgttgccggagctcagcgcctgggtgaggcggagcagcgacgaaaacagcaggcccttgactacacgtcacgtcacgcgggcacgctgggcatcggtgatggtcagcaggtgtacaagttcatgcatggtgcataccgcccgatcaaaaacagcagtttgcaagccgtactcgcctatcattttacatctgcccaacaaccacaacaacaacaccatcggctcaagcccccgcccggctaccaaacgttcatcgctaacgctaaacagcatccacagctgtcacacctgctattccccacctccagcactagcagcatcagcggtgaaggacatggtggtggtggtggtggtggtggacgtgggggcatattgaccaaacgcgaaagcagtaatgccgctgatgttgctattaccgttacaag

SEQ ID NO: 2546 - DNA, 4013 bp, Heterodera glycines
  unsure (1)..(4013): unsure at all n locations
gcaatggttctcataagcgtattttgcgctcagctgctcgattgccctgtcaaattgttgcgagaacggctccaccacccccgagggacgcgcactcgtgctgaaacacctaattgggcgcaaagtccgcccccctctacaacgaccgtaacgggctcaccaaaacattcttcattgctgggatttcggcacggggcgcagcatttcttcccgcttatggccacttgcgcaacccgttcaacatcaatgtggctgctcatttttacgcccgccaccgcataaagctgcactttccttatgtgccgtgcattgttgaacgcttttcggggggaggggaggacaggcactacccaatggagctgcttgagctgattgatgacaacatggacattgacaacaattggttgggtaatctttcaccgaaattgacgacaatgacaaatcaagcacatcatcgcaccacacatcactgcacctaatactggaggacgatgacatggacattgggcgtaatgagtgcagtcaagatgctgcaccatcatcctgctggtgaaactgtgtgcctactaattatgcaattttctacccaaaatgttcatttccatttttaatgcattttccattgctcattttcttaaacaaattgcatcttcgcgtgcttaattatgcatttttctacataaaattcacttcttctaatgcttaattattttaaaactttatcttcaattctttaattatacactaatttttttattaaaaacgtataaatggcataaaatgtacacaattagatgtacaaatgaaataaatagtcatgtgtatgtgtgtgtgtgagagagagagaatgtacaataaattacggtgtgtgtccaaaattcagcacattgaatgctgcccctattatgccctttcccacaaacggacgatagcacttttgcataggcatggaaacgactcggcctccctccctgatgttcgggcgaaggaaatttgggtacgtgacgattatcggctcatagtcgcccgtcgttgcgaagcggaccacctcttctttgaatgagtcgtaccgcatcccctgattgttgagcacatcatagttcagggttagcccacgcactttgagcacatagtccatttgggctcccgcctccgcgcccttcttccgaagacataggccatactaaagcgcgttaaaattctcaaaagtaaacaaaaaagtaatgctaagattcacctgttttgccccaccactgcaaaattccacaatgtcgtggtcggggtactcgtccgtgaattggcccaggtgggggccagttttcagtgggcactgctcctccgggtggaccagaatgaggctgtcagtgtctaaaataattttatttcttcggtttttgtgcactgtttgctttacccgtgtacaacagctcggatcccggcgatctgaccaccttctgcatggctttgagcagcacgaggcgcgcagcagatgttgtccacagagaaatgactgaaacaaaaaattagtaggaattttgtgtgtgtgtgtgcctcaccaatatttgagcaggcatgctcatccacccagtcctttttgtggagataggtgatgagtatgtgctcctcatccaattggtcgattgatgtcacctcaattgatttgttgtccaaatattctgccaaaatcgctgggtcatccgtgatcagtgtctgacacagtccgaagttgcgaagcgaaaagcgcccccctatttttttggatcaaaataattctgaaaaatgacacttacataaattgttcaagcaaagcttggccagcgaccgcttccctttgttcagcaccatttttgtcgggtcgattgtgatgccgaactgctctgcgcactcccgcacgaactgctcctctttgtcggcgttccctctgatgttgttgtcgaagccgctggcctggatcttctgagccatgaattcctcaatgtacgggcggaacagtttgtcgtcgctctgctcgtactccagcacgcggaataccctncgtgacgatgtagccctcgtccagcgccgtgttgagctcaatcgaagtgcacgtgctcacccatcctcgttgtctgtcattgtgctcacagtggtagttgggattcacaccaccagtcggattctctttggcacaagtgctgcagagcgggaaacaaagccgctctccaactttcaccggcagaacgggcacgtcgacgcgacggggtggcacaacccacactttgagcagtgccaatgggtaggggttgtctgctgcgttgcgccaatccacttgccggttcaacacatgcacttttggatggccaatggggtagcgagtgacgaaactaaatttcaaaattttattatttaaaaacgacgagcaccacacatacttaatatacgggtacaaggacgtgaagtcgtagtaggagatcttctctcctggtcccgctttgcgcagcagtttcagcggtcccgtccgccctcccatgaacgcgtcccggatcaccaacggcccatcatccacataatcagcaaacgacttgcgcatttctctgctccgctccagcatccgatggatatcgcattcccagtgtacgtccacgcggttcacttgccgccgcagaaattccagacgtttggcgtcgcgctcgcgcacctcccccgctgttttcccactggggagcaacatgttgtcgttgggatagcactttttgcacccgtgccaagtgcagcctaaaattatattcataaaaataaaaataaaaaataaatttgtgtaccgttaacttcaatggcgcacccttccgcctcaatccacccatccagcgaatactgtcctattcgcttctctcctccggctgagtgggcagtttgcacctccgctccgtgctcctccgcgtaccagtggaagaacctgaacgcgagcaggctctggttctgcgcgttgtcatagccgcgctcagggacgatggccagatgctcagcgggcaggtggttggtgcggaagtgacgcatgcatgcacccgcgatggtcatgcattcgcgcagaacgtcgattccgttgtggttctccctatcgtctattccgtccacgtattcttgccgccgggaaatgtcgaagaattcacggcgaaacgcgacgagagcggccatcaagatttccacatcattggtgcaatagctgagagagccaaaatgagtgggctttggcaacatttttagaaacaccaccttgctaatgcctcatccagcttgaacgggtgatgacggttctcggcgtaccacgcatcgaattgccgccttttgctgggcatcataccgctggccatgtagtcgtcgggcgttgggtggatttccctgccgtagttttccggtcggttcgacaggtgggggaagaacggcttgtcctcaacctccagcccatatgaagggacgagcgctgtcagtgagcaaggcattaggttgaaggagtcccggaagacgacgtttgggttgcgcctcttctgcttacgcactttcatctcatacattttgttgccctaaagatttgaaattttatcaccataaaaaatgttttgcttttactcgtctcagcatctctgggttaaagccaattctgaagagctcgcgaaagacgagcaccatgtcgaaccgtccgccaaagtgtgagtaggcgtatgtgtcgtagctcatcggcagttcgaagacgagccaatgcacaaatgccaccaatggattgtcgtcggccaccaccacctgatggtccacgtgcgtgtccacaaagcggcgttgacaaaaggcaacagttcgatgcggcccacaaattcgacagcctgctgttgtcctgctgcgccagctgccgttgtcaatgcactcagggcaagcaacttgggcagcgatgaagttgggctggtgctctcttctttcgggctgctgcgggctcaccggatggtgcggcatggtttccaaatcgaaggcacaatgcggtacgg

SEQ ID NO: 2547 - DNA, 2463 bp, Heterodera glycines
  unsure (1)..(2463): unsure at all n locations
ttttgttgcaacccgcgcaattgtggaaaaatacatccatggggctgcagggaaatgttggtccgactcgtgaacacagcatacagcgcgctttgcaggtgttaaggtgcgttgatggtcgctgatacggcttttcacattgaaggcaataaggacgaccaaataagccatgcaacttttgcactccatcaaagtgttggttgttgaagtagagcacaatgggagtgtcgtaatgatcgttgacgtatttgaagagtggcttgtactgtcccgaagcgccgaagatgaacaccgcaaagcgatgctgctgctgactgttgttccagtggtcaatcacacgcggcacacaaatttcggcatcgtatgcattcagcccgatccgtacacgaatttgctgcatcagttgtaaagcatcccgcctcagacatccctgctgtcccctccgactgtgcaagtaatcgtagaatttccaacgaggccaaccgcgcgttttggccaccatcgttgcctgcaacgcgtagaacaggcaatgcccgtccgggttgcaaatcttaaaacaaattgtcaatcgaattgtttgggtttggtggcgcgacctgaccttaatcaaacaattttccgtcactcggtgatgcactggtgctaggcttcgccgagcaccgcccttcagggttctccgagcgggaagattggagcgatcgactgtcgtcactacaacagtgaagggctctccccaaagcgtgacgttttgctgctgtttgctctgcgccactttggtgaactgattcagtatggtgtctacggtgttatcggtgatctgtcgtatggggatggggatgtccccgccagtcagcaacggactgctgatgagacagccgaggtgagttggctccatgccccgttcccggctctcccccaaagccgcatcaatgcagtactggaagatgccagcaagaagcccctcgggattggctgctggcacatcgacaatgctgaactgtgacttcactttgctgtactggaagcggggcacatgctcaacactgctgcccagctttttgacgtagtccggtgccgattttgaagaagcagaggatgcggtgcctgcaccctcttgaacatctcccaataattgattaatgaggaagccgccgcgccgcggctttttgctcggaacagaaagaatgtgggcaattgaaaagtcagagggatgcttgggagactgattttgcattttatctaggagacaaataatgcgtgaaaatggggcaatttacagcactaggcgtttgggcatggaaatggcaattgaaattagcatatattaaatttttgcgaattaaaatcaatcttggcctgatgagctgcgcactgccacccatgaagcacaagacgacagtgcacctaaacggctcgggcaattagaacagaaatttgaacaaccccaagccctaaaagacacaaaaaatgctgccaggataaacggtgcccaatagtttgagcaaccgccctggttaacagcctaacaaaaataaataataataaaaattttaattattactattttttattaaagtgaatttgagcgagaatggaaatgaatgtaatggaaaatgggatgagcttttattgagtgccaaaaatttgttcgtgtcttcggccactaattaatttctcggctcatttccggcaaattcaaatttccattgtgaccaccaccaaaataacatgctgaattattaatgcgtgttcatcgcggcgacgcgaccggcgaaaatcatgcactcattcgttcatttgtgcctaaaaatggggaagcgcttacccgccgagcttctctcccaaattatcgactcattgccaattatgtatttatttggcggggtaacacccaaaccaggtagaacatgtgtttttaaaattattgtttcacatttccttcacaatttaaaggccggccactctccggcattggtgtgcttaacgcaaccgttgaggtttttcgggccaaacgtcaccaaaaatttgcaataattgtaatgcaattttctgttttttcattttaaattttacacatttagaaggaattggcttcaaaatttgatgtgttcagtttaaaagggtggatgtcagacggacagctctacctacatttccgttacaacaacaatgagctgtgtgagccggcctttttcaatgagttcgctcaatatatttgcttcggcaaatctgggcgcatttgttgcacccgcattttggtcgactcgcccaattcgcgcgtaaaatttttgaactattttttctttttcaattttgtgataaaaaaaattaaggaaaatggtgcactatgtgatgtggtgctaaactgcttaacaaaaagcgcgaatcctttcacaatgaaaaagtgcacgtccgtcgatctggtgcaccgcgacaactttccggcaattntgaaggcagcgc

SEQ ID NO: 2548 - DNA, 4459 bp, Heterodera glycines
aaaaatgctgccaggataaacggtgcccaatagttccattaaccgccctggttaacagcctaacaaaaataaataatacttaaaattttaattattactattttttattaaagtgaatttgagcgagaatggaaatgaatgtaatggaaaatggagtatgagcattttattgagtgccaaaaatttgttcgtgtcttcgggcactaattaatttctcggctcatttccggcatattcaaatttccattgtgaccaccaccaaaataacatgctgaattattaatgcgtgttcatcgcggcgacgcgaccggcgaaaatcatgcactcattcgttcatttgtgcctaaatatggggaagcgcttacccgccgagcttctctcccaaattatcgactcattgccaattatgtatttatttggcggggtaacacccaaaccaggtagaacatgtgtttttaaaattattgtttcacatttccttcacaatttaaaggccggccactctccggcattggtgtgcttaacgcaaccgttgaggtttttcgggccaaacgccaccaaaaatttgcaataattgtaatgcaattttctgttttttcattttaaattttacacatttagaaggaattggcttcaaaatttgatgtgatcagttcaaaagggtggatgtcagacgcacactctacctacatttccgttacaacaacaatgagctgtgtgagccggcctttttcaatgagttcgcccgatatatttgcttcggcaaatctgggcgcatttgttgcacccgcattttggtcgactcgcccaattcgcgcgtaaaatttttgaactattttttctttttcaattttgtgataaaaaaattaaggaaaatggtgcactatgtgatgtggtgctaaactgcttaacaaaaagcgcgaatcctttcacaatgaaaaagtgcacgtccgtcgatctggtgcaccgcgacaactttccggcaattttgaaggcagcgccgagcgtaatggctgaaagtgggattgtgtcaacggagcctttgtccgctaatgatgatgatgaagcatatattttgaagaatccgcattttggtgacgatgaaattgcctacttagacatttacgcccgatcatcgggcttttattttttctttttttcaactatttaatttaaaattttgtgtagtacaaccgtgacatataaatcgggatttgcacttgaataaaatcgattgagaaattgatggaatgtgtcgcctaaggataagtggtaaataaaaacaatgcaatgggcggcacaagtggagacaaggggggactggtatggacgcgaattcttcattacgccccctgggaaatagcgtaaaaatgatgacgtaatggtgggcggaatgggctgggcaaggctgtcatagtagagcgctggcgcttccactccctttgcgtaaatggcgcaccaatgagagccctccttgtggcgggggtccctgttcacaacgagcgcagcgggatactgtatcgtggaggggggcggcaactggtcactggcgaagcagccccgaaacactcgccctgtccgctgattttcgctcaatatctttgtgatttggaaactgtccattctttagcataaaaactgagcaaatttgatgtagcacaagactgatgatgagcattaaataaagagcgaacagtgcccagcaaattgcttgccgtgacagattgctgctctcttccggcctatctttgcacaattgaatgagcggtggcagcagcgcggacacttgttcatcgattaacttgtcgtttttcagaggggtgcttatgtgcggcggggtaattgttgttgttgttgttaatgctctggtcgttagtggtattgttttggttgaaaaataaattttagacaaagacagtcttctcaaatattcactgtaggaatatgccggctcattgtgttgccgagacaatgtcaaatttcttatataagcagaataggtgttctctagcggtggcttttgcggttggtctcgataagtggaaacaactggaagcgaaactcggagaaagaacaaaatgatgcccaatttttttgaaaacattttaattgcaaaatgatgaaatgacaatgtgctgagcttaaatagtggtgtccgtgcttatcgatcgatttttgtccagcatcaccagtgaatcacactcacccatcactaccaacattacacctccgtctggcactgggtggttaaatttgatgctcaccgctgtagtgccattctttatcagatcaaacagtgccgcttgatcatccccgctgttggtcaaattgaacacgtaaatgcaatgcgtttttccgtattgggcaaaagttattccgttgctctccgatgagtttgcgaatcccaccgcttcgttcatgtcattgaatgggcgaacataccttccgctggggtagtccaagtcatagggcgcttgtgggtacgagcgaccattagcaacaatggaaatttcgcgaacattaaatggctgaaaattgaatggactgcgccgaattgagccgacataatcagcattcgccaccaggcccattgtcacacgccgggggatttggtccatgaacaaattggctgtaaactcgtaacggcctggactgatgaacagtgatttcatcattgttttcctcacagcgtagcgggcaggcttcacctccaactttcgcgcaatgtccagcgccaacccatccatcagagacaccttcttcacatacaatttcagtcccacaacctcgaaacggtagcggggtgcgcccgcgagcggcgcaattagcacaaatttgttgtcgttgggcaaaatttcaatgtccagctcacaaaagttgatcagatacagtggctgattgaacaggtcggtgtcaattttggcaatgaactgagcaacgttgctgagcgcaaacaaatcgcgtcgcgctgtgcatccgtctcccgtctcaagcacatcacccgggtcccggtagtagcccgctgcattcaggtgtgagtcctttgccgttgttgaataggagagctcatgtgaaaaatatgttttgtaagccatcagagcattggcattaaatatttcgcgcccgttgatgctcattttaatgttgcggatgaaagtttgaccgatcatttgaattggcgcaatgtttatatcatcagcggttaggtcaacaagttgtccattaacgttttccttacggattcgaaactctgtgagcaaatagcatttggagaggtcaatgaaattttggcttgagtgaagtttgaagtggtagggcgtgtcggtcagagggttgctgggcagaagctcaaacacttttgaagacgagacgctcacatttgtagggggtatacggaaaaagtccaaagcattggtaattgagttcacggagtcagtgtcgattttgtgaaatgccattatttagtaaagtccaaatgcgtctgagcgaactcgttttcttgctgtctttgcaactggtcgtccaattattgtttgatgaccaggcacacgtgctctctttctttttatacccgttcgtccgcttccaaactgtttgggcaggccgcctttctccagcacagtgtcaattccgcgctttccctcactgaccaacgcctccttgagcggcaccccctcatgcccgactcgctccagcacgcgttgtccagtgctcagcgcctccgaccctaccgtagttccaacacgacgcagaattggcaggaaaaagcgccaaagcccccgaaacacgtctccaacgcctgcccctcgctgaacaccgtagcccctctgaaaagggctggtgccccggaagtagtcgaattcctccttctctaagccgctaccgtactgcacgtactcgtcatactgcgcaatgcttggatcaaacacaatatgaaccatttattagtgtcaaataaaaacaaaatgaatgatgaaatcagaagtttatcactttcttaaatatcagtacgaccatcgttgtcccataggcgaacggcacgagacggcctttgtccattgtgcgcagttcaatctcaatctcattgatctcccgtggtaacacacgggcaaatattggcgagtcgtaaatcttctcgttgtactcccaagggatggcaccgctgatagacacaacgcggagcaaggagctcagtgaattgccaatgatcatgttttcggtcaaccctttcgagtagacagcaaagcttgagatgcctccgcgcaaatccacaggatattttgacagttcatttgacacgacatgttgagggttttcaaagccaagcacatagcccaactgtggtgagaaggacacatgactgacgatcgcctcatagaacaccagcttgaatcgttccatgttctcaagatattggaagagacggaattgggcacatatgagagagggtctatttgaa

SEQ ID NO: 2549 - DNA, 8519 bp, Heterodera glycines
ttattatttcttttaaatagaatttaaatgattaaaccattcatgttaaattctggccacaacgaaatgataaaatgacaaaaattatcatttttaatttacaacactgtgtacatttttaatttttaacttttttaaatttttttaaatttactaagacatgtttatatttccaaaaatataaattcactaataataattgttgataaaataataattttcgctaccatacgtcatcggctggctcctaagatacgattgcagacagaaaacttattaagacaagaaatatactcaaaattcagaaataaaaaattattaataaaaaaacagggctggaacgcggacagaaagaaggcgtgagtagttactagcccccttttccgttgttggaaaaccaccgttccaaaccaaagcctattggttaaccaaaacctattgaatgggtgtaggagtgaacctaaacctattggatgggtgcgggggtgaacctaaacctattgaagggttttgattaataaaaaataaattaaattaaaaataaattaaataataaattataaataaattaaataaataaattaaaaaaaaaaaaaatttttataatttaaaaaataattgaataaaaaaagctaagattcattctctctctctctcactatctttcttttctttctctctctcactctctctcttatctctctctctctcacactctctctcttttttctttctatctctctcattctctctctctctcactatctttcttttctttctctctctcactctctcttatctctctctctcactctctctcttttttctttctctctcttatctctctcttttctctctctctctcactctctctcttttttctttctctctcttatctctctcttttctctctctctctcactctctctcttttttctttctctctctctcattctctcttctctctctctctcactctctttcttttctttctctctctcactctctcttatctctctctcactctctctcttttttctctctctctctctctctctcactctctctcttttttctttctctctcattctctctcactctctctctcttttctcttgctctctctaataccacacaaaaatataaataataataataataaataaattaaaaaattaaatttaattaaaattaaattgttaaaataataatagttaaaaaattaataaataaatttaaaataatagataaaaatttaaaaataaatgaaaaaaatttaagaaattgataaattataaaaaataataataataataaacacaaattataatagtcaaataaaaaaaaaagctgagagggcgctacctattgagtcctaccgtttcagtccttgactagtcaatccggggtcaaaattttgaatttggcgccaaaactttaatttttcgttatttttgaatttgagaaattggtttagttttggcggatgcctattggaatgtttttatagggcttcgctaatgtttaaaaggggaggggtgggcgtcagcttcgggagggaagcgacgccgggtcatttgagagcacgcaggggccatttgagcgctcgcacttgtcatctatgcgcccgcaggtggtcatttaaatgtccctttactgtcaccaatactccatcctaatggaggggtagaggccgtcccttatgacatctctccccaaatgaccatttcgttctcaccatctgtcgcgaaagcgaagggttaaatatgtctctttggcaacctgccaaataaccattttagctttagccccgcccactttaactagtataaatagccgcccatttccagccaaaagtcaacttctcccattcattcgcgaaaattctacccacattcattgcttgcgcgctccgtcaaaaaaatatttaaactaacaaatttgcaactaaattaccctttcatccaatattcaacttataaaaaaaatattttcaataatttttctattacaactataaaatttacatttttctaattcagaatattctttcatattatcttatatcatctataaatcataaatttttcattcatatattattattcaaataaaatgaagcgtttttccctctctcaaaattcttcctcctccttccccaaaaaatcccaaccaaataaatgcattcgtaaaattgataacctcacttcaaaaagtaaaaaatatcaactggtgcgctcaaaatccaaattcgtcatcgaggaaattgacaaatgtgctgaccccgctgcggagctgcgctcatgtgtgcaccattcgatcgaggaggcgatttcggatggacaaaacacactaggcgcaacaaataaggtgggggttataatttcatcggaacttttagaccagggtgacatcatcctaccaattacaccaattaccgcaaatgtcgtggacgctgttttcaaccagttttgcagtggagcagagcaaatcgaaacacgtcaacttatatggtgctccctttataataaccgtcaccgttctaaacaccaatggactaccgcgacaacggacaacaaagggaaaagggcgaccgcctgtctcctcacaatcgcacattttcaaagtcaacaacaacgacaactactgtcttttttacgcgctggaactgatgcgctactactcattatatatcaggggagtaatttcaaggaaacaatttagatggctcaaagataaccaaaccacggttttacgacaaaaggcgctacaactactccgcgaggcggggatccctacaacagagacagagtacgacgcggaagtttatatgcatcaagtgcaagggttgtggaacgtcaagtatcccggtgagtacaaaatatttatttttaatgactatcagatgcgcccaatcaccaaatccgatatcaccgactaccagtttcccattcttctctaccacaacaacaaccactttgacggaattaagacaatatcgaaatttttcaacaaaaaaaactactgtctctcctgcgagtctccgtactacaagaaaatcgagcactcattaaaatgcacttcactctgtcacgggtgccgtgaggtgggcgtcgactatccctgcgatccccagcaaggatacgtcaaaaagtgtgagcactgtaacaacaccttctacaacaataactgctatgggcgacacctccacaaggatttgtgtaccaaatttcaacgctgtgaagattgtggggtaatttataacataaaggttcatgggagtgttgggcataaatgtggggaacagttttgtaaactttgcaaacaatttcatataaaagaagacgaagatgagatgaacccctgcacgaaatgcttcatccaaccccttaaacaacaaagaattaagtcatacaggatcatcgcatacgactttgaggcgacacaggacaagaaggtggagaaccggttcgagcatgaagttaactttgcagcggctaccatcatctgcacagactgcattatcaacggcgactggaacaaatcacttcagggaaaaaagtgccaaatttgcggtcctcaccgctcaatcaccttttcaccctttgactacacggagacaacagtcgaccaaaaaatcatcactcaacaagcgctacgcgaattcgttgaatggctcctttttgaccacaacaaaaagtttccaacagtcgcgtttgcacactttggggggcgctacgacatgacgatgatcatcaaggaggttttagcgcaaggaattcacaacccggacatcatcaaacaaggaaatcgcctctacgagctgaaaatcagggaaaacgagcacggcccactcaccatttttcacgacagctacaacgtaatgcccatcaaactatctggcctcatcaaatcttttgggcttcatataaaagataaacagcactttccccatatgttcaacaaatcatcaaactacgataaggtcctccagcaccttcctccacgtgaagactattgccctaaccaaaagaagaaggcggatctgcagaaatttgacgactggtacagcaacaacctataccaaaaattcgacctcaaagaaaaattacccgaatactgctgcaatgacgtccaaatccttacccacgccctcgtcgaattacgccgggaattcaaacaactgacacaacggaacggaaagcacgggggaatcgacattctttgacaagcaatgaccatagccagcgcctgcgtcaaaaattatgcactcaaccatttgaagcccaattcactcgccatcgtccctgaaaaaggctatactccacaacagaatcaaagtgcactggccatcaaatttatcgactggtactcccacatcaataacgtcaacattcaaactgcgcactcccgttacggcgaatatgtgtttaagcgtgaaggacagatataccaagtggacggctacatcaaagggactaatgggaggcgggacaaaataatcgaggtgaatggctgtctgtggcacggttgtgaggagtgttttgacgagatggacgacgaaacgaagatgccaaacggaaagacgctgcgggagattagggaaagggaagagaagaaacatgaaatattaagccgttacgtcgacttggaggttatttgggaacacgaaataaatgagaagctgaaaaaggacacagcaatgagggagtttttcgacaactggaaggaccgctcgccaatcaaaatcagagacgcttttcatggaggacggactggaccaatgaaactactccacacagctaagccgggacaaaaaatcagctacaaggacttcaccagcctctacccgtggaccaatttctctacagactatcccctcggccaccctaaaatcatcagtgtcccaccaaatgagcagacggtcaactggcgctctccatccgacaacccctacaaaggacttctcaaagtgctgcttctacctccaaacaacaacgtcagcgtcactgttatgcccgtaaaatttgatcaacgcctcctcttccctctctgtgagaagtgcgccaaatacatcaccaacaaatacccaaatggcctcaaggacgacaactactccgcccacacttcaaccccaatgaccgcgccttcgtgtccacttgcacccatcttgagttaaacgcagcattggaggccggctacacagttcgcaaagtcttccacgtcctccaatacgaccaatggagtaacaatgtcttcaagtcttacgtgagcgaaatgatggccctgaagatccacgcaaccggcttcccgtcatggtgtgagagcgaagaggagaagagtgaatacattgaggagtgctggatgaaatttggaattcatctggagaaggagaagatgaaagctgaaccggggaagcggtacatcgccaagctctgcctcaactcactttggggccgcttctccatgaggaatctactttcgaaggcggtaatcaacaatgacccttttgttctccgccaatacaccgacgacaagaaaattgatattatggacattgagctgatggatgaggacaacgacgtattcatgctcacctacaagccgaaagaggagtttgtcgacgaaaacaaatactccaatgtcgtcatctcactctacacaacatcaatggcgcgtctatacctttacgaagtgttaaaaaaagtggccgacactcccggatgtgaaattctctactttgacacggacagcatcatctacgtgcacccagaagccaacgacccactcccgacaggaaaaggacatctcggtgagctgactgacgaaaagccggaccacaacattttggagttcatcagcgctggctgcaaaaactacgggctgaagttggaacgtaaggacaatggggaaattgagtacgacttgaaaataagagggataacgctggatgaacaaacagtgcaaacgatccattatgacagtgttaaagatcaaattttgcgttatgggtccgatgaccccgcggaccccattattgtaacttatccccattttattcgccctaatctaatccaaggcaaagtgtacactcaatctctaactaagcattatcaacctgtcttcacaaaaggtattattaatgattcattccaagtcctcgaatttggttatcgcaaatgataagtatgcattctcaattaaattttctaaatattagttttcttatggttcccttcttttctttctctctgtttatatcactcatgtgggacggaatgacccctggttgatcctctccaacactccaggccatccatctgagatgaaggtggacgagcttgttcattattgtaatgcacagcctggtgcgtgagtgtttggattggggaccgaagggtgaagccgttccctgggtgtgttttttcacttttttcaaagggaactctaagaattctgatatgccttcaaatctatcaaaagagttgcatactttctttttataatttcctttattctctattttacacttgtatttttcatttgaatgtttattcagaaataaaattgaaaaaatgtgtcattactaatattaaaaggtataaattaaaaaggtatttaacgagaaaaatagtcagggttttgtaacacaatttgtaaattattaaggaatagaagatacaatttaacaaaaattaagaaaaataatgattaaatgaaggaattactcaaaaatgtgtaaaaattacacacatggggtgtgtgtgtatgcgtatgtatgcatgtgcgtgtgtatgcgtatgtatgcatgtgcgcgtgtgtgcgtgtctatgcgtgtgcgtatgtgtgtattgtatgttttttcgagggtgaggataaagtgtgtttgaaagttctgcataatatttattaacttatataaaacttgttaattttaatcataaacacaaacaatgctccttgcctaattcaacgtaaaataattctaattataataaggaacatttacaattccattgaataagtaatattcaaaggaaacaagagaaatagacaattttgaatctaagattgaaccgagaatagaaagtaggtttgacaaacagctgactgactgtatgtgacgagaaagggtagataagggctaaatgtatgcgtgaagcaggtcttgtaataggaataaatgaagaaatcatatgaggatattgtagtgcaccatagaatcaaggacaattaataatgggtgtaagagatagagatagagaactcagaaatgtggttgaagagagtcaatattaaatagtgagaatttaatatgagttagtaaggcaaacattaggtaatgtatagggaagagaatagtttgataaagaacaagaatacgaacacttggaagataacggttcgagaataaaacatagtgttggaagaaaatatattgaaaaatagctaatggaaacgattatttagacaatatgtaggtctgaaattaataaggaataacagtgaaagtaaacagatatagaagagtagagaaagtgtattacggagaaaaggaaaataattcaaataaacccgaaaccaaaatctctaaatataggattttgttaagaaaacagttggcgttagcctctttccatttgttccttttagaggaatcgatttacaggataagatgacgcagtgacctcacccccctctccttcacttatttggtttcctcaactctacccttcctctccaacacatattcggtcattattgctccttaccatcgcaaactcagttattggctaccggagagccgagccttgtgaggtattggttactggcgggccaagcttaattaggtattggctaccggagagccgaacattacgaggtattggttactggcgggccaaacttaattaggtattggctaccggagagccgaaccttacgaggtattggttactggcgggcaaagtttaattaggtattggctaccggagagccgagtattggctaccgaaaattcatcttttattattttccttgtttttatacatttctaaaatccttgcggctgtaataattagttacttacttaaaaaaggtttatcgctacccaaaaagttgcattctttttcagatattttagaattaattgccatatttcctagccatcaataccataactaagttaatctgtcaacaattatcatactcatttagtgttcatcatttcctttgtctcagcttcaagtattctgcttcattgaattacaacaaaaatgtggcacataatttaagttccatcataacccttctttcccctagaaatattcagtttgtaaagattaaagaataattggttataattataattaatgcagatgtcataccctatcagcaattggagtattttaccatgggattcgaccataccaaaacacaaatgtaaaacatctcgatcaaaactttgttaataattttcccgcattttaatgattaattggttcttaattaaattaccc

SEQ ID NO: 2550 - DNA, 6454 bp, Heterodera glycines
  unsure (1)..(6454): unsure at all n locations
agcatttgattattttttgttaccagtttcttaaaatttgttggtttacctcaatgtaaaatgagtcaagttcttcgattaagcnccgcttgagcatgtcgtcaactcggctgttcaaccgctggcttagtacttctttgtcggcgtccaaagtgaagagtaatgtgctttttgtatggagacggccagccaagtgaaaattcgcagcttaattggtttatatgcataaaaagatgtatgatttttctcgtaaaaagaaaaattacatttatttccgctttataaaaaaaaataagaattttgtttttttaaatattaattgctttggtggtatgtttccgtttgcgggcccacattcgaattaaaaagctgaagcgctgttttgaatattcacatgcgctttgttggcttttttaaactttgaatgtgtgacccccaaacggaaaagtacgatttgttcataaatgtgctatttttgtataaaattgaaagttcattcgcttgccttgtccttccctttgcattttatggtgttcgctttttgtttgcccagttgaataaaatatttccaaagctcgcagcactttaaactttgcatttttgtgtacttcccctgctgatattgggtcaactctcttgagttcctcgtgtaataagtcgcaggtgggaaatttttgtaacagctcatttcttaggtcgtctgaaatggcaacaatttgaatcatcaaaatgttattaaagacctgatttttgggcgtttgtttgtaccaaattgtcataataaattgctgcttccatataataaccagtgccaccaactaataaaaaaaactgctgtttgttcactatatgtatgatgaaaaaattcgtaattagaaagcactcataattttcttagattaagcattagaacaaaccaataattggcaatttgccattcgcccatagcctttctatcaatggcaaaacggcgttgcggtagtgatggacgttgtaattggactcacacggatcacaaaaactcatcaaatggtgagttacgccttgcatttcttccgttgtcactttgttcgtcgctatgtcaagaccttgtcgtatagcatatttagtgatttatattatattcgagacaaacctttgtaaatttgcattgaatccgcatttattacttcgccattgaaatgctttgctaattcaatgccgagatcactttttcccgtcccagtacagccacaaattataaaaagtggttgaaggcttttaatccgttcagaaaacttgctcgtaagcatatttaactagagctgacaatgagcgggaccgggtttttcaggtctcggcctcggttttgccagtcccggtcccggcgggactaaataagcactggtaatgggggtctgggtgaaaactagtgaagtttctgggggttatcgagggtgctgattacgaatctgaactttgatttccctaatttcgagccccggacccaaactcgaacaaaaaaaatgaatttttttccaaaaatacacattaaaatttttttcaccaaaatccacctttattgttcaaaatccattcaaatacactgaattaaatagaaaataggagggattcatgaatcatgaccattccatgcatttgaatcaattttggacaataaatatggattttggtgaaaatgaattttctactattgttcgaattcgtgtccggggttcgaaattgaccaaatggatgttatattcatgatcagcgaccccgaatacccctggaaacacgtttttatcattttaaaacaagaaaaaattttaatttttttatttttaatgtggtctaaactagagcccggaaatttcaaatttgcggatcctgttgcaggattggaattcaaaattttttgcaggaacggatccggtcggattaatcctgcatttaaaatttgccggatcctgcgcaggattgcggatttttggaaattttgaaaaaatttcaattaaaaataattttttattgcatttttttaaagaattggtgaattttacatggaaaattcgaaaaatgctaatattttttaaaaatattgaaaacccaaacccaaacatatttcttccgatattttttggaaaatttctcaacaaaaatcaagaaaatcaaaaaatacacccctaagaatcgacctaaaaattttcaaaaaatagacccctaagaatcgacctaaaaattttcaaaaatacactcctaagactgacctaaatttaaaataacttaaaaattggggcaattgtaaagttttgtgatttcttcgaaaaattatttaaaaatttaagaaacacattttataggctggaaaaatgtgctgatcacgaatctgagctcggattttgcaaaataattgattttatctatgatttttttttatcaaatactagattttttccaaaattttttagtcgggcgtaaaaaaaacccacaggatgttgtagagatcaaaaagagctttcgaatgagctattgaatgtatggagaagtcatgtttttagttatttacgattttttgaaatttaattactagcccttaagggtcatatgagacgggggtctggggttcgagcccgcttggctgtgtttattaaatctttaaacttatttttcgaagaaaccacaaaacttattgccaaaattggtaaatttctcaaaaattcatcctcaaatttttttcttaacaaaattatgtcactattcgtcattattttggcattttttttagcatttttactatgtttttcgaaaaaaatggtttgaaaaaaattccatttatccccgggggggggataaatggggacgggggaattaatggggacggggggataaaaagagcaaggtatatagggtttgatattacatggaaatccatattttttcctggactgttggaggcttgaaacgcatgaaaaacatgtttttagcttggtttgaagcagggctggagcgcggccgcgatccgcgatgcgcgatccgcgattcgcggcgtttttttttgcgcgatccgcggtcgcggccgcggcaatttgaatgcgcgatgcgcggtgcgcggccgcggtttttttttttgcgcggtgcgccgcgcatttttaagcactggtaagaatgggggtctggtgagaaaagagaagggaattggagaggaatgagaaattttttagaaaaaaaaatattttttttatttcatttaaagtattcctccataatcttatgtgttgtagtggctaaaccttctgaccttcagtgtttgtctcttgggttcaattcctcaacggaacagaaagttttttcatattttctttacattatttcaattgaaatttaattaataaagaaaatattccaacttttatttttctttaatttttaaacagcctaaaatcacaaattaaccttggtcattttttgacaaattatgttaactaatctcgctgaaaatatcaaaatattccggcggcgcctatcggcaccgccgccccccccccccacaatgttcccaaaaagttttttggaaccgcccacaaaaacgcgatttaaaaaattaatagattgttaatttattcaaaaaaaatccagaattttgggactcagaaaatccaagattccccccccccccccgcatgaaaatttaaaaaaaaatttctatataatggaaaaattcttcgaatgcctcccccaatgagtacatattttaatataggcaattttcgtaacaaagtgcagtcaaattttcaaattttttttcaaaaaaactttcacttgggaaaattttattgattaaattgaaatttttgaaaattttgtttttaaatgcgcggtccgcggccgcggcaatttgaatgcgcgatgcgcggtgcgcggccgcggttttttttttgcgcgatgcgcggtcgcggccgcggcaatttgaatgcgcgatgcgcggccgcggtttttttctgtgcgcgctccagccctggtttgaagcttctaggaaggagttctatatccatattttatgtacatatattttggcattttttcaaaaaacccctattagaacggcccccatcagctaaattcggaaatttatgtccatatttttgccattttatgtccatattttgcgatttgttgtccatattttatggccatatttcgcgtttttatatccatataattacaaaccctagcaatatatatatgccaacagaagagattgtattaaaatattaattaccataaattaacatgataagcactcatttgagttggacgagacaagtttggatttctcgattttttggcatgggaccgattacttttgaccaaaaatgcatgtctcgtccaacagatatattatataatcagtcaaaaatgtgttttgctcttttgatcattgaataagaggagcatcagaacgagcgcagtgccaatggaaaacaaaacgttgggttcgttcctccgttcatcagttgctgctgttggctgtgctggtgatggtttttgcccgttgttttgccattggtggtggtgcttctcctgttgctgctgtttcgtcgcgctgtccaccgaatccaaaaatgccatgccgtaaaattgggcccgctctttcaaatttgagtacagtccatccagcagcgatgcccgagtgcgttcctgaacaaacttttgattaattttcagaaaatgaaaattgccataataccgccaatttggcaaatttttccgccttataagccgcgttttccgcattgatcagtttggtgagcaaaaagtcgcgcagttggcacttccaaattatggaagagcgcggaagcgtcgggccaaagaacggcacgtcgtctcgcgctgtcatcgacacgcggtaacgcgtgcggtcagtgcccggctcaatgggatgaaccaccaaataggcgtggagaaagctttggaaaaaaagaaaataattaaattaggcactgaatgttgcccttttttgtacttgctcgcgatcatgtccggacagaagggtgtgttctgctcttggaaaacaatggccacgatgtcgttgccaatgtgccgcttgcgctgcaattgttgcgcgtcgccaatggtaaacggcaaaagggtggacacatggaacctgaagaagccggggaagagctaattgggctaatgggatgtccgaattaaaaggacaattaagtttttggttgaaatacacaataaaatggatttattggtttcctctcactctcctatttttaatactaattatttgttaattgaaactgacatgatctccttctggcgaaactgtgtgtacaccgactgaaaaaggaaattaagcaaacggtaccgtatgcccgccccactctgccccaccgtacctcggtgcccgtctgtccatgaacggtgtccagtccgccacgataaccgtcaaaatgacgcaactgaactcggtggccgatgacggagagaaattcgtcgaaggccgcgcagttggaggagtcgttgctgaacagctcctcctcggtggtctgcccaaacttttggtaaattgcacctgtgaaaggggggcaattaattgatcagtgattctattttgagtgttaaataaacggactgaccaaatttgtaagtgttgcttatcacgtgctcgtcgaattggaggatcagctcacttccccccggaaaagcgatgggatagaaacgttcggccgtcaattcttcgcataacaatttggccattcgacatgcgctgggacggtcggccaatgccgaggctgggacaacctcatggaccttacaaattaggaattgatatacacgcgcaaatgaattgaacaacgggcgggaaactcatttttggcttattagccaattggccaaggcattggccgttccctctgaaaataaaccaacgcactgtgccgtgacgagttcgcagaatgatgcggaagtgattttggcaggaaattgtctccgtgcgaacactcagcaccagcggaccaatcagcgggtcattcccataaaagttgtggtgttcctatgggaacattcatttatttatttatttgcttctcgggagtattgacactctcccaaatatttaaaattaatggccattacgaactcggcattgcccactgttaatttgtcctctccccccccccccccctcctccaatggactgactcttcctaagaaatggcgtcggtagcacagtgccgtgtcgtccgtctccaacttcgtcctgccacagcttccccccgtcccattctctgtcatttcttcctccatctgaattagttagcttttatttactttccaattctaaacaacaaccttaatgaggaaagtgctcgcctcggaatgcgacttgataaacattgccgcttgtttagacacctaaaataggcacgaaattaaggtaaaatggttaaaatat

SEQ ID NO: 2551 - DNA, 5118 bp, Heterodera glycines
atgcaataaaaatgataaatacaccccctaagaatcgggccaaaaaaattttcggaaaaatacaccccttagaattgacctaaaaattttcaaaaaatacactcctaagaatcgacccaaaaaatttcggaaaaatacgcccctgagaatcgacccttaaatcctgaaaatttctaaatgtacttcatttctaactgcaatcagtaaataaaattgtttgacttaattttaactaatttacatagagaaaacagcaattttaacaaatttcacctctacatttggaattttttcatgcttattttcgcacttatttcgcgcttttttcgcccttatttaagcacttattttggactttttcgcgcttaaaaatccgttccctattgataagcttaaagtctaagaattgttttttttaaatttttacctaaggctattggaaaaaataattcgcaaatacactcggaaaacaaagttgaatttcgtgttttctcattgtatttttttatgaatgcttggtatttgttcttttcttgcctctataaaatcccgagactttaaaagagaaaaattttgttgacacaaaacccacaagtaccaaaaaagtgccaaattttcaattttttaatagcaaaaaatgtcagcgtcaaattgaacaattcaaagagcaaacaaaacatcatcaatcaatccaattcttcataactcgataatgatcggccatttcccaaaatgatcactttttcttcttccgctgatcactggacccggaaaaagagaacactttttcattgctttgacctggcggagacagcggcctaaattaagcgcaatttgaatcggataactttttcgcaagtacagcccgtaattattgcaaaaacccggaccagcagggttttcgggatggaccagagcaaaaaagacaaaacaaggactgaagttctgtcttaacagaacccatggccctgccaagattctgggaaagtactgtacatgggataccgttccctatccgtgtttcatacaaaaaaggcctcctttctgctcacccaatgtcatcgtaaaggcggaagaacactttgttcaaattggcatccgaattttcgtccttcttctgctgctgtttctgaaccgccgccgcagtctccccaataattgggcatctctccaacagccaattgaattcaccagtgccattttcatccttcgtcagtgtcagcttctcatttgtcacttcgttcaccaattcaaatggttcaattggcattggttccacacgaagataaaattgaatattgtaactgacagaagtggtggcacggcgaaatgtctaaacaagggtccatcgtcagcaattccatcggggaacagaatcgatcagaacagacagtttcgcttttggtccttcgtccttgcgaattgtgattgttctccaaattgtcaattcgcttttgccatcgaaatgtttgtccaccaaaacatcgaaacggtcggaaagcaatgccattttgaggccgagttgagcatggtcaaacgatggcataatgtccatccacacgtcgctacaaagccaactgagattcgtaaaaaaatgtatgggtaaatgaaaattttgtaattttaaaaaattccttaccgtcgattcatttttgtggctcaattttccctttttccaattgattggtgtgtcaaaaaaggcaaggcaaaactctgttgttatgtaacttaaaaagagagagttgggaaaaatgagagagcaaaaagaacgcaaaaacaattttgaaacagaaataaattcatcacattttttggcaaaaaacagacggagtatttgtaaaaaatattatttttttcaatttatccgctcaatcatttttatgcgtccaattatgtaccgtatatgctctaattatggcccagtctctattaataccgcagtctccaattatccccccccccccctttgaagaacattggccccgaatgattgaatttaaactgatatcggtgaggttgctgagtcattatataaaaaccatcaatatgggcgttatataaaaaaccatcaaatggaaattttcaacaaaaaactggtcataagttgggtcaacgtgaaccaaattaaaaatttggtattattcaaaagcataacattttctatttgctcatctaaatttcaaaaaatttggccaagtttgagcaaaattatggccaaaagcacacaaacaaccagtttttacacatttttggccataacttttttgaaacttatctaaattttttaaatttgtaaaaataggaatttgagttgggttaacaataaataaaatttgaacaattccgtcgttttgcgatcaaaaatgttaaaattttgaccaaaattcaaaaaatatatacaaaaaaatttaggaaacctaatttctgcatcggttgccttggccttacccattcgcactgaaatattgttttttcactctaattcactttacctattatctctaattagcccccccccctatctaaggaggttgaacaataatcatccggggggataatatgaatttaaataatttacaacaaattttagattaattaaaagcactgaaaattaacccaaaaatgcatacaaaaataatgtacaccgcccggattcgaacttcgccctcgcccctcaaaatgatgcctcagaatcagggctggacgtaactgattttcaattacggaaatccgtaatccgtaattacggcaattttttcagttacggtccaaaccctggcgtggcattcacctggtactgaagtgtactttttaaaatgcgttatggctagggcttccaattatatggaaatccttatttttttttcctgcactgtgggaggcctgaaacgcacgaaaaacatgtttttagcttggttttaagcttttaggatgggtttccatatccatatttttccatattttggcattttgtccatattttgatatttttccaaaaaacctctattagaacggccccagcagctaaattggcctttttgagcccaaaaaccggaaaatttttcaaaaaaatcattttttcgccaaattttctcgggaatattgaataaatttgaattttcttaaaaattaataagtttatgtcaaaaataagcaaaaaagataaaatttcacttttctggttgatttttcgctaaaaatgagtaaattttagctttatcgtgttttttcttctaaaatgatttttaataccatatttagccatttttgaagggctttactttatattaacaaatttaaagaaattttgggaaattataccctcaatttgaaaaatttatgtccatatttttgccattttatttccatattttacgatttttggtccatattttatggccatatttcgcaatttatatccatataattacactccctacacataacaggaaagtaccgagtgaaagaccgtttggccgataattaaacgacgcaacgcgcaacgcgttgtcacgcgttgcgccatcgcattgagcagcggagcaacagcgagagatgggagggagaatgagcgacagacacaagcgatcattactgctctaattagccttaatgaatttaatatactttgtgatcactgatcattaatccccccccttcagttccatatactatagaccatttgaaattaatggtactaattgaatctcaattttataaatttttttgttcaatttgaggaaatttgcgaaattagccgataaactcaaaagcccaactgaatattttagtgataccgcaaattttttaaattatttttacatttttaagagtcattttcagctaaatttttaaaacaaattgaaatgtttgtcatcttctcttcaacggcctttctgaaatgaataaatttgcttttaacctgcttccttttttatttattcatacatataaatttgacgcttgctcatcttcaatgcgtcagtttaatgtcataaaaacaagtttcttaagttttcgagattattgatcacgaatttggtatccctttcggccaatcccgaaacatggacccgaattcaaacaaaaagtcgaaagtccaaattttagaatttagcattgttgattcaaaacgccgtaaacgatctaacattgaaggaacgaattggtttatgtagtttgtttccgtgcatttaaaccggttttgaatcaaaaatgctaaattcaaaaatttgggtttttggctttttgttcgaattcgggcccggggttcggaattcagaacgatgttattatagaattctactttttatacctagtacaatgcttaatgctgcaaatctttattttaaaatattttttatcactgactcattttccgggcacgcgttagatgggacagaataaaacgaaattggaaaatgaataattaaacttcaaaattttcttcaataaatcttttttttaaatgttttaataaatgaataaaatcaagcccgtagccaggaaaaattttcgggggggggggggggaaagggaggggtccggtccgaagacctttttttttttttgcaaatttatccataattttttttgctgaataaaattgataaaagttgtttacgatctgcaaataactgcaattttccacttgtagacttttctattgtggcggcggctgcttaaaaaaactttttcccgctgttgggtaaaaactccactttttcactaaaaaaggaaccaatttaggccgttttacggaaaatttgagtgctatttgttacgaaaattgtctataaaaattttaaattttcgtttgggcgcagaggggaattggaatttattttacttcagatcatcaaagaagtgaatgacatctacgttatctggaaattggcaaatattacgattggaaaccattggcaattccgccaattcaattgccacacaaagtcagcggattcggactgatcagcatagcgtaaaactggcgattatggcgattaatgcaacatttcccatttcttttcagtgtcattgaccaaaatgtcttcgacttttctccgccgtgttcgccaacttttcaccatatgtacatgtagtttgtcattccgcacc

SEQ ID NO: 2552 - DNA, 3948 bp, Heterodera glycines
  unsure (1)..(3948): unsure at all n locations
ttggagttttcataaataanttttattgaaaaaaatttaaccattattaaattattgcctctaccgaatcagaagagtgacccaaatcgtcagtttttgaagaacacgaattgctctgatcaccggcttgtttctcgtcaatgccatcactgatcatttcgtcgtatatttctttttttggaaactttaattttgtccttacattcattgcattttgttcttcgtccgaaaatgtctcttttttgatttcttctaatatttttggcttaatatcttcttcattttgacgctcactgctaacatcttcagcttttaagcttgtttttaataaatttttatcagcattacggatattttgatgaatccaattttcgcgttttaagtttctttcgtaattttttgctaacttttgttgcttcatgggtatcaggtttttccataaatctgcgaataagtcttcttcagttccttgaatgccaataaaaaacaaatggacgaagaaaatggcaatcatttaaaagtttatttatgttcagaatttttaatgggaatttttttttataaataataattttttttgaagcttttattatatatttgaaatgatgcaatatttgcaatattttactaagcttttgagttttgccacagtttcctgtaaaattgctttaagcttaatacagggcataatttcttggaatttccgtttcgagtttatttcttttataaatttaaatttgttactttcactgcattttctggaatgataacgaaatgttggggcaggggaagggtggaattaattgagtgccaaattcggccttaattacagagtccgcgtgtgccttcagaaataaaattcggtatttttgggctattatctgtcaaaaaaaatcatcaaaaaactcaaaattctcggcagcgaatgatgacattgccgctctccccccccccgcccaccttattcgcaccaaaaaaagaaaatgtcgaataaattccatgccgataatttatttgtataaaataaaaactccgatgtgtacttggaattgaaaattaagatatttacttgcaaaacggcttacccgtactttgaaattcagtatggtcaatggaagggagccttgtcatacactaatgtccatttgtcattggttaattagtgtctcttcaatttcgctaattaagcataatcgcccgattagagaggcgtacattttatggatttaacattattttgggcatttatttttttggtggaccgtgccgggtgccgcggggtaagcatgaaataaaaattcgattttttcaagtattgtaccgttgtccttcccttgccattcgcctcttagcccatgagttagcccagcatttgacacagcaggttcctcgatgcctttggcatcacctgctctttccaaacttccgcccgcggctgtttgtcagatttaaccgccgcttaagaaaccgtcttaaacaaaggctcaaacactccgcaagcagcgaacgttccgtcaaaacaaacgttggttaacttgcaaagagaacgacagattttaattaccctggaacgtggaagaaacggggcaaaaagtcaaaatcctaatatgggcaacgataattggaatccggtgtaataaaatataaacacaactcacatattgatagaattcccggtaatgaacttttgcctccttcattttctttaatataccgttttctctgttttaatttgctctctcttctcttgttgcttttctacctcgtcctttgtggtgtcatttggacaagcagatgtcctctcaaggctaatagccaattatccaaagaaattccccgtcaatgctctttattaacttaatcattttctttcgtttgattgtggcccaaaaaattaggaaattatgagaaaataacacacaattttatatggtataaaaatgttttaaaattatattagccgataaattaataattcatgcttttgacaatttcgaatcttttggctttataataataaattttaatatatattttttggggtgaacaagaagcttcccaaaaggatgattaataataattgaatttattgaagcaattaagtaaatgtctaaattttttgaaaaacccgatgagaaaaatgtcaacgacctggtcaaattgaattccgatgagaaattcagagaatttattgacttgtttcctgatttttggaatcccaatcccgcaacaggatctgaaaatttggtttttgtacgggattcaaggtttccccagtgtcgcctctcggcaccgcccacacacctcttttttcttctcattttcctggtggtgcctataggcaccaacgggccctcctcccccacgactcaaattattggttacttaattttggagaactttttatttcaattatgagtttttcggaatttcaatactgcaccaatctagcagcgggatcagaaaatttaatatttccggtctcctgatgatgcaaaaaacaaaatagggataaaaaggcaaataatatttaaacacttttgtcttaatttttttagttttataaattttgtcgggcctttttcattttttggcaattccttttcaaaatgtaaaatggtcaattttacaaaggttttttgccctatctattttcatcaaattatgttcctttgacccactttttccttcgaccactctctcattttctcattaacaaaaatgaggctgccattaaatttataattgtccctcaaatgcttcgctttgtcaatttgtcctcaagcaatgaaaaattacctattttttattgtcttgcataatagtggaaaatgcttcttgtcaattaaaaagtcattttctcatataaactgactgcttttccctcttcttcgttataatcatcattcatctcagggccttctggcacaatttcattaagggctaaaggagatttaattaattattttagaaaattttttatgattataaaaaaatatttataaaaattaaacaaacttaatgattttattttctaaattaataaaattaaataaattcctttataataattaaatgaattaaattatatttttaagtatgatttacaagccaaaaattgttgaagtggccccacagcccctaatggggggggggggattcatagcccgtctcatttgcgtactgttgctgaattatttttatccaataattatgaattcttatcctattcttgaagcaagaaataattacttttgtcataaaaccagcagttcggcctcttgcaagccgagaaatctcacttttgtaatcaattatatgcttgagcctgagcaaatcatggcttcccgtaccttcgaagtaaagaaaataataattcgaattcttacagtttcgtcaaagtctttcaatgaaagacaattttaaaaagtcagaaaaaaacaaagttttgttttagttcttattactagatgattcataaagagtaaccttataactttataatcagaaataagttagtaagtaatgtaaaattttattttcccgagcgcgaaactggggacccaccaaatgggaattttttttcaaaaatcggtcgaacaatgctaagtcatctttcttaagagaaaagaattaaaatcaagaattattataaattatcgtaaagaattagtcaaatttatcaaatatcgagctcgtaaaatcgagtagccaccctttttacacttttaaaaaaattccaatcatttcagaacgtgataaaaatttcattagtttcttaatttcttaagagaaaaaaaatttaaatacagattttataaattttcgcaaatcattttagaactcaatttcattaatctttttaataatagtaaaacatacaagatattaaagcttgggtcatcaacgacatccatagttaatcgaacgtgcaactgcctatactta

SEQ ID NO: 2553 - DNA, 1570 bp, Heterodera glycines
ccttaacatcatcatttatttggtttcgaagttttacctttattatgacttttattatagcaaaaaacagcttcaaaaccacttaaaaattatttacatattatttatttacctattcatatttcgtatacaaaaaattaaaattaaattacctttcaaaagtcgtgatcacactgtcgccaacaccgcaaaaggtgaagcggactaagtcgttgattggtattcttaggtcagttaccgttttggcagaaataaggttgaaaggcgatccttattttaattaaaatggtatactatccctaataataaaacaattagaagcatacataacaaacattaatatggtagttaaataaagaaaatttcaaaaattttaagtttaaaaataaaaagccttataagtttactctattttagattttttgatagataaatatgagtatcaacatttttttagatttgttaatttgtaatttaattaaagttacttaaaaacaaacatgaagcaacttaaaaaagaaataaagtcaaaaatttatagatgataatcaattttaatcaaagagatttgcttacctgagtccatcattattaatgattccccgaacgtaacgggtcctcggcggcaatggtgacggagctgatggaactctatcggtgaaatttatccaaaaaacgggagtaaaaataccctgacatgaaaattttcaggacccggtttgaccccgattgaaaaacttggacccggtttttcccaaatagccgaacccatgtaaccctagattttggactaccaaacataaatgctgctctttttgcattttaagcgtcgaatcaatgaccatcttaagttttgttaaattttggtaatgtattttcccacaaaaagcaaacaaataaataaacatatattcgaacaaaaagaatcacaaagcatttcttaaaaaaaaagagagcatcaaataaaattccaatggtgagatcgtcgagcatttctcaaatttaattaattaattcgcttccgcacagtcagacgacgtttcgatgctttgacccgcttcttctttttcttcgtccgctggtggctgcaatggcttaaaattaaatacaatttgaattgggtgtaaatttgttaatattttgcacttacccagtcgaacttttgccaccccgcaaatcaaattggacactgttcaatgtgtcgtcccaattttcgtcgtcgtcccatggaaacgccgtcgccttttcactaattgggcatcgcttcaacagccaattaacatcacaacttgacactccgggacttaggtagcagttgtaagttttttttcagtaccagtcatggtcccgtacaattctagttaacacctattcgattaaaaagaatttgaaatttttccaaaaagggaataccataggtaattatttacccaaaattaatgcaatatgacctaatataccggtttaattactcaagttttagataaaacattctctataaaatcgattatcgacaatgaaacgaagcaacacaacaaaagacactcctcatcaatcaaaacgctcaatg

SEQ ID NO: 2554 - DNA, 7411 bp, Heterodera glycines
actccgtcgatccagagactgacggaagtatctttcaaaaattgaagagctgagaggttgatcacaaagatatctgagatcaagcaattcagcacgccaaaaaacttgaacagaaaagatttgacagtgtggaaacgcaaactcaacaacatattggaggcaactacaaaagctgtgaaaggggaagagtttaaccgaactctgatagaaaaattagttcgtctaattcagtcaacaggctactcaacaaaagctggtcaagaccaagcacttatcagcctacgcaaaattgaaaacaatttgaagcaccaaagacgctaccttaccgcccaagaaaggacgacacattatttaaagaagacttttggcttaccaactgaacagaaaataaaatcgaacaacgattccgacactgcgacccaatcaactagttctaatctgtgatcaaatttttaaaattgtgataataattgttaattccataatcaataaattgtgattagcatttaacctgtgataaaacaattctgttaattccttttttgagtaataaaatgttcatttcattaattattttaaattacggtatttaacaaaatttcaaactgtgtcctaaaaatataatcgatttaaattcaattgacttgtcaaatcaacccgatcagttaaatcagatcgagaatattgaaatattaccggaatttgaggaaccaataattatagagaacgaaaatcagaatatcgaaatctttgaacctaacgaaattgaacaaataacaaatcaagacgatttaatttttggaaatttctacggggctttaatcactgaaccattgtcaaattattttaccattaatcaagacaatattaccaaagtcaaaaaatttaaatttaatccttctaaatatatatttaaaattactattgctctcactgtgcatgtacacaaaaatttgtcacaccgtaatatagaaattttctgtcaaacaatttctgaagaagtaacaaatagcatactatcagactttttacacacaacagaacaaaccataattgactcaatcgaaacggaccaaagaaaaatcaaattaacaaaatttctcaagagaatagaaaatcgaatatctaagcagattaaaaaacagtggggtccatattgctatcatccaattcttgtactttcaactcataagtatattttttaaatatgtcgggtcaactcagagcaaaaataccgttacttaaccgagtgttaataaaagaaatacagaaaattaagtcaaaaatagaagaagggaattttgagtatgataaaaataattttgatgattgttctcgaatttttaataaaactaaagaaatcattcaaagaattgaaccaaattttgaaaaattaaaaattttgcaccaaaaatggcaaaatttaatgaggcaaatgaataaaacagaatggaacagtgaatggaaactacaaaaaatattccgggaaaagcataattatttaaaaacaattaaggaaattgacgaaatccttgacacaattaaggatataaatttggaggtaaaaagaaggctgaaagcgctcaaaccaaattccccttcagaatccgaccaagagaatgaatcaattgatgagagcaagaaaacgatgatgaagaagccggagaagaagaagatgaagatgaaaaagaatatgatagtgatcaagaggacgaatcacaagaaatgcattcaagtgatcaaacacatcgtaatcgcataccatttgttcatcaacgatcaagaataaagcttccggcacaaactctaactcatttttcgggaaaattttcccaatggcccagtttttgggacgattttaaatcctcagtacataatgatccgaacatggaaaatatacaaaaacttaagtaccttcgtggactgttacatgatgagccttatcgaattgtatccccatacccccttattaataaaaattacccaataataataaaattgctgaaatcacgttacggtaaccccgaattaatcagagaaaatcttcacagtgaattacgtaacttgaaaaggcctattgaatccacgattgaattaagaaaatttattttactaattgatcgaataattttgcaattaaaatcccaaggcgaagacataaatcatccccaaattaagcagtctatagaaacaaaacttccatataatttaagacttaaattgagagaaaaatttaaaatttattcaacaaagcagttaatggactttttaaatgctcacacacaagcacgtgaagacatggaacgaatggaagactcaaatcgtcaaatccggaactttccttctaatcgaccaaacccaaacaagatacagagacaaccatatcaaaatttctctcaaaacaaaccaaaatttaaccaaagaaatcaatatcaaaccccaattacaccttttccatatacttctgcattaacaacaaagtcaaaaccattgcatccggcacagattaaaccaatacctacacaaaccaaaactcaatataaaatattttgtcgtttctgtgaaagagaaaaccatacaagtaaagaatgtaaaatatattcaaccccggagaaacgaaatgaacgagtacgtgaactcaaactttgtctcaattgtctaaataagggacatatggtcaatgaatgcaaatcgacctatttatgttataactgcaaacacaaacataatactctcctgtgcactcgtaaacaaactcagtacaaaacgaaggaacaaaaaaccagagtgaatatggctcaaaattacgaaaatcatgaagagactcagacattcatgacaatggagggtgataaaaatttaccaaattctgatgaagaagaattgcttatgactactgaagtaaactgcataaatcccaacaaatataaagtaaaaagggaaataattttgtttgataatgggtcacaaaaaagctatataaccgaagaatgtgctcaaactcttcaattaagcacaattgaggaaaaattattagcaatttccactttcaatcaaaataagccaaaaataattaaatcaagactagtcaaagttggcattaaaacattaaaaggtgaaatagagtacataacactacaaacagtggaaaaaattactgatgttacaaaaatggttaataaagaaactgttgatgtacttggagtaaaaatcccaatcagtcatgcacgtcctcaaattttaattggaatcgactattactggcactttatgctaccaaattcacaaattcaattacttccatcaggattttactcaataaatacaaaattaggaaaaatattatctggaaaaggaactattgaggacaccaattgtaactcagtgaccgaaaaaagaaaaaaagacgaaacgaaccaaatacttcagaaattttgggaattagaaaacattggaattatcgactcaccacatatgacggatgaagatgcagcaatgatacactttgataaaaatgttacatttaaaaataacagataccatgttcgatggccttataaaagagagaacccgaatttaccaacaaattttggattatgcatgggaagactaagaaatgttgttaaacaactaattaaaaacaaacaattggaaaattatgacagaatattgcaagaacaaatggatactgatgtaaatgaaattgctgaatttaaatcaaataatttgcttcattatcttccacatcatccggtaataaaagagagctcaaatacaactaaaatacgaccagtttttgatgcgtccgcaaaacttaaaggaaataattcactaaatgatgaaattcaccaaggaccaaaattactaccagatttgtgtggaatgattctccgatttagacttaaaaattacgtattaattggtgacctggaaaaagcatttttacgagttggattaaatgaattagacagagacacaacacgatttttatgggtaaacaaatcgtacttgaatgaaataagacaaaattatcgagaaattgaaatgagagacatcgaattgagacgattcacacggataccatttggagttaacgcttcaccatttttattaactgctgtagttaatctccacttgtcaaagataaatgaaatgtttgaaaaattcaagacaattcaagttaataaggaattatgtctaaatgataaagaagaagaatttaaaaatctttgcatagaacttaaacaaaatgcatatgttgataatttcgtaatgatgtgcgatgatgaaaaagaaatacaattcaaacattattggagtaaagaaatatttaaactagcatcaatgaatctgagagagtttgtctctaatcatgaacaaagtaataaagaaattcaaaaattggaaggatcagagataccaaaagtaacaaaaatgttgggtataaaatggaatgtcgattcagatgaacttgaactccaaataaaaattccactaatgagtaaagacacaacaaaaagacaaattttgacgatgattgccaaaaatttcgatcccatgggatggatttcaccagtaatactgaaatataaactatttttccaaaaactatggcgatcaaacaaagattgggacgataaattagatgatcaagaaattattgaatggaataatatttcaaacacagaaatgatagccataccacgttcacctttcacaagccaatatttaaatcattcaatattacacattttcgctgacgcttctgagttggcttatgccacatcagcttatttacatacaaacgatcaaataaatttattgttcgcaaaaacaagacttactccacttaaaggcttaacaattcctaaactcgaattattaggtttattgatagccgcaagagccgccaaatttataaaaagggaatcaaaattgaatctcgaaaatacctatatttggtcagactcaaaatgtgtactcagttggttgaaatgtaaaaggaatttaccaatttttataaaaaatagagttgaagagataaaacaaattgccttggaattacacatcacttttcattatgtaaaatcagcagataacccggctgatttggcttcacgaggagcaaccatgagtgaattaaaacacaacaaattatggtggaatggaccaaaatggcttaaactgaaaaaagaaaattggccacctcacagcttttacagtcctgatcaagaagaggctccttatttagataatacagaggaaataattaacactcaaataaatttaataaaaaacgaatataaaggaattatcgaatgggataaattcagttcatggcttaaaataactcgcatttgtcaaactttattaaaattcatatttttcaaactacagaactctaaaaagttcaaagaaaaatttatttgctctaaattcgaaaatgcattacaattaaaaataatggcacaaaaaatgctaattcgaattattcagagggaaatggaaccaaataaagaagaagaaagacagttaagaatttatctcgataatgatatgatactcaaatgtgaaggacgattaaaaaatgcacaaattcaaggtgtcaatcccatttttttaccaagaaaacactatggaactcatttgataatcatggattatcacacacgaaatttacacgcaggtacaatgacaacattatcggaaataagaaaaacttattggataccgaaaggaagaagaattgttgatcaaatacggagacaatgctaccattgtaggagatataatgctaaaccttttcaacaaccacaaatgcctccattacccaaatcacgagttgaaataactgaaccatttcaaaacgttggactagattatatgggaccaatacaaataaaaaatttcaatgaaaaatgctggataattttatttacatgcttcacaacacgaggtattcatctcgaattagtcacttccttatcagttcagcattttctcaatgcatttagaagatttatatcaagaagaggcacacccaaacatgtatggagtgataatgcagcacaaataaaacttgcatcaaaaattctaccagaagtgttaaaattaagagaaattctcaaacacgaatcaattaaaagttattttttaaatgaaaatataaattggacattctctatagaattagccccttggcaaaacggagcaattgaacgccttaatcagaatgtcaaaacagcaatgagaaaagtaatcggtaaaagatttattgagtttgattcttttcaaactctgacttgtgaaattgaagccctggtaaattcacgaccaattacctttatatatgatgaaattaactcttatcaaattcttagaccaatcgacttcatacttccacataaaaatttatgtattcctccgattttggaaaatcaggaaactaaagacccaacatattacccaaaaaagacttcattcgaccaaacaattgaattatggaagaaaaccacaaaattattagatgactattggaaaatttggactgatgaatatataccaagtctaagagaacgttataaaatcgaaaacaaaaatccacgaaattgtatgaaatcttttccagaattgaatgatatcgtaataatacatgatcaaactcccagagcaatgtggaagactggcattgtcaaaaatgtcataactggatcagatggtatcgtaagaggcgctaatatcgaacttccaaataaaacagtactaaatcgacccttaaaattaatttacccgttagaaattaattcaaatgatgataaagagcaagaaactctctctaatctaataattaatcaaaaacccaattatttcaacagaaaaaggaagatggataatcccttagtccctataaaaatgaatagactgtttcaaaactcgttaacaattatatcattattaacattaatttcattatgttcatcttattcatacgaatgtccaaaggaacctaaaatatggaaaacgagatatacaactctatgtatcgaaaacggttttacaatcagacaaaataaaataacaaaagaattttgctataaacaattggtatgcaatgacaaacatattattaaacgacgaccaccgtattgtggtaaaaaatgtaattgtcccgagggattcaaattttgtagtttcgcatcttataataaaatcaaaaatgaatcagttggaagaattaattaccaaaaaataatttcgttctacaaaccaaatatctgctcactaaataaaactgaaaagtgtccaaatatgcagataaaattatttaattcaattgttcttcatgacaattcaattcatatggtgaaaactttaaatttacttttttcccaaattgactcgataaacaatt

SEQ ID NO: 2555 - DNA, 3526 bp, Heterodera glycines
catataataaacaaaatattacagaaaattgtgaagttctatgtcccgatggcaagtctgaaattactttaaaagctaatttggaatacatatcacaacaagatactaaaattattcccgctaacaatactaatgaaaaccccattatcggaacttccttggaccaagtaattgatataataaattttgtttacactcttattaaaactaattttttcaccatatttattattatcatattcatacttattctattttttctaattccatgtctactacctattatatatagaattatgtgtgcttgccttcttcgttcgcgtgggagtgtcgcgacagcgcgaaatcccaaaataaagaaaggaaaaaataaaaaacactagaaaacaaaatggggaaaaacaaaacctacataataaaaaataatttttcatttaatttggaaaaacatattagaaaaaactatcaaaaatataattataaaaaatgggaaaaccttttgaaatgaataacggaaaattgtttgaaaatgaaaagtgcatttcctcaggaatgaaaggaacgaaaattaattaatattaaatggcgaattctgttaaggattgcgttcgtaaacaaattattaataattaattgaatatattaaaggaattggaattgtaaaggaaaaagtggaaaacaaacaattaatgggaaaatggcaaaacccaaacggatataacaaaaacagattttaattaaaaattataaattggagcgtactatggtttcaaaaaagccgtataaaaggggctgggttttcagtgatttcagatcgctcattggttccctccgaagtttccattccttccccgtgccgtgctctgcgccttccctgtgccgtgccctgcgccttccccgtgccgtgcccgtccgcctttcccgtgccgtgccctgcgccttccccgtgccgtgcccgtgcgcctttcccgtgccgtgcccgtgcgcctgccccgtgccctgctccttccccgtgccgtgccctgcgccttccccgtgccgtgccctgcgccttccccttaccattcccctttgtgcccattttatcatgtcggattatatttgttcattaattaattatggtttaattacccaagtttgagggtacaaaataaagtgaatttttggcgcctttggtctttaatttttgtcaactcgctctgaatacgtccgcccagcccattcaaacttttttgccgtcatcagaacgacaccgcccgcgagcagtcattttatgttctaatcacacgcgtgtgatcgtttggcgcctggaccgtccgcgagcggtcacattatgttctgatcacaagcgtgtgatctgatgtcgcctggaccgcccgcgagcggtcactttatgttctgatcacacgcgtgtgatcgtttggcgcctggaccgctcgcaagcggtcacattatgttcggagcgcacgcgtgtgaatttgttgactgtatctctcgcgagcggtctctttatggtggggcgcatgcgtatgatcgtttgtcgcgcaagcgagcggtcgctttatggtggggggcgcacgcgtgtgataatctgttgactggaccgcccgcgagcgataccgatcatttgtcggctggagcgctcgcgagcggggggtcgtacgcgtgtgtgtgtgtgtgtgtgtgtgtgggtgtcccgatttccgaaaaagtttggaccccaggaattccgattttcgatttccgaaaatttttggggctcggaatgccatccctaatgtgtatgtgtgtgtgtgtgtgtgtgtgtgtgtgtgtgtgtgtgtgtgggtgcctgagcatacgcgagcggtctctaatgttcgggtcgcgctcgtgggatttttatttttcattcttaagccgcggcgaagcgcacggctccgtgcgcccggctatcgtccgctgttccgagtcgtcttccaccattcgtcgaccaccgggaaccccgtggcggaacgacgcaagcagcaacgtcgctcaaaacgacgttgtcgacagcgactggagcggcagcgcctgcgtgccgaacggcagcccttctggcggttgctggaccaacagtgggccgacgaagcgcatcacagagagctggtggaagacgactggctgctgtacggcgaccagctggcgaccgcacgcgacgtgatcctggccgacggccgcccactggacgattggcttcgtcacgacgagaccgtcgccgattggacaccgctcgaccattcggagctcaaacgactgtccgacggtgtgcatcggacggcgggtgtcggagccgaagcgtgccccatctgcatggagccgttggcggacaatgtgctgctatgtacgggctgctgcggtcagcgcttttgcagcgtctgcctgtggacgcacgcgtgccagagccgggcgtgtccactctgtcgtcggcatctgctgacgggcgaaccgttgacagtcgtcgcggaagacgtcagtggtgatgacgacagtcaagtggacgacgacgacgacgacgacagtgccgacgacggcgacgaccacggcggagccgaagcggccctcagccccccacagcagcacattcgtccgccaaggcgtcgccgtcggcatggacgcgcgacggagcccagctgttccggcttcggcacgtggggttcgccgtcgtccaacagcacggagggctcatttgtggagttggccgagtgggccgacgaatagtgatgatgatgatgattgatgacaccgaaaaatttgccatagttgaaattttttaaataaattaacataattctaagacgcggtgtaagcctagttggttgaacgttggcgagcgattgcgggcgtacatattttgtagtgtatgagtgtatgtgtgtgtgtgtggcgggtgtgtatgtgtgggtgtgttttttcgtgcttgaatagggggtcagggatgaaggacggggtggggtaaattttcgtgattttaatagaaatgtcaacctatttgtgctccttttagagaggcgtcggtgccgtccaaaccggacacggccgtcgtcgtcaccttcgtcgaagcccaaaagcggaggtgagagcatccacgtctgcattagtgggaccagcatacggtgggccgcccactgactatgacgacgacgacgacgatgccgaagaatttgggggcaacggcgttgacaatgacgacacatctgctgttgacgatgtcgacgacttcttcagcgtggtcggcgtctgggagcgggccggctcccggtcgcgtgccacgcagaccgagaccatccaagtgcgcttccacaactgggagcgggcgcggcgccccgacctactgctcgcacgctgcatcgcccgtctgatggcgcgcgtgctggacgggcgtgcggagccgctccgcgtcgggctgtccgtgcagccgcccggctgggacaactgcttccacgtgccgatacgccccccacagcagaacagtgcgcacgcgctggcggccgctctcgaaaca

SEQ ID NO: 2556 - DNA, 6404 bp, Heterodera glycines
agggaatggttaattgtcactcacagcaaatgaaatgaaattggcatatccccagctgctctctttattgtcaaaaacatggccatttaattctaatttaaaatccgacactccgctcttttgcgaaacaattcgaaagtttgccgaacatttgcaactccaattttctgctcaatatcaattaattaattgcttatatatattaattattagtaattttgcaccttcttttggagcatcgcaccaaaggtaaatacccaaacttttctcattgacagtgcttccacttttcgcttttatttttgccaatattttccatggaagtccatttatgtacactttttcgctgtaccgactgctctcaacctcctctcgtgcaaattctgacactttttcaatgtccatcaaaactgtgccttctttccgatcggaaatccgtccattaatcgaaaatggcattgggaaaattccgtcggaaatcccatgacaatttggaagggatttgaactgataaacggcgatcacttcatcttttgataaaacaccgaagggaactgtaaatatgtattaacttattgaaaaataaattttaaaaaacatttttaaaaatcgccacaaaaactatgaatattttacggcatctcatcagagaacgagtttgaaattttgacttattttttaccaattttcttcgtaaattcctcatttgacaaaagcggaaagcgaattttgaacagtgccgggccaagcatttgacggcgattctctgctgaacaatcaatgccattttcacggcatttttcatcggcccaacggagtgcctttaaaaaaatttaatggaaataattaaatgactaataaaatttagtttttaaatttaattgttaaaattaccgcattccaaattgaaatttctccactgatttgcaattcgtcacactccaaaatttcgcacaacaatttttggtcaatttgcaaaaaagcatccgatttgagcaaagtgtccgcatttttgccaatgtaagccaaacaacaattggcaaaattctaaaatttaaaggaaaaataatctttaaaatgtagtctttctctgagagtgccaaagcgagaaaagaatcgagtttttctggtctaggttttcgagtttagaagaccgagatttctttaagccctctaatgattgtttggcttttgacaaacttaaaaaaacattcattttttgaggaacatattttacaaaaaaaagtctaaagtcaatggtttttcggtctcacaatcggacagcagcaattaattggtcttaaaatccttaatttattatacattctaaataaacgaaaaaatgtttgtaaaaattttagtgtaggaaaatatttgcaaaaaaatgcaaataatagcgaaattcaagacggaaaaattcacgagattgagtttaatcattcaaaaaaatcactctaaacagtttattatgtattttatttatctggaaaatgtaaaccgacaaaatagttaaaaattagcaaatttttaattctttcgcatttttcaatttttcctacccactttcaagtcgagaagacgggcctgggcaaaagcgaagaaaacattgcgcaattcggaaatgggaatttgcgaagatgagccgaccagagaggggatattgtactttttggctaattaaataatttatttatttttgtcacataaaattaaatccaccggcgtaaagcacagccattgcattttctccgttcagttcgctcaaatcatctgtataaatgaagctcaacatcactttgaatgctgctgcttcaacgtcggggacctccacgggacaatcagcagaggctaattgaaaattattagtgtaattagcggcggctaattgaaaatttaattagagcaattagcggaggactattgaaaattaattagggtaatttgcagagactaaattgtaaatgtcattcagtaatgtttttaccgaattccgctttttcctttttggcatcaaaacggaacatcgcctcaaaaacgtcggaagcgtgtttcaaaatgagcttatgggctggcacaagcttaagaggattaaattttaaaaaacacaacaaaaattaccattcactaaatttccaatttttaattaataaattaaatttttattttaaattaaactcgcctcttttgcgtctccgtcgcccaccaaaaaataaacatccgcgtcctctcccgtgctcaacaaatgcttcatccgatcaagcactgattgggacatgataagcaattccatcattcgtttaattatctatttaaatgcggtaaaattattggcaatttcaaaattggcaagaaataaaaaccacggcacaaaatcagcaaaactttatgttcagttgggctttgtgattattttgaggaaatttgtagcaaaaaaaaacatgcaaatgtttcgttgtgctccttccccccctgtttttatgcattttttcatcgctttgccatcggtaaaaaaaaattgatccgactaaaatgcaaacgtaaacaaaaagaattttggattaccaagtaataaaaaagttatcctatataataaagttgagtgtttgttgtgtgtgtccggtgtttgaatttgtgtggcgttttgtttgagttttgcgttaaaaatgaatttgaaaagagatgaaaagaaattgttttgaaaaagaagagaatataaagaaaagagacgaaaataaatagttaagaagaagaagaagacaaaagaaatagcacagaaaaagaaggtaaaagatttctccttctaggatgtagaggttagagggagggatggtgggaaaatagtgcactgtctgattgtctgtctacgcgggcagggcgggtgagaggggcatacagtgaacagacgcgtgctgctgtgcagcagcagtctgttggacgcgtgcgtgtgtgtgggagaaggagggagtgggaaaaaaagagagtaaattgcaatggaaaagaaaagagagcaaaagaaaggaaagggagagataatgggaaatttgtctcgcatcccttccttatttataacccatcttttattatataaaataattaataaaataatgagcacatttttgtgtttgtttgagtggaaaatccggtatatgaagtttctgtttttgtgtgtaagaaaaaatttgtggttttgctgttattattattttttgtctaaattttcgtttttgttaattgatttccattttgatgtgaaagctttttgttttgcttatgtaaacgataatggagaattgtttgattaaaaaaatacattagaattcgtttgaatgaaaaaggtttgttacttaaaaaagttttttgtacttttccttgcttataatatgaaaagaatctgatttggtttttgatatttgttttgaataaaaagcatgttatgatagtaataaaaaatgaaagaaaaatcctttgatggatagaaaaagcaatataaatgtacaccatagtgttttgatttatgggttatatttcaatttctggattccttttaaatagttctgtattccgttgctgaggttgttttccggtgattgaaatgtcggagaactgagtcccggtaattgtgttgctgaaggattgtcccggcgattggaatgttggtgggttgagtccccccccccccccctccattccatccttttgcttcatcattttccaatcggggggataataattgggaagcaatgagttggccaaaatcaaaaatccattcagtctctgtcattttatgggccagctaattaaatttggatttatctgtttaagcattgtactttactttactttttatttttgcattttcttttgacaaaaccattttaaaaaagtttttcattggtttcacataaaatttgcaattttttaaaatttcagatgctaaggcgtcccagggacagcagcagtggtcctgtgctccactttttcttcatcgtcctctgcaatttgccattccaaattgatgctgtcggattggcaccggggctttactgtggcacggtcacttgctacgatggtgaatttgaagggataggaaatgcgatttttaatttttcaattttaagtgctcgaaatttctcgggatgacttcaacaagacggatttgccgaaactgtacagaaggatggcacgccaataccatccggaccgggtcaaacgtgaagtgagtgctctactaaaatggcaaataaccaatttcggaattgactcctgaaaagaatttcataaaaattgggaactcttccagtttatatggcccgaaaaaccatagagaggggggactcttttggtttgcaaatttttttatgataaaaattcatgaacttttttatagaattttcggcgtcgctaatcacgaatcagataccaattttgacaaatctctaacccaaattcaaataaaaagttgaaaatttaaaattttcggatttttttttgttgctcaaatttaagttaagtattcgaaattggattaaatagatgtcaaatcttgatcaggccccaaaactccccgggaacaagttttcataagttattagcacacaaaaatttagcaaaccaaaagggtgggtcccccttatggtttttcgggccacctaaactggaaaagtgcccaaaattgtgtcaccttttctccgccctccaattccatttttcatgtttggctttattttcggtcattaattttgcaattttttacaaatccatcccctaattttaaatggattcactgtttttcccctccaaaggatctccgtgaagagacggaggaaaaatttcggctaattgccaccgcttatgagacgctgaaggacgacgagacgcgcacatattacgactattatttggaccatccggaggagcgctactacaacttctaccagtactatcggctgcgcaccgcgccacgcgtcgacgtacgcattgtgatcgcggtcaccattctgctcatctccgttgtgcaggtgaacagcagggccgaacaggacaggacaagatggtcttgtacatgataggacgggtcctttgtgtttttgaaaaatgcaacagggccagaaattctaaaaaaacaggaatttagccatctgaaaccatggtccgggttttcaaaaattcacgactatgaaggtggacgctccgccggggtcggaaaaggtttgagtcaagcccggattgtgaaaaaattttctcatttttttgctgttatttgcaaattgacattaaaaaatatagctaccggatatttagaaaattgaccaattttctgaaatttacttattaaacttgtctttgttttacagtatctcagcgcccatcaaaagtaccgtgaggcattacggtatgccaaggagcaggtcaaattccggcacatggccatcgaaattgggcgggagcgcggggtgctcgaatttgacaagcaaacgggcaaaatgaagaagaagcagcggaatgggcaggactctgagcaaattatcaggtaattgggcattttaatttgtaatgtgccgcggaatgcttttgccaatgtacggaaaattgggcaccactgccacgtttttggaccataaactcaacaaaattggtaccatttgaacgctattcaatttactaataaaaactaactttatccacgttaattttggccgttttaaggcaaaaaacttgtaaatagcggaaaatggaggttcggcggtgccgataggcgccgtcgggaaaaattttgaaaacttgagtgctatttgttacgaaaattgcctataaactttttaaattttcgtttggggggggggaattcaaaaaaattttccattatttgctggaaaattttaaaaaattttcatttcgggggggggggggaggggcctagcaagtcaaaaacaacgtttttggggtttatccgggcaaacccgtagcttgccatttttccctttcaacaagggcaaaagacaaatggttagcatcttaatccaatcagtgacctaaagaaaaaagaaaacaatattcatcgagtgcgcacttacacaaactcaaaaagtttgtccgtttccctctcaaaacatcgacatgttttgttccccgcggggctttttttctttcaaaataactctaacttttttgcactagctgctgacagtttacaatcaagttttatcaaacaataaacaaacctctaaaacagaacaccacacaatttcgtcgaaaaaaaggagagaagagcataagggttttttgttcccaccaatagtgtgaagtgaggcaaagcctaacaaaatcatgggtacaacagaatcatcaaaaagtcgacgcaagtttttcaaaaataatccatttctcatctaacatgctacaaa

SEQ ID NO: 2557 - DNA, 2518 bp, Heterodera glycines
atggaattatgacccattaacttacatttgcattggtgtccctccctttttttgaccattcgaaaatttgaaactaacaaaaaaaaatttttgttttagtggcataattgaggagaatatcagcattagcgggggctatcggccgccacggatattcgacactttggcggtgcaattggtgggcaaaaacgggggacaatgagactttatgcaacaaaaaacaaccctttttagttgttttttccgataattggggcgaaactgatagcggtaagtgtcgaaggttgtcggtatttcaaataaaaagtgccaaaaaacatttcttccatattttggtgtcatatttacagtggtggtcccgctgggcattcaaattttggatacgccggcagccctacgacgaggaggccaagctgtacatgatcaggaagaacttgaagcagtccgaggagcaatttcaggtgcagcaaatggcacaattatccccgggaaaatttctcaagctataaataattcaagaggcattttccactaattttaagacaccggaaatattttattcccaaaatttaaaaaaatgcgaaatttaaattgattttggcttttctatttgcttttaaaatcaatttccgttacttcccggcacaggcaacggagccaaagctgatggaggagtacatggcttgcgaactgtggaagcgggccgagttcgaccggtggaaggaggacaaggacaaagaggagaaggagcggctgtccaactcgggtcgctaccgccagtacaaacggttcatgaagaagcaggccgggtgagcatttttacaccgcactttttattgtacagtaccattgaacggcgtcgaattttgcaccgaaataattcaattttaattttaaaaaatgggaatttggcctgactttaaggggtctattgaaattgattcagaattttgccgggattagattacataattcttggttatcgttgtccccgcccctccatcctcactcaaaatccaattttagggattgctcattcttcaaacgaaatgaaccaaaaagcatgaaaagcgaaaaattggatgttgttgtcaaaagagcactataaaacagagagagaaaatgttttgttgttttttgcagaaacacaatttccttcctggacgaaatgtgatgagaagcgattgattgaccaccgacggcaaaatttgggggcaaaacaaaaacggaacagaaacaaaagcaactgtcgttattttccaatttgttattgttgttgttattgtattttaatgtgtagctgctcttttttgttgggtacagtccaaaccgacggatttcagaaagccccggactcgaaaacctgtaacattggctaaaaatcggagaaattttcacaacgggtcgaaaatttgtgttttttgtggatgtagttgaactgccccaagccctggtcatgtgacagtaccttattatccgttttccccaatttggttagttcccttctgttcaattcctttcccttgcctgtaaggtggcggtgctgttgatgaaaacaaaaattctcatttctttttttccagcatattttgtattgtaattttattgctttttgtatggaatttttcaacggtccaaaaattgcaggtttttctcctaaagtcctaaacattatgcgcattaaattgtttcctgtctctccatttttgttttcttttctgagttcatattgcatttttttattattcgatgaactttattgtttgttaatttatgggaagtcttgtttaaacagcttttaacaaaaagacaaaaaaaaagcatttaccatatcataacattagacattcggccaatttattccaaaacattatataaattgtgtgatacaattttggatggatgggataaaaaaacattatcttggatcatttgccatcgttcaaaaaacgtaataagaaaaatgacaccaaccaaacgcacatttattttgtgtcgtcgttgacttacttttcaccatccatccaaaggaaaactcgcggcagagagcacaacaacaaacggaaaagagaggacagaaggagaaggagggacgacctaagaaacgggggtttttaaacaaaactaaaagtatcaaaactccgaaattggatgtattgcaatgttaataacaatacaatagacaaaaatgagagaaattttggggaggaattgtgacaattttgttaaacattttgccaaaccttgagcagtgagattttgagaatgagcttaaggattgctgttcctttatcactaaccttgcgcaggatggcacaacatcaaattcccattaaatttttcaccaaatttcattttcccgtaaaaaagaaagaaacaacaaaatgaaaagagtgaaaaagcaattattgtgttgtaagtgagccaaccttcacattatggactcatccgaccacaatttttgattcaacaacatagatggcgataaatgaatggcacagaaaaaggaagagaaagt

SEQ ID NO: 2558 - DNA, 2321 bp, Heterodera glycines
ggaagagaaagtgcactcggcatctggaaatgcgaagacttaccgaaaagccctcgtggggaaacactcagtgacagacagacagacattcttcgccttcgttgttgcgatccttcggctccgctacgtctcaaatggcatcagcccacgtgtgtaggtcggcacaatgcgttgggccatcatctcttcctattgtggggaaaattgggggaaattagctggtaaatcccccgaaaattccagaaaactagaaattcatatttttcaaaattgcaaagcttttgctgtccatctgttaccagcgatgtctgttcatcttggcacacaatgcgcgtcttggcacccaatgttttgaccattgttgacgacgacgcggcagaagtagagggctcgtccctggtgccatactttccaccggagatgcttttatcctacaaaagttgccaattttacgcatttcgtttatcaaattgtctgatttttacgaggagacgtttaaaaattcgggaaatcagcaaaacaaacatcaaaaatttcgaagtcggttgaaatttcggctcgtccaattatgggtttttatccctttccagcgccatcgaacctggtaagcggcgaatgccgcttgcggtggcatcggaatggcacctcctgacgcaggcgacggtattccggcggggagcggaggcggtggcacaatgcccgccggtggtgtcggaatcgcgccaattgaggcggctgtggacgtcgccggcatccgcccgcccgccgctgctgcggcagccgctgccatcattgcggccatttgttgctgctgttgttgttggtggtgaggaagcggaacagtgccgggacgcggcatcccttcaaaagggaaaagacttaaacaaaatgccaaaattggagagagataaaaatagaatttttatgaatggatgaaggaataaaatttcatttcgttgcctaagtgtataattgctctgttttatagggcttacaattagcaaacacacaaatcaaaatccatgtccaataataagtgttgctgtgttttgctttagagcagcattaatgccgagtcttacaattctttggaagcaagcaaatgacccttttggccgtaatttcgacgtcaaatttggagtgagtattcacaaaaatgaccgaccataggacggcataccaaacggtgtgcgcggtgtgtattggttgtacgccgcaattggtggcaccatgccggacatcgacattccaggcggaaaggcggggcgcggaattttggagggtggcatgtccgagtcgtcctcgacatggccacgagtgctgaaaagccatgctcttaatccgttaattccttgtttttcatttacgattctggcggcaagccctccattccgtacacttcgatgttcacattgtcacggccgggcaacgcgccgggaatcttatcaatgctttccttgtgaacctgcaaaatacaacgggacgaattggtggaattatttcgcaatatttggcatttttcaaggattattcttcgacctgcatgcaatggatggccaagcccgggccggtgaacagctttttgttgcaaatgtgacatttgaagtgtttggcctgcaattaaatagtcggaatgaatgtgtcatcattcttcaggtgcattttcgacatttattattaaaatatagcccaattttgaggggggagttgaaaactaatcgagtgaattattctcagaaatataatctaaaattaataacccgagctaattaaaaggcaattaaactctgtcattgaaatccgacaattccatttccaaattaagttaccgtacaaataaaacaaaccttttgatgttggatgagtattttttcgtcctcaaattcgcggttgcaataccttaaacaaaaggaatgatgcccatcaaaactaatttgatttcgacttaccaacaccatggcttttgcggcttcttcttcttcctacccattttttagcaaaattattttaatacaaaaagctcaaataagaaattatcatacaagtgcacataaagggttaagttagttatagcttttaattgcgtgaacacatatacatacataggtaaatttgtttaactttaatgtcttttttccttcgataaaaaaatttgcgatttttttaaatttaaacagttcgccagatataaattatttaagtctttttaagttccatttcaacagcacaccatatggtaaaggaaacgtaaatttgctttcattggcagagaaatcccgtggagccaatggaataggacaaaagcaaaatgatcctcggca

SEQ ID NO: 2559 - DNA, 1846 bp, Heterodera glycines
  unsure (1)..(1846): unsure at all n locations
aatttaaatntcggcacgcacttacaaaagtcagcgaccgcctgcgaaacgagcaaaaggttggccggctgagccttgagcttacggacgagggcaatcgcaacacaaaccatcaaattgccaagcacagtggccacgatcagcacaatgacaagggcactgatcagcagagcggcaagaggacgagaagagaacagagaaatgggaggggaaaggacggcaaatggggagggggcaaagagagggacggacgaaggagacggtggcaaagtgcaaggggcactgtaagtggcggagttgggtacggtaggggagggaagcgaagggatcggttgagcggaggagagattggaagtaccaatgccagcagcagcagaatcggaattgagcattgcaaatgacgaagagatggaaaggaagggacaaaacacagagagaacccgccgacagtccatcagaagaagacggactgagtcggcagtgccaaaaatgggagacggagacgagatcgggactgagtcagtcgttctcgggatggtgcgttgtcctcgggaacggaagagcagtcgttttgggattggccaattccctcacgctttctgagggcattggaataaaagtttaccctcaattttatttggaatttactagacgaattttgttcttctgtataaagacaaattgtccacaacaccaataatagaatcgatcgaagattgcttaaaaattcttcgatttggagagataattatggcttaatcgatttggcccaattcgggtggatgtttttcatccgctgtatgcgaaggttggccaaattggacgaacgcaaatttgatggaggcagggccaagtcaagcccaggctcctcccattcattcccttcccccaataagcttctccttgtcttggccaccggcgtagaaagcgacacgcaaaatgacgggagaggggggggggggggaaggtgaggggaaacatggagcaatgacagatggtggggatgagcaaagggatggatggataaataaatggaaagggagggaggaggaggaagaaaaacatgaaggaggatgaagaggaagaaaaacagggaggaggagaatggagagaggaggaagaaaaagagggacgaggaggaggaagaaaaacatgaaggaggaggaagagaaaaaaggaggaatgggaagaagaaaaagaaacgagaaggaggatgaagaggaatgaaaagagggaggaggagaatggagagaggaggaagaagattgaacaaggaagaggaggactaaaaggaagagggaagaggaaagaaaagaagggaatcagaaaatgacaaacagaagaaacggtgaagaaaggaaggagaacgaattgggaagaaaggatgggctggtgaatgatatggaaagctttttccgcatttgatggcctcattaaggccaatggaagcggatgatagggagggggaaggaaaagcgggggggggggggaagggacggagggatggaacccctgggaaaaatcattgcctttacgcattccgaagaagcccaaattgggccctaaaagaaggcaatgaacggacggagaagcaaagggagcggaagagcagaagagcgaatgatttgcacaattagaaaaaaagaaagaaagtgcatttgattaatgaatcatatttgttaatttgaggaaatgaaattcagggaaaggatggaaattgaagaaaattaagcggaggagggggggggggcaatttgacaattgagaagggtggaaataatgggggaaaggcacaaggaaatggagacagagcccggggttttgtatgggaaggaaaatcggcttt

SEQ ID NO: 2560 - DNA, 1807 bp, Heterodera glycines
caaatttcgtaaattgcttcattgtccacctgaattataaaaaattgccagaaatgcatccgatcagataacggttgaccagaaaggagcagtccgaatattccaacgtcgtgtgagtgctgagcaccgaattgtacggttcgaccatcgcttttcggggaatggggcgaatacggtaagttacggtacacgggaaggaaacgaaagttatttatttattttcttgtttaaactccgtttctacaggtggaaatctgtggtgccgggtaaacgctgaattggagtttgcactttttgccaaaatccacggaaagactgaacgattttttgaaataaaaactgtgaaacggcgcagcaaaccgttccatcatcagagaagtgaagccggaactgaaaagggggggggggtgaaagaggatggatgaaggagaaaaggagggggggggggactcactgaccccgtccctccgccgaacgaatggaaaatcagaaagccctgcagactttggcactgttcggcgatttcttaagaacggaatggcactgtcaaatcggcccaacacccacttctgatccggtccattgtgacctgagttcgcaaattatgcccaattaattagctcattctcttctccttacatcgattaattccttgccaatggtataatgccctcgggcgtaattgttcgccgcgtcttctttgccagtgatcactgcaacagtttcagcccattaacacgtcaaaatgaatgcctcgacaactctcacattgttcgggatggaaaagctaaaaaaggaggtgagggtgtcatttcggcattttccgggggttggggtcaatttggcatttccaatggtcattttggcattgcaatcggatgatttgtgtgccattcgttctgttcacctgtctgtaagtgccggttcgaatttcgtctgaacaatcggaggatataaatgatgtgaattcgttggccaatcgcctcaccgaccaccgtcgactccaaatcgacgaaaatcgaccgtggcacgtgctttcctaaaatggcacttcgttgctttcgctgcctttttcacagatgacctgagggcgtctcggagaagaaagtgttgtacgaatggtcctcgacgccaacactacgccaaacattcgtttttttgaatcaaaagcaatcggcccccatttccttttcacctttcgtcggtcggcattcgcccgtcgggctaaacgcaattcaatcgacggatggctaattaattagcctaattaacccgcggcacttccctttcacctgaatgccatgctcaaggcaatacaactcccagcacgccttaaccgacgaccgctgctcaattggccacccatcaaaagtcactcacattgccaatttgaacccccgcttggcccatgtgcagcgaaatcacttcgcgcattttgccacccacaggcattttgaattggaaaaaacaataaacactggaggagttaaaggcccaaagcaaaatgatgacaaaagaggcggcgaaaggcaaaaatagacaaactatcggacaaatgggggagggagaaaaaaggcgcctgaagggattcggacccagcggagtaatttagacattgccacagggaagcagcaaaaggtcgtcatggagaatccccgcaccaatttaaacgagggaatgaaaggggagggaaagtaatcgcaaaacaattggacaaagggaatgaccgcagaggaaatgtaattaagggcatagcaaaacaagcggagccatcattgaatttcactttttaatttaaaagatcggt

SEQ ID NO: 2561 - DNA, 1401 bp, Heterodera glycines
  unsure (1)..(1401): unsure at all n locations
tgaaaaatattccgatttttcttttttcacttgacatcttcctgttggtgtttgcgtttccgctctccacgacttgacttttcggaggagctgggtgcgtcatgaattcgcaagggcaagtcaaactcttggtcagcgcccaaataggaatcgcaaatgaagtacagcttgaagttcgacttggaactttgggtgggcacaaagtccagcacatgttgggcttttacattgacagcaagcctgaaattaggatgtgaacctacagagaaaattgaagctgaattgccttttaatggagagcagttgattggtgtttggatcgccgatgaccaaataccatccctcttcgagattttcagggctgtaatggtgtccgtagaagggcactcgaccggccgggtaaggataacgagggaagaacggagcaattacaggcggtgcaaacccgttgaaatcgttttcacgctccaaatcaatccgaatttccacgggttgtcccctaaatggcaaatcaaaatttaatgttccaactgaattgtaataaaatgatcatcactgacactgtcgacttttgcgtggtaatttcatgtcggacttcaatgctcgggtaattgttacagaagacggcaatatccgcaagctgtgcctgattcatttgcaacagctcgtctctgtcctcatcattgagctcaagcagttcgaaaatggattcgactttctaaaagaatacatgacagacataacaacaattgctacacaaacatcactctcactttttccttgcaacgttcaagcagttcaggcgtgcagtggggcaattgcttcatgtacgactcgtttgaatacatcgcttgagtgagcatttgggacaattccatcgcgtggatggcgggcgaaagccaaccgttgctggaatttgaagcacaaagttgattttcaaagtgaaaactaatttaagcatgcctcgaaagcacatcgacacacgcctgaacaaggcgcaccgttttcagcacaatccaatcagtgtctttggtcaactcggcgctcaactgaatgcgcattaaatgcgcatggagcagcaaattgacctgaacgaggaaacaaagagtcaatgtgaattggatacttcaaaatgcgcaattcccactttgacttgaggactgttccacttttggttcttcatctgtccctgaagtcggtcggccaacttcttcagcgtcacttcctctttgtgccgaattgggagagtgctgaattcggtggcattggacacaatctcaatgagtgcccgcaatttggtcttcggtttcaacgacaatgagaaaagttctgaaatttaatgaagtaataaaatattaaaaggcgattttctaaccgatgngttgtgtagctaacataata

SEQ ID NO: 2562 - DNA, 3355 bp, Heterodera glycines
  unsure (1)..(3355): unsure at all n locations
gcataggtcagcagatcgacggcaagcgaacgagtttgacgacgggttggcacaaaaacgagcacgggctntggttcaagtcggccaccgtgccgaatcaccgccgagtaaatgggccgaaccatcgcagcgaggcgagtgggcgtatgtgacagattgaacccctaaagcacaaaccgacaaatttaaagattttaagtgtatttgaatagtacatcaattcgtaagtctaatggaactggtcgcgcatttggagcaaaattgaaaagagtgcagccgagccaatgggtgacatcccggccattcatcaaagacgtggaaagtgcgacaattcggagtttcgagtccaattggttgcccatataacgcatccgcgaacacaccacctcgagaactggctgaaaataacgaaaaggcattagatttgaatgtgtatcatttttgcttgccccgttgctcgctccgatcatgtgcaaattgtccacgacaaacagtttgactttttgcacgtccgaccgattcttccaacggcgggaaatgttgtcccaacgctccgcagtggtcaccaccacgtccgcttttttgagaagtttaatgtccaccgatggttctccagtgagcagaacaacaattttcttcaacggagcagcaattcgttcaagccaatcgaaatagagctgaattggtcgaattattttaataaagaaaacaaattcgaaattaatacatttttggccaagtcatccaacggcgtgcagtaaaccgccttcgacccaggagggttattctcaaagtggcggaggagagcaaactcggcacaaacgccttttccactgccattcggagcaccgatcaaaacgttttcattgctttcgtagcaagttcgaaagactaaaccaaacaaattgaatttatatctattaagtaaagtgatggttgattatttgccttgggtttggatggggttgaacaaacgaattccacgtttcgagaagattgcttcaaaggtcgcgttgttcaacgcggacaccggcaacggctgcaagtccaaaagttcggtcggaggaggatatttctcaggcagaattaaatgacggaatgagacgggcaaaacagtttcactgccaagccatcggtccgatacaattcgaatgaaatataacggcgggagagggtcgaacacgggcacgaacatcttcaccacgtgctcctcttcgcaatattttctgaaatattcattattagtgacattattaaacaacaacctatttattgtactcactgtttgagcaaaaagtattcatggtgcagaataatttcgccgttaacgtcttcgacgaaaatccaaaatccctctgagcttccatgaaccttttcgtcccattgaaaatctggcgtaattgtcagttccacgcggagagttgaacgagtgattggcaaaatcaaagtggtcatgtcgagcttaggaatctgaaaagcgaacaaatgcaaaacaatagtcgtaaatgggcgttatcacctgtcgtatgaatttgtacaagggtttgcccatctttggcactcggacgagttcgcccaattgatgagcgtccaaatcgtacagacggtcaaacgataaatttttcttgtccaacgtacgtacaatgtctaatggcagttttttgaattgatggagagggttcaacgattgccactggcgagcattgaccattttgcaaagaccgagcactttctaaataattttttttgtttagttttagtttgaaaaaagagaacaccaatgccagttgggcccatccacgccaaagaacgatttcgaagagagctcggaagagtcgacccgcggattgggagatgaacaccatgtcactttgaagcgcaaaaccctccaatttgagttgagaaacatatgcctaaatgacaatgagaaaacgcatcatttgtataaagatgtaaacatcatacttggagcaaaacattgactttggcacttggctcttccagtgactctttgatgggtatcggcacacattcggccaatttttgcagctccaacttttcctcctctcgcacatggatttgtttgaactcggatgaaagcgaaaaaatgcggaagaggtcaatttcagtggccgtttctttaagcagtttgttgtaagtctccatactttcgtaagtacagtaataatgcgaggcaattcgacccaattcttgtgcctaaactcaacgcaaaagaatattccagcaattcttgacaccgataaacctgaattaagccagtcttcctgtcgtatttgatcagatttcccttgtccaacagcaaacaagctgtgtgaatcaagtcagcccgcggtttctccagcaatttgtcattttcctgaggaacagaagtttggcttttgtgtgtctaattgctccaatggacttacatctgcgacaattccgtacagtgctggtgccttgcacattcgcacgtgtaaatatgtgtaagtgagccattccatcgcttccacaacgtttgtgacagttccgagtacaatttccgcgttaagagtgtctggcaattttgcaaccaattgactttcgatcggcaactgaatgaaaaagttttcattacgacaaaacccaaaatcggtgtttgtaacctgttggttcatcaacgacagataatattgcagttcggtgttgtgggtcatcaaaatgccttttccgagtgcgttatgttgaggacgccctgcccttcccatcatctgcataatatccaatggaccgatttcagtccaagcacccttttgagggttgtaaatttgagtccctttaatgatcacagtcctaaaaaagagaataattagcagtaaatggtttattctgtacaaaatggctatgtttcacggttattaaacttactgagctgggaggttcacaccccacgcgagggttgcggtagagaccaaaacctaaaattaattgaacaattgcaatttgaatgaaaatgtggaatggagaacaacaaacttgaatgtggcggtcggcgaagagatcttccaccaaggatcggtcgagtctgttcatccccgcgtgatggatggcaaatccatagggcagcaagtccttcaggtcaaggttcttcgcttgttccgcctcggtgcgcaaaacttctgtcgacgcgcttccctctcgcaaaaatttgctaattgtgtcgcgttccaaacaaacgtcgcgcaatgccttcgcagtctttgcagtttcttttcgtgagtgaacaaaaacgagaatctgtaggaaatacgcattggaatgcactttaattggagtatagtttacaatggcatcgcttaacctccgccccctccat

SEQ ID NO: 2563 - DNA, 1515 bp, Heterodera glycines
  unsure (1)..(1515): unsure at all n locations
catattttcagcatcntgtagtaaaaattattatcgaaaaaatgatgataatagggtgacatttttttttcttggaaaatcaataaaatgtaagatgcaatattttaaaaatttggggtccaaaaaagaacaaatttttcaaaaacaaattcttacttctcaccaaaaaatttttttttttttttgcctttttaaaaccgaaaaaggaaaaatattttaaatttttgccttaatctggccaaaatttgaaaaaaatagatttattaattaattctaaaacttacgagctcatcaacgtcctttggtgcttcaaaatttgtccatttttgtgtcgttgtgcccaaatcgatgccatttaatggcagtgaaatttggcccaaactttaaaaaaaaaattcaaaaataatttttaaattttattttatttttaaaaataaattaccgatcatctttgctaagccgatcaaaatcataggcaacaatttccaacgttttgcccaataattcggaatacggaagctaaaattttaatagaaatttaaatttgtaaaatgtttatttgactctttttttgaaatatttcatcaattataatagattgtataaaataatttatattaatttaataaaaattaataaatatatgaattgaaaacgaaaagtgacaaaaatttcaaaaaattttttttaattaaaaatgtttttgatctgagatactaatttggcaattgccgagatttcttaacaaaaaatgcccttaacttgagcaaattatttatttaatttatttttatttattaaaactcactttgaagatgaatgtctcattaaaaacctgacaaaataaaaaattttttaaaaaatttaaaaattcaaattcaaaaattcaccgggtccaaagtgttccgtttgattcgtgtttcaaactttggctttctgtctggcaaaattgttactttgatgtacgggtcactaaaaaaacaaaaaattttttagaaaattcatcaaaaatgccatttttgcctcattccgttacggtccatggctggcaaatttttgcactccaaaatggtgaccatcaactaaattcattttctgtcattaaaaaattagaacaagaaaacatgattggtaaaattaaggacagttgattaaaaataaggacatttaaaggacttggccttttcagagtcggggacaaatagggaggggctcagccgtttgggccaaaaccaaaaaattgtttttttttaaacttttaaatttttgaaaaaattcctttttccaccattgagaatcgttccaaaaaaagaaaacatcattggtcgaaaaataaggacccgctaactaaaaataagaaggacattcaaggactttttattccattttagatgctcgagaatcgaaatatgcaacagttttttggatttcattttattatcgaattttcttggtattgaagtcttgatttccgatgcctttttaggcctttaaaatcgaaaattccccaaaatt

SEQ ID NO: 2564 - DNA, 2132 bp, Heterodera glycines
cgagggtcggtacttacccctagctttcaaatccttctgtttatttttattttttaaataaataatttcaaaaattttgtttaagtagaaaattttcaagaccatgaccccgaaaaatgagaaatttctcgagtcaaaaatctcgaaacccgaaaattctcgaacagcctatgatttttttaaaaatttttttccacctcatccattggtgttgaatgcttccgcgaagacggactctgctgtgagtatgggagacagaagcggaaaatgcgaaacagtgcatttttgccgcacaccgttgtcataaaaccgccaccaacgcggccggcggaagagccggacacagtgccaaacatttgttttttaaataaatttttgaataaaaattgaaaccctaaaaatccaaaaataataaattgttcatacatatttaaaaatataggttaattcggataaatttgaaatttaaaaaaaacggattcaagtgagccaacagacgggaggtgagaaaatatttttaaaatttcgaaaaattttgaccaaccctcgaaaaaatttaattaatttttgaaaattgaaattgtaaccagcgatttagggggcaatgttaattgaaggaattttcaataaaaaaaaaatctaaaaaatagatagaaaaatttaaaaaaatttaagaaaaatttttttgtttttttttcttacctaattaaacatttctttgaaatatttaattatttttttcaaaaagaaatcaggcacgaattcacgaacaaaataaagtttttttttgacattaggagaggcgcgtgtgtaacctaatggcacaaaatgccaagaatgtttagcgaaaacaaatgcggaggatagggagacgggcactttccctagcagagagaatttcaaaaaaaaaaatggaacggaatgccacacgcatacacaaataagcgaactctctctctttttctgatgggttgggttgaaaatgccattcaatataaaaggtataattaaatataaaaatatatatttatacatggagtttaggactcccgaattttttgtgggccattttgatttcggggaggagagagtggattgaaaatgaatttttggaattttttgaaaatcgaagaaattgaatttaaaaaattttctaaaatattcggaaattcggagacgatacaaaaaattgaaaaaaatttggaaaaaaatattgggaaattcggagacagtcaggcggcataaaaaataaaaaaattggggaaaaaaaaattcaaagacgacgaggcataaaaaatttggcaaaattttaaaaattcggagaaggcgaggaacaaacaatttttgtaaaaagctaataattcactttttaagcaaaaaacatgaaaaaaagagatgcaaaaatttaattgttgctgaaaaatgtatttgtaagaaaaaggagcggaaaataatttatttaagtgatgctcaaatggggggtatttgagcagccaccaaatttattggttgaacaaaatgtcctcaaatttctaagtaaaatttctttaatttatttttctaaattttttgactgtaaatttaggaaaatttgaaaaacttaaaatattttctatattatttagataaaattgatgggaaatttaaatactttatatttaaaattttattaattatttttttacatttttattggtaaacttctatgtcaaatttcgagaaaatatttagacaaacaaaagaaattgtgtttaaaaaaatttcagtaaaattaatgcattttttaaacataaacgacaaaaaaagcaaaaattaatttaaaaacatttaaaaaccaattaattcccaagagaaatttaaaaaattaaattcaaaaattaccaagaagttttctttcttcaaaaaatttaatttaattcatttttttattaacaggtttccaaaaattaaatgaatattttcataaacaaaaattgaatttctgttaaataaatttaattatttaaatttaatttaattcatttttaattttttgttttacttttcccaaaattaaaacaaacatttacacaaataaattcattcaatttcatttaaaaataatttattttttatttaaacatctttcaaaa

SEQ ID NO: 2565 - DNA, 2432 bp, Heterodera glycines
aaaacgacccattttgccaaaggaacgtttttttcccccgttttatccgctccaattttttcaaattttttggtttcattcaggaaaaaaaagggaatatttgctttttttggctttaaagcgtgacattaaaaaatcggaacagataaaaaaaatgacacattttgccaaaagaaagcacaaaaatgggaatttttttcctttttatccgctccaatcttttcaaatttttggattcattcaggaaaaaaaattctttgcttttttgttggcttctctgcggcatttaaaccggattggattaaaaaatgacattttgccaaaagaatgtacaaaaatttgatttttccttttttgtccgctgcaaattttccaatttttggactcattaatttaatcggccggcatttatctgctgatgaaaggggcaattaattaatggcttcttagaaatgctaacagtaaacacacccacacgaattcgttttgcgcaccgggaaaaagagaagaaagacattttggagttattaaaaaatgggaaaaaaggtaaaaatcgaattttaaaaaaagcggaattttgcagaaaaaaaaacgattactttttttaacacttgcaaaactttaaatttcagaatttaaaaaaaggaaaaagttttattaaaaaaacaattagctaaatcgtttttattaaagaaacaaatctttttttcatggatttaatagttttaaaatttttctcatttttttaatttcaaaaataaaaataaatgccctaatttaatggtaattatagtaattattgaaggtaagaaatgattttccttatattaaatgttgatgtattttatttatttaaaaaaatggaaaaattcacgtataaaattttttttccaattaaaaaataaaaataaatgccctaatttaatggtaattatagtaattattagggcggggatttatatggacataaaatcgagaaatatggccataaaatatggaccaaaagtcgcgaaatatggacataattttttccaacttaagggtataatttctcaaaagttctttaaatttttaaatataaagtaaaaccttcaaaaatggctaaatatggtattaaaatcattttagaagaaaaaaacatgataaagctaaaatttactaatttttagcgcaaaatcaaccacaaaagcgaaattttcgcttttttgcttatttttgatataaatttattaatttttaagaaaatttaaatttattcaatattctcgagaaattttggcgaaaaaatgattttttgaaaaatttttcggtttttgggctcaaaaaggataatttagctgctggggccgttctaatagaggtttttttgaaaaatgccaaaatatggacataaaatatggataaaaatgccaaaatatggaccaatatggaaatatggacataaatcgcgaaatatggaaaaatatggatatagaaatccatcctagaagctccaaaccaagctaaaaacatgttttcgtgcgtttcaggccccctacagtctaggaaaaaaatatggatttccatataattccccgccctaatgatgatgatgttattttgctcccaaatttacacaaaattggcaaacaaatgcaaattattataagtaaataaaaatggaaaaaaaacatccccgcggggatgggactttcgtcgaacggcggacaattggaattttgtcgaggacaaaacgattgacggtgaattgttgctggagaatggtgggcgcagcacagacagatgacaaacaatttggcagcaatacataacaaaataatcaggggacagaagactaagaaaaggacaacgaaatgtcctaaaaaaaatcaatgagactgaattggaagttgaacagaatgggaaatcggctcttatgcagtttaaccagggctgccatatcctgaggctttagcctcattttgtggttttttgataggtcaatgaggctaaattttcaaaatgaggctttgaggctttttgtggttttttgagaaattttgaggctttttgtggttttttgagaaattttgaggctttttgtggttttttgagaaattttgaggctttttgtggttttttgagaaattttgaggctttttgtggttttttgagaaattttgaggctttttgtcgttttttgagaaattttgaggctttttgtggttttctgagaaattttgaggctttttgtggttttttgagaaattttgaggctttttgtggttttttgagaaaaaccgcaaaataaagaattttttaatgaaaatatggtaaaaattcttaatttttcccccggcggcgcctgtcggcaccgccggaccgtaaaaatccttaatttacaagcaactaatttgcttagaatcccaaaatttggacattttccggacaat

SEQ ID NO: 2566 - DNA, 3352 bp, Heterodera glycines
  unsure (1)..(3352): unsure at all n locations
aaataaaattaagcttttacagagcgcaggtcggttgagtcncgcgcacaanctgagtcnctgttgtgaattttgaactcatttttttgcggggggcgggggtggtactgaaaaatgaggcataaaaattataaaattaaaggacaaaaaggagctttttggtcttatcgtcattttattcagtcaaaaaaagactggctttttgtaagtccttgaatggtcctgaactgtacttgaaaatcagaaaatatgtaagtccttgcattgttttgaaccagttttatagtcagtccttgaatggtttttagtcagtccttgaattactttttgtatgtcattgaattttctttatctacatttgaaaatcagttagtccttgaatggccttttgtaagtccttgaatggtcttgaactatgcttaaaacaactctttgttctgtagattaaaaaataattgcttttttgaaatcaaattatagaaaatgccgttggaaaatcgtttttaaatttggtttgaatttgtcggcacagaaaaaagttatgacggattaaaaaaagataaatgtgaaataaaaagtaattaaagtggtcccattaaaattattcatttaattgattttgcacgctaacaatgatgatattcaattgttgaaacgtaaatttaatttttaatttaatttaatgacaataaaaaatcggtacaaaattaattaaatttgttgataaatgaatgatgcattttgttaatatgccattgaaaatgaacaaaaaaaaatgaattatttatatgcaattaattgtgtgctttaaaaaaacaaaaaaataaatgtcaaattaaatattacaaaaaaaacccataaaaaataatagggcccggattttgtgaattaaaaattcataatttttggtcaaacaaaactttgacacataataatggccgagattcacaagaggtatctttgtgtatttttgaatttttgttaagtatatatatatattttcaaatcaaaatttccaaaaaaaaaaaaacccaggttccctaacaatccctcaattttttcacattcgcaagtgtgaaaatttttttttttgtgtcttgacaagaaaaattaataaaaaattcgctattttttaaattttcgcacatttttcatgtaatttcaaatacgacagggcttatgacttttttttaatttaaaaatcccgaaaaaattttcaacaactctcgccatgcaaaaaaatgatgatgctgtgagattgatgcttgaataatgatgacggaggatggggggagggagggattggaggataggaatttgttatgcgagaaaagtcaggagggcctgggcggcacattggcattggcacggaacaaaaaaaaaaggattggccaaatgatgcggtagtgccaaaaaaagggacgcgtgaaaaaatgtactaagcacacagcggaaggaatttttggcaaaattatgaatttttaaatatggtgatgagttttgtgttttacaacacccaaggaaaaaaaataaggaaaattttagtttttcattaaattttagggagttgaaaaatttaataatttttaatagttataagttattaaaaagatacaattttaagatttttttaaaattggtttttttattttttaaatggagaaaaaaataaaaaattcgttttcggaaaactttagagcgaatttttgttattttttgataaattttttgtaatctctaatttgttaattcgccccttaaaattaaatttaataattttaatttaaatataacttttaaaaattaaatgtgtaatgaaataataaaactatttattgtacaatacataattaattagttatttttgtggtgtctacaaaaaacggaagaataaatccaattttaaaaaaaataaaattttatgaaaagcaaattaagaaaaaaaaaagtaagaggaaggaaatgaatgaatatgaagtgatggaagaagaatgaatgaattaaaaatgaataacatgcaaattaggggaaggaattgttaattttttgtttgttttttttcttagaaatgcgcgattattattttttattttggattttttttactttaaaattgaaaattttatttataaatataataaaaatgcaaaaattgttttatttggagtcgaaagttcaacaaagtttgtttgttttttttatttcttagaaaatttgaaaaaaaaacttcgttaactgaaatactttttttttgaatttataattatcgaaaaatttaaaaatttatttattttaaattcaatattattattattttttgaatttataattatcaaaaaatttaaaaatttatttatttattttaatttcaatattatttttttttttggttaggattagtgatttttgttgtcaatattaacaaaaatactcatctccatattaaaaaatgaaaaccctttaaaataaaaatttcatattgctttcaaaattcgaataatgcaaattttttgaattaaaatttattaaaacaataaaatttaaaaatgggagatttttattgttttctgtgcatttaaatgcattagaaaattttgaaatggccttaaaataaaaaattttattgaggaggggaatggaaatcattattagttttatcgacgacgcatcagcggaacgataaaacaaatattttttttcgataagcctctcaattcttatgttttaattattattataatttaattgcgtagcaaaatggaattaattagaaacaaaaaggttttttgtggctaatttataaaaaaaaatcgggaaatttttaattaaagagaatattttcttattaattttgatttgtatgattttgaagaaaaagaaaaaaaagcgtttttaaattttataacttttttcaattctttgaaatattttggcattatatacccttttcgaactaggttgaaaaataatctcccgtctctatttatctcaccggggggataaatagaatttttttttttggaaaaatatcttcgatttttataaaaattaattaattctaaattggaatttgtttcgagtttcatttttaaactttcttcaaaaaagagataaaaaagacctcttgtaatttaaaaatttcggattttctagtattttaatttgtgaaagttcactttcaaaaaacggcgttctgaattttttctgaaaaatcgcaaaattccaaatatatggaaataaaattctaccaattttcttcattttaagctttattccactaacattgtccaaccctgaagtgaattttgagttccaaaaatttgcataaatttcccgggctcaaaaaagaaaa

SEQ ID NO: 2567 - DNA, 1816 bp, Heterodera glycines
tttttcattttttttatttaggacgattttaattcagaaaaaattgtgtttttattatttaaatatttaataaaaatatataatttttgcatgggagacgaataactctttctccagtctaattcggcatttatactaacaaaaaattttttttgtttcactaaaggcatcatttccgctgccatgtgttgtgggtatgtgtggaattggcattttttcatttaaaattggcactcttttttatgcatgtacttggcattggcattttgaggggggggggggggacatgaaaacgaatatttccatatattgtgccattttgtttgtgggcttggccttctaaatttcacgccccgtctctgctgtttttgactttctcctccccaccccctcccctcgggcgctaaaaaaatccaatttcgccaatttgtgaatgtgccgatgccgtcgtcgcctatttgctgcagcacattcaatttggcacaaataaatggaaaaaaaaattggttcccttttattggcacaataaataaattagcggcggcggcggggtgccgtgccgacgacggcagaccccagcagaaagtttgcaaaaacagcaacatgaaaaaaatgaactagacttccccaatttttgtaaatttttttaacctagccgaacccctggggcctgttgaagaaaatcatgaaaaatttatatttgtgtgcgtgctgttgacttatttttcgtgcttttttgtggtgtcatgggtgttccgtataacgaatgagtttcgtacaaacagttttttgaggattttcaaaagagaaaaataaaaaaaatttttttttcaattagttttttttttttggtttttcgacatagattgaaaattatttgatttttttttttgtaaaaattctaagttttaattgaaattctttatcttttctttgtaattatttaagctttttctagttttgaaaattgattctgatttttttttgagaaaaaattctaacttttaacttaaaattaaaaaaaaaaaaattttttactaactgctattgaattgttttttatgtgccccctatttataggatttttttttgtgtatccttcagaaatccttcatttataaaaaaacctattttatggcgttttgtcctacatttatgaacaaaaaaacgtaattatggtaaaatatagcaaaaacgaaaaaacaaagaattgaatcatccatcgattcttcgttcgcactttcttcaaaaaacacaacgccgcaccgcctgcacaaagtcgtgatggcatttctgccgttcggcatttgttgccgccctgaatattaagtgtggcaattaataattagaattattgtaattagaggagtggcctggtggggcaaaaaaaaaattttttatcaaaaaatgcccaagacgaatgtgccgaaccacacaaaaatcttggtcttgacataataataacgcatgcaatacgttcacgctataaaaaaaatttttttttttcaaacagaaatagttaaaataaataaaactttatgaaaatttcgagggaaaaatttttttgaaaattttttccagaaaacacacggaaaataacattttttaaaaatttctaattaaaaatttttctagattagaatttaaaaaatatatacaaaaactcacttaaacaaattgtgccggtaggtcacgttcaactcactcaattcgttcagaatcgcatgaactggaaaaatttaaaattaaatatggtttttagtagagatcgacatttaaaaaaaagcctgaacctggattttttgaaatttatttt

SEQ ID NO: 2568 - DNA, 2180 bp, Heterodera glycines
tcaaaaatcggtttgaaaaaattaattaatttgcttagaagcatctaaaaatatctaataaataataataatgtgtttttaaatttatttaatctgtttttgaaaacttgaaaaaacatcggtcacttgaaaaaataaattctaaaattttgtccaggtaaatccaggttttttcctgttttgcctggacctggatttttttttcacatttgacctggaccttgatttcctggacaaaaaaccaggttgtcgaaaaatggcctggacctggacctggatccaggtccaggccgagctctagtttttagtgttcctaaaatttctaaaaaaaaattaattttttttagtccatttgtccggatcccgtcgcccagacaatccgtcagtggaaaattcgtcagtaatggacaatccgtagcagattttttttagcaatgattaaaaatcttgggattgttcaatctaataaaaaaaaatagatgggattttacaagatttctagttaattaataattcaatttttcataaaataattttaaaaataaaatcccgggtctcgccgccgaaacgtcgccgggacaaaacgccgcgcgcggcaaaaaaaaataaataaaattttttcaaaaattttaagaaaatttttttgaagattttttttttgaaaacttaggtgttactgaaaataaatttcaacaaaaagaaaacttgatttttttcccttttattattagtcgatttttttctaatttggctagataacttaaaattgctggtatttttttgaattctttttcaaactttaaaaaaataataaaaaaaatttttgcgtcgacattttgtccggcgacgcttcggcgctgcgacattttgtcctgctcccgtctgtccccaccaccttggtaccgtccctgtgtcctactgtaccgcccgcccccgttccttaccgtaatttgttttggcaccaccatcactacggtagttcttgcttttgtgaccagtgtcgttgatggcacggttcacataaaagtgcatcatgtgctgtgcccggtattgttgttgggccccgccggtggtccacaaatgcatggcgaacagcagcacatcgcggaaacggaaattggtcgggaaaagcgctacaaacaacaacacacagaacatggaaatgaaaaaaaaatgtttaaggaaaaaacaaaaaatggaaaaatcagttttttccaacaaatttctgattcgaagaaaaaattttccaacgattttttggaaatttttttgagaaaacttagtaattcatcattaaattttgaaaaattgttggaaaattttttgaaagttttttttttcttagaatcctaagaaaaatttttctatgatttttttcttgaaatttctaacatttattcccggttgtatctgatttccgaaaattttcggggtctcggaatgccatccctggtctgcgcccgctgggagactcaccgtgggactgaagccgcttccgaacgcgatcattaggctggtgaagcggtggttcttcagcaacgagactccttcaaaaatacaaattagtaaaaaaaaaaaagaaaaatggaatgtcgcgtaaatttttagtttttcccgtttcataaaatttctcttctttaacagtgtgtgttttttttctcgatttgggcaaaattttactaaaaactgcctcgaccactcgttggatttatatataaaaaaattgctgaaaaatgtttaaaaatatgctcccccttgaaattttgtgttgaaaaaaatgcataagatttttttttgaaaaaggttgaaatatttttttttaatttcgagagcaggaggtggggatgggaaccacccctcttttccaagacaatttttttcctgaaaattttttagttttattaccctccgaagcgtcaataccaaggtttttttgtaaaatttttttcattgatttttgaaagttttcgaaatttttttttcatgaaattttcttataaaaattctaagattttttcttgaaaaaatttcaaagttaattttatttcggcggcgaaaattttgtcctgctccagacgggaagcatcattcttctcagagacagattttcagaaaaaattcgttttatttttcaaattacccaccctccgtagcgccaaatttggtcggccgccacaaag

SEQ ID NO: 2569 - DNA, 5900 bp, Heterodera glycines
  unsure (1)..(5900): unsure at all n locations
catttttaggtagaaaagtgcagaaataagagaaagaagacacaatttgtaaattattaaggagtggaagttgcattttaaaaagtgcacgaacttgtcatttttaggtagaaaaatgcataattaaggagtgaaaatgcatgcagaattaagcaatggaagttacaatttgtaaattattaagcatttgggaacgtcatttttaggtagaaaagtgcagaattaagcgaaagaagacacaatttgtaaattattaaggaatagaagatacaatttaacaaaaattaagaaaaataatgattaaatgaaggaattactcaaaacatgtgcgtgtgtatgcgtatgtatgcatgtgcgcgtgtgtgcgtgtgtgcgtgtctatgcgtgtgcgtatgtgtgtgtattgtatgttttttcgagggtgaggataagtgtgtttgaaagttctgcataatatttattaacttatataaaacttgttaattttaatcataaacacaaacaatgctccttgcctaattcaacgtaaaataaattctaattataataaggaacatttacaattccattgaataagtaatattcaaaggaaacaagagaaatagacaattttgaatctaagattgaaccgagaatagaaagtagttttgacaaacagctgactgactgtatgtgacgagaaagggtagataagggctaaatgtatgcgtgaagcaggtcttgtaataggaataaatgaagaaatcatatgaggatattgtagtgcaccatagaatcaaggacaattaataatgggtgtaagagatagagatagagaactcagaaatgtggttgaagagagtcaatattaaatagtgagaatttaatgtgagttagtaaggcaaacattaggtaatgtatagggaagagaatagtttgataaagaacaagaatacgaacacttggaagataacggttcgagaataaaacatagtgttggaagaaaagatattgaaaaatagctaacggaaacgattatttagacaatatgtaggtctgaaataacagtgaaagtaagcagatataagagtagagaaagtgtattacggagaaaaggaaaataattcaaataaccccaataccaaaaatatcttaaatattggattttgttaagcaagcagttggcgttagcctctttccatttgttccttttagaggaatcgatttacaggataagatgacgccgtgacctcacccccctctccttcacttatttggtttcctcagctctgcccttcctctccaacacatattcggtcattattgctccttaccatcgcaaactcagtttacacactcccttttccatcctatgcgttttgccaaatcaataggaaaggtatattttattctcatataaattttagaccacgaggataacaatttgcataaaaataaaaattcatagtcaaaagaatgaagttttcagtgttccggagatcagagccttgcgaggtattggttactggcgggccaagcttaattaggtattggctaccggagagccgagccttgtgaggtattggttactggcgggccaagcttaattaggtattggctaccggagagccgagccttgcgaggtattggttactggcggaccaagcttaattaggtattggctaccggagagccgagccttgtgaggtattggttactggcgggccaagcttaattaggtattggctaccggagagccgagccttgtgaggtattggtgaccggagggccgagcttaattaggtactgactaccggagagccgagtattggctaccgaaaattcatcttttattattttccttgtttttatacatttctaaaatccttgcggctgtaataattagttacttacttaaaaaacgtttatcgctacccaaaaagttgcattctttttcagatattttagaattaattgccatatttcctagccatcaataccataactaagttaatctgtcaacaattatcatactcatttagtgttcatcatttcctttgtctcagcttcaagtattctgcttcattgaattacagcaaaaatgtggcatataatttaagttccatcataacccttctttccccagaaatattcagtttgtaaaaattaaagaataattggttataattataattaatgcagatgtcataccctattagcaattggagtattttagcatgggattcgaccataccaaaacacaaatgtaaaacatctcgatcaaaactttgttaataattttctcgcattttaatgattaattggttcttaattaaattacccaaaaattgatttaacaactgtcactattaattaaaattctttgattttttcatacttcccacttataatatgttcaatgcttcatcattaaattcatcaattactacaccttctcatctaaaaacaatggtatatagatagtgattagttgtgaatcatatatcatgtcgttacaaactgacactaattagaccttatggttgtcgaggactcattattcacaagcatatactagaaaccattcttggtaatttgtcataattaatcacataagtttgaagagtctcacccaaacgataaacttcctatgtaaaatcatcccaataaaaaataattaattcataaatttcccaaatttaataattggatgttaggagctgatagttagttaaacttacaccaaaccgtttcaaggaagataattaaaaatgacagttggtcaatgagacaattagcccactacaccgctactcaccattattggtaatttgtcataaatcattaatattatttctcacccatgccataaaattcctccgtaaaatcattttgacaaaaaaatgttattaatttctcaccatttaatgattaattgcttcttaattaatattacccaataattaacaactcgtaatcattgattataatccttgattactttcagatttccctataatattaaatgtttcctcattaaattccatcaaatacccctgccttcttctcactgaagaaaaggccagatggctaagccaatagtagtaagtggcccgtgaccgacgccgcctgtcactcctaattaatgtcaaacacgccacctgtcacttctaattagttatttttttcaattagacattaatatacatcttctaggtagcgctaattgcaggcatgctaaacatatccgcttacttctattgcagttctctctgtttccaactattcatccacagaataatgatcaatttgccaagtgttcagttgaaaagttattgatctagaaatatcgcatacaggccgtatactagtcatacattcctttagtacatcaatggatactaaaagacgctgcctttccttaataatgccttagttcctttgagacatcaaataattccctcctaaacgataccagcgctgtcattaaaattttgaatgtcattacattttttctcattaattgcctctgtaaatacaaattttccagttgagaagatagttgtggtagaatttgtacctagacccttcattatatttgaaagatttatgtggttgtttttagtggatggggatattaaataaattgaggagaaaagttttactatttattgtcagtaacaccataaattgaatttaattttagatataatttacttaattttaatcaatactattgtatttattatttttattatattttaatacaactttaatttaatttttttattttatttttatttaacttttatttttaattttaatcttttttatttttattttactttttatttgaattaatttgaattttattttactttatttattattcagttaatttaaaggagttgttcagaacctctatccaataaaggctatttcgccgctcagcacggcataaaaggtattttaaccgtgcaccgtttagcattgtatgatatcctcactattttcaatatttttacttgtttttattgtttatttctttgaaatttctattaatattttacttttgtagtgtttaatgcaatcaaagaacattttaacttgaaatttttaacaaaatgaacttaataaaatattagtagttaattattgtaaaatataatttattaataaataagtttaattcatttattaaaatctaaaaataatgataagaatatatgtatacttcatattatatatcattttattaattaattttcaatataaaatttctttcttccatcattaaaatgtttttgcttagtaataagtaaaaaattccaatgcacgctacccctctccgcctcccatctgatatgaaattcttaacgcttttttcttaattattattatttttttcatttatttccttatttttagctatcatcaccattattattattttactaaatttattttaatatttattttttctacaactcttcatctcttcattaggcttgggttatgacacaagtaccatttgccacccctccagtcgccacatgtcaccacacccctcaaataagttttgggttatacgaccacaatttggcaggttgccaactaaattgttcatgctatgccacactacactaaaatgagtcgccgtatgaccaacattttatgccatccacggtcagtcattagcgcttaaatgaccaccagcgggcactcagatagcccatgcgggcgcttaggtgacacgtgcgagcgctcaggtggcctggcatcccttccctccccaaaggccacgacagttgatgtccgtccctccaatacgatttgactttaataattatttaattaattaattttatatttcatttatttttaaatttttatctattattttaattttattttaatttatttaatttacctaattttaatttaatttattttattttaaatttaatttgaattaaatttaattttttaattaaatttaattttttaattaatttattattattattatttatatttttgtgtggtattagagagagcaagaaaaaagagagaaaagaaagaaagagagtgagagagagaaagaaaaaagagagagagtgagagagagataagagagagtgagagagaaagaaagaaaaaaaagagtgggggagagaagaagaaaaggagggggggagaaaggaaaagaaagaaaggggagtgcggggagaaaaagggggggggggaaagaaaaggggggggggaaaaggggggttttgggggggaaagaaaaaaaaaggggggggaaaaaaaaaaggggtttaaaaaaaaatggggggggggggaaaaaaaaaaagaggggggggggaaaaaagggtttttttgggggagaaaaaaaaaaaaaggggggggggggagaggaaaaaaaaaaaaaaagaggggggggggggggggaaaaaaaaaaaaagggggggggggagagaaaaaaaagaggtttttttttttgagggggggggagaaaaaaaaaaaaaaaaaaaaagatgggggggggggagaaaaaaacaaaaaaaaaaaaaataaaaaagaaaaaaaaaaaaaaataatttttttttttcttttttttttttttttttttttttttttttttataaaaaaaaataaaaaaaaaaaaaaaaaaaaaaaaaaaaaaaaaaaattctgtccccaccggccccgcgggggggagcggggggggggggggggggggggcgccccccgggggggcccgtggggtggttttttttttttttttttttttttttttttttttttttttttgtgtgggggggggggccccccccccccccccccccccccccccccccccccctcccccccccccccttcccntaaaaaaanaaaaaaaaaaaaaaaaaaataaa

SEQ ID NO: 2570 - DNA, 5692 bp, Heterodera glycines
taagttttgggttatacgcccaccatttggcaggttgccaactaaattgttcatgctatgccacactacactaaaatgagtcgccgtatgaccaacattttatgtcatccacggtcagtcattagcgcttaaatgaccaccagcgggcgctcagatagcccatgcgggcgcttaggtgacacgtgcgagcgctcaggtggcctggcatcccttccctccccaaaggccacgacagctgatgtccgtccctccaatacgatttgactttaataattatttaattaattaattttatattttttcatttatttttaaatttttatctattattttaattttattttaatttatttatttacctaattttaatttattttatttttaatttaatttgaattaatttaatttaattttttaattaatttattattattattattatttatatttttgtgtggtattagagagagcaagagaaaagagagagagtgagagagaagagagaatgagagagagagagagaaagaaaaaagagagagagtgagagagagataagagagagaaagaaaaaagagagagagtgagagagagataagagagagtgagagagagagagaaaagaaagaaagagagtgagagagagaaagaaaagagaaagagagaaagagagagagataagagagagtgagagagagagaaagaaaagaaagaaagagagtgagagagagaaaaaaaagagagagagagaaagaaaagagagagagagaaaagagagatataagagagagaaagaaaaaagaaagagagtgagagagagagagtgagataagagagaatgagagagagagagaaagaaaagagagagagagagaaaagagagatataagagagagaaagaaaaaagagagagagtgagagagagataagagagagagtgagagagagaaagaaaaaagagagagagagagaaaagagagatataagagagagagagaaagaaaaaagaaagatagtgagagagacagaagagatatagagagaatgaatattagcttttttattcaattattttttaaattataaaaaattttttttttaatttatttattttaatttataatttattttattttaatttaatttattttttaatcttttttttttatttattttttttatttcaattaatttgaactttaacttttatttaattttaatcctattttaatctaatttcatttattaatttaatataattttagttttatcaactttaattctaattcatttaactcgaattttatttttagcgctcaaatttaacaagtgggctcacaaaaggcccctgcgtgcgctcagatggcacgcgcgagcgctcaaatggtccctacgtgcgctcaaatagcatacgcgagcgcttaaatggcacacacgcgagcgctcaggtggcatgcgtcccttccctataaggcatgacagctgacgcctatcctctgcctccctttccttctctaataggatttgacctcgggttttatccttcagatgttttttcaattatttacctcttctgggattggatatatttattataggtgttttttaaaggtttaaatttggtactgaaatgtccctttccagtgggactgaaatggcggggctgaaaattaagggccaaaatctggtggggtaactactaaaaaagatggattatttgcttttatcaggtaaaaaaggaaacttaaataattaattaacaatgttttaatgcactgtcaaaaaaagtatcaataaaatgatttttattattttaaaacaataaatctaaattttaaataagccagaagaaatagaaaataaatgagatgaataaaataattaatttcaattattatttattagaattaattatttgaaataaaaatctcgtccgtcaacaaagaatcacagtgaatgcatgaatacaagagattatttatgattaattcataataaatttttttttggtttttataaaatgttaaaaaatgattttaaaaggaatatagtaatatttaaaaacacttttaaatataagaaaatttagaaaaattctctaatttggtaatgattttccaacaaaataaaacttattcatattttacgatgcaaagcgtctccatctaatattaaagtgaaaacactgaacttttacgagccatgagataaaataattaaaccaaaaaactggtaaaaattaattgttttcaaatgaaaaatgaaaaaataaattaccaatttttaaaaaaaaataaaaaatatattattatccagagtttcgatctcaaaattttgataattctcatttcatccataaaaaagcctcatttggaatgaaaatcttcattttttaaaacatcataaaattgcgaacaaaatcagtcaactgtcatatttttcgtttgaaacaaccaaattcatcaatttcttgtcatttataacagggttgccgcgggtccaaaaaatatcgggtaggtttcgggacgagaaaaattttctgcgtcgcgcttttttactcgattttccaaaaattttggggaaccggtggccggcggtgccgataggcgacccgggaaaaatttttgtaatttataatatgatttgttaacagattttgcccaaaaaacagttatttccaatttttggcaactttttttagcaactattttgggaatttatcagctttttagcaactatctaggcaaatatttcgcgatttttagaaactaaaaatctatttttttttgtataaaaaacaaaattttttatttgtatttaattaaaacatggcttctgtttcattattattgacgaaatgttttaatttgattatttcgtttaattaaattaaaaataccatagcatttttttgtagacttatgtttctttaatttcactcatttttcttttgttatttatttttttcgtatttattcaagctattttctagttcttaatactttttgttgctaattaatatttaaaagttattttgattggtttttttaaaacttttactaaattgtttttaacggaattgaacattagtgcctattttaaccattattgtcaacttcactcgatggtaaaaaggcgaaataatttaatgttttaattataaaaaaattaaatttacattattcttttcttttaaataaaactttgtaacaattattacagggaaagatatttaattgaaaaataattattatttttatcttaccttcgttatatatagtcaaatcaaaatttcctaatacacaaaaagataataaaatgccgtagccgaaggggaccgattatgctataatccacaggacggcattgtgctcgaggaatggcaagaaaaagcgcttaaaattcatcaaatgtgtaaccgtcatttataaatgcaaacccaatctaatttgcaacgaaataatgttttagactgcattcgcacttttttatttgcctgtttttttcttcttgatatatggcacaatcggtcccttttggcgatggcattttattatctttttgtgtagtttactgaccatgagaataacaattattaaaaaataataaatattaaaattattatagcacttctacataagttattaaaaaaacttaaatttgatttttatatagaactgattaggaaataattataatacaaattaatataattaatattttaaaaatataatattctatgaaaattatattcaaatgttaaacaaagaaataataaattctataaatttatagatagatattatattattatatgatttctagaatgaacatttactaaaattctgagatgttgaaaacactttatatattaataaaaaagatggattatttgcttttatcaggtaaaaaaggaaacttaaataattaattaacaatgttttaatgcactgtcaaaaaaagtatcaataaaatgatttttattattttaaaacaataaatctaaattttaaataagccagaagaaatagaaaataaatgagatgaataaaataattaatttcaattattatttattagaattaattatttgaaataaaaatctcgtccgtcaacaaagaatcacagtgaatgcatgaatacaagagattatttatgattaattcataataaatttttttttggtttttataaaatgttaaaaaatgattttaaaaggaatatagtaatatttaaaaacacttttaaatataagaaaatttagaaaaattctctaatttggtaatgattttccaacaaaataaaacttattcatattttacgatgcaaagcgtctccatctaatattaaagtgaaaacactgaactttacgagccatgagataaaataattaaaccaaaaactggtacaaattattgttttcaaatgaaaaatgaaaaaataaattaccaattttaaaaaaaaataaaaaatatattattatccagggtttcgatctcaaaattttgataatcctcatttcatccataaaaaatcctcgtttggaatgaaaatcttcatttttaaaacatcataaaattgcgaacaaaatcagtcaactgcatatttttcgtttgaaacaatcaaattcatcaatttcttgtcatttataacagggttgccgcgggtccaaaaaatatcgggtaggtttcgggacgagaaaaattttctgcgtcgcgcttttttactcgttttttccaaaaattttggggaaccgggggccggcggtgccgataggcgacccgggaaaaatttttgtaatttataatacgatttgttaacagattttgcccaaaaaacagttatttccaatttttggcaactttttttagcaactattttggggatttatcagttttttagcaactatctaggcaaaaattttgcgatttttagaaactaaaaatctattttttttgtataaaattatctaaatgaaatacctaataaaaatttattgcaaaatgaggatttttcgaaaaaatgtttaagatttgaagaaaaagttaaaacattttgccaaatatgcctaattttcaaaaaaatcatatcgtttttgtcactgttttatcaaaagaccacaaaaatactcaaatttctcaaaagaccacaaaaatccgcaaatcctcattttccaaaaaaatcctctttgaccctctaaaagaccacaaaatgaggaaaaatcctcagatatcgaaaccctgttattatcagcataaaaaaacttaattcttcaaatgagctatttattaaatagaaggaaatatttatttatattattaataatttatgcattaaaaaaagaagaccagaaatattcatttactatttttggaaagaattttttaaatatttcaaagtgtttacgctcactagtgatagcataattaaaaaaaaaaattattttacaatatatatttttggttttctttttatactttcaattttgtattaatattttattaaatttttgttacaataaattttgtttttattatcacatcgggatcaatggctaaataaaatatctactgctttcattttttaatatacttattcgtaccaaaagagatttttccgctatattgataatattttatttgactattaaaagcgacattcagtaaaataattatttatatgaaattttttcaaa

SEQ ID NO: 2571 - DNA, 1292 bp, Heterodera glycines
  unsure (1)..(1292): unsure at all n locations
aagaggtacacagtgatcagaagaggtacagcggtgattaaaagaggtacaacagtgattaaaagaggtacaaaagtgattaaaagaggtacaaaagtgattaaaagaggtacaaaagtgataaaaagaggtacaactgtgatcagaagaggtacaactgtgataaaaagaggtacaacagtgattagtaaattcattaaattaaaatgaaaatattttttaacaaatttaattaaaaaaatacatgaaattctatcaattaaaaaaaattaatttaaacttataaaatttattcatcaaaaaaaaattaatttaaatataattttttatttattaactcaacaaaatgaaacgtccgattttgtgttagtaggcgaaatgaatgtttttgggattgatctattcatgacgcatcaaagataaatttcccatttttaaaccatcaatttaacatttccttttacaggtttaacacaaaaaattattccagtatttttgtcttaataattgtctgatcactagggcatccaaaaatatggatataaaatcgcgaaatacggccataaaatatggaccaaaaatcacaaaatatggacataaaatagcaaaaacatggacataaatttcccgaaatgaggggcaaattttcaatttttcaaaattcattaaattcaaataaaatacatttaaaatggctgaatatataactcgttttagaagaagaaaaaaagcaattttttgagaaaaccgaccaaaaacaaaattttccatttttttggaaaattttccggtcgttggtgtcaaaacggccaatttaactgatgggggccgttctaatagggttttttggagacatgccaaaatatggacataaaacatggacttaaaaccaaaatatggacaaatatggaaatatggtacaggaaaaaatggatttccatatttttggatgtcttactgatcactcatacattttttcatttgctccggcttttaggttttagctcatttttcctgatttcccagtgacttaaaacgcacgaaaaacaagttgttttctttggtggttgttaggtaagttactttttgtattgaatgagaagcaaatgaaaattgtttctttaaaactttttccaaaaatggagtttcaatcttcagtacccataattgttttatganatttctcatgaangttcaatttattaagtgctcatttaagttcaatttattagntgcttttncggtatcgnaaattcgcgaaatctcagaccgagagatgacactgagactct

SEQ ID NO: 2572 - DNA, 6007 bp, Heterodera glycines
tagaagaggtaaaatagtgattagaagaggtaaaacagtgattagaagagatacaacagtgattagaagaggtacaacagtgattagaagaggtacaacagtgattagaagaggtgcacagtgattagaagaggtaaaacagtgattagaagagatacaacagtgactaaaagaggtacaacggtaattagaagaggtacaacagtgattagaagaggtacaacagtgattaaaagaggtacaacggtgataaaaagaggtacaaaagtgatcagaagaggtacagcggtgattaaaagaggtacaaaagtgattaaaagaggtacaaaagtgattaaaagaggtacaactgtgatcagaagaggtacaactgtgataaaaagaggtacaacagtgattagtaaattcattaaattaaaatgaaaatattttttaacaaatttaattaaaaaaatacatgaaattctatcaattaaaaaaaattaatttaaacttataaaatttattcatcaaaaaaaaattaatttaaatataattttttatttattaactcaacaaaatgaaacgtccgattttgtgttagtaggcgaaatgaatgtttttgggattgatctattcatgacgcatcaaagataaatttcccatttttaaaccatcaatttaacatttccttttacaggtttaacacaaaaaattattccagtatttttgtcttaataattgtctgatcactagggcatccaaaaatatggatataaaatcgcgaaatacggccataaaatatggaccaaaaatcacaaaatatggacataaaatagcaaaaacatggacataaatttcccgaaatgaggggcaaattttcaatttttcaaaattcattaaattcaaataaaatacatttaaaatggctgaatatagtataataactcgttttagaagaagaaaaaaaagcaattttttgagaaaaccgaccaaaaacaaaattttccattttttggaaaattttccggtcgttggtgtcaaaacggccaatttaactgatgggggccgttctaatagggttttttggagacatgccaaaatatggacataaaacatggacttaaaaccaaaatatggacaaatatggaaatatggtacaggaaaaaatggatttccatatttttggatgtcttactgatcactcatacattttttcatttgctccggcttttaggttttagctcatttttcctgatttcccagtgacctaaaacgcacgaaaaacaagttgttttctttggtggttgttaggtaagttactttttgtattgaatgagaagcaaatgaaaattgtttctttaaaactttttccaaaaatggagtttcaatcttcagtacccataattgttttatgaaatttctcatgaagtttcaatttattaagtgctcattaagtttcaatttattaagtgcttttcggtatcggaaattcgcgaatctcaagaccgagagatgacactgagactctcgaataccataagataaataaaaaatattttcataaatcattgcattagaattaattgcaaaatttaatatttttccctcattattttataataaaattataatttatttaggggtttagatttatctaaaaagattcaatacaacaaatagtttaaaaagttgtggaagaaatttgttttgaaaaactaataaataaaagaggatagaataaaatctgaaaactaagcatccattctttcttcctccgttagatccatccatggccctaatgatgatgtgggtcgggtccactcggtgacagacgctaaatggcataataaaaagacaattactgaagccgaattcctaccttcgattcattgaccggcattttctcagcaagttcgcgtaggtgtgccctcattttttctaatcgatttgcccccatttcaaattgcacaggaggaggtggtggagcatggaaaagtgaattacagtagtatcatgttaacttggcacaattagctaccattgagcgattggtcacatgcgatggcaccaatccggcggcatttcctccctgagcattgcttcgcccaatcgcttccgccccacccgtcgccagggaagtgaagagcagtccagcggtgacaattcttttgatcttcgtaccaatcccagctgatgagttgtttccactcccatcattagcagtttcttaaagcaaataccaattttatgtcaattatttttagggttcatcacagaataaggatttccatggccaccaaaatggtgaactttgacacaattggaaggaatattcaaaagttatttcaatattttacttttgtcaccagtagaagccgagagacggaatgagacgacggccaaaagcacaatcagaaggattttgaaaatgtttggcattttttcggatcttttaatattttattactgtgccgcgttgatttggatgattttcagttaacatatggacagtatttatatacatttgctctcttttgcttgtctcgttggaaaacaaattggtttccgatttgttgatgttattattaattttcatatatttttctgatttcctccgacataatcgacaaaatcgtgtaattgttttgccacttttaatttttttatatttattaaaaattctgaaaaataatttaaaagtggcggattaaaccgctgggttgctcttcacttccttgttccaaattaccaccatacgactttaactcatttttaccaggctccaccgcctcgttctagtggtcaaaatatatacatgaatatgtaaaaaaaatcatgaaatatgtacaaaaactcaaaatatgtaaataaaattattgtaagagtctggatttgtaagagatttggattattcgtttaactgccgaagcgctaggatttaacatttacacatttaatttatctcacatttaatttcctttttgcttaatgtaccgccccttcccgacgataattgatcaatcacatttcactttcatttgtatttaatgttcgccatttttctctgtaatcactccagtcactccggaataatgccacttatcccagtaagtgtttccatcaaaggcgggatgggatccctgctgggcttgatcaccccatggggcctttccttcgggagtttatgagtgtcctatccctccccaatttggaaaccccagtgtcccaatgccagcacgccccaccgcgcacggacgcgctcctttattttaaagggttatattttaatatgtataaaaactcccaaatatgtaaaaaaaggttgtcttcgaagtttaatgaaacagttataaatttatggaaataaatttttaaaaaaaacataaaaaaaaatacaatataagcaagattattgcgaccccttttattgtttcgacaattctaaggaaattattcattaggtacaaatcgatttctatttaaattacaaaaaattcccaatttcccaatgattcaaaaaatttagaacgggaatagctagagcgctgaaagtttgcagtcggggctaacttttggttgtgcatctcctgaattggaataacaattcgaaaatccaaattttcgattaaactttttggttcaaaatcggtttaaatacactgaaacaagctgaaagccatcaatcctttaataagcgatcagttccgcctcttttgaacaaaaaatgttaaattctaaaattttgactttcgaatttttgttcaagttcggacccgtggttcggaatgggccgaaatgctaccgggttcgtgatcagtgacctttaaaaccctaggaacttgtttttatgacattaaaactttcactaacgcactgactcatttcccactgacgcactttccgggagcccctagtgctattaatgattgggcatcggatttttaaagtcgaaaaagtccaaaataaggccctaaataagggcgcaaaaaccgaaataagggcaaaataaagtcgaaaagttcaaaatttagggggtataattttttaaattgctgtttttttatatgaaaataatttcaaattaagatacatttgaaaattttcgagggtaaaagacatacgattatcgaaccaaaatttgtttgtaaatgaaaaaagatttccacgtcacaagatgccaaaggagtaaaaaaaattttcgagatattttaatgtgttttttcatgtaaatgctgatttcctcgagcataaaccacaaaaaggtcgctaataattttctcaacagatatcttttccatgttcatatcattttttatttaattaaaaattctaagtttgtatttaaatataataatacaatttgataagaaaattaataaacatttttattgctttcaatacggatcaattgtttcttaattgttgaatttgaagtgaatgattaaattttttgagattttataggaatttagagccggctgtagagttgtttattggaaagcgagaagaaactaaaaaaatgtacgtagttcgtcctgagcctacaattcacttcgcatctcagatttgatttatattgtatttatttgtttgtaaatgaaaaaagatttccacgtcacaagatgccaaaggagtaaaaaaaattgtcgagattgaatttttaagaaccttttcatttcttatggatgtcctttttgtaaatgttagggtcgattcttagggctatattgttctcaattttttgggaaaatcttatatgttatttttcgtttttttattgcatttttgtcaataattcttaaaaacccagtctctaattgtcgggttcacttgctgtcgaaatcacgcatagaaagtgagaaaatgcgaaataactatgtcgaatagtcaagaaattcgtagtaagattttggacaacaaactaacagcaatctcactcaaccgtcaaaggcaaagcgacttgccaagaatttaatcatttatacgataagccacaaaagaaggagaaaaaaaaatggtacttttatttcgggccaggacgttttcgcgtggccattttcgcgtggccgttttcgcgtggccgttttcgcgtggcagttttcgtgtggccgttttcgcgtggcagttttcgcgtggccgttttcgcgtggcagttttcgcgtggccgttttcgcgttggcatataaaagagaattcataactcgcgttttatttaacgcgtggccattttcgcgtggccgttttcgcgtggccgttttcgcgtggccattttcgcgttgccattttcgcgtggccattttcgcgtggccgttttcgcatggccgttttcgcgtggctattttcgcgttgccattttcgcgtggccattttcgcgttgccattttcgcgtggccgttttcgcgtggccgttttcgcgtggccattttcgcgtggccgttttcgcgtggcagttttcgcgtggccgttttcgcgtggttgcatataaaagagaattcataactcacatttatttaacgaaaatttgtttcactcttttttctaacgaatatttattttataattaagtgagtttataaactaaattaaggttctttcaattatataatatggaccagcagcaaaaaattaaaacaaaaagaaacaaagttaagttagaacatgacggcgcactctatgttttcgaccaattgagcgcagattgacttaagaaattttggcgatgtgagtttcatggcccgtcagacaagtgcaagggtatgttaatatattattttgaattttgaaaatcttttaaaattcaggacgtttgcacacggatttaaataacgttgtgcagaagttggtcgtgagttcaagattagaagaggtacaacagtgattagaagaggtgcaacagtgattagaagaggtgcaacagtgattagaagaggtacaacagagattaagaaaggtaaaacagtgattagaagagatacaacagtgattagaagaggtacaacagtgattagaagaggtgcaacagtga

SEQ ID NO: 2573 - DNA, 4961 bp, Heterodera glycines
tgcactgaaagatgcgacgtccgctttggtcggcatcggcgtaatattcgccgtcattagattgtacgaaaggcactataaactcaggtaaaatgtctaaaaattaagttttacggggaatgggaccaaaaaaaaaaaatttataaaaagaaaaatgctgctaaatttcttgccaatttcaggcaccacaaagcaatgaccgcttcctaaccaactcggactctccaaaaaacaggggtcggacaaagtgcgcgtcgactcgatgttcttccggcgatttttgtgtatccacataattctcttccagagcctctcagtttgctgctgtgcaattacagcgacattttgatgtgaaaatgatttttaagcgattataaaatttgatttgaaactctaccatttttgtgtttgattcaaatataacgtaaaaaaggcatatattcaagagcggaaaaaaaactttgtaaattgaacgacccaaaagacttaaaacaataaaatgaaaataggagtactaaaaaggaaaaaaacaatttttttttgtttttttgctagtgctatgtggggcaaaagcaatggagtgctagcgctctgaggggcaaaggtaatggggcgctagcgctccaaggggcaaaggcaatggggcgctagcgctccgagggccactatgtgtaagttggattaatcaaaataaaaaaaaataaaatatgaaaaggaagaaaaattttggccctcaggcgggttatattgtaatgtttgactgagaaatagtaaagataattgggtctttaaatcaggtaaaatgcaattgtccggaaattcgagcaatcgcccaattttgtcagactaagaactttttcaaacattctttggtcacttcaaaatttttgtatgcgttttttcctgcccacaggcatgggtgtattgggagtttttgataattaatgacattatttgagtataaacaaaatgattctaataacatgttaaatattcatttccattagtgttcgagagaattcggagtgtgctcacatttggaccatggctgagcttggtggccatcttcagcaagaaccatgatactgaaacgaaaaaatatagattacttaaggatggttctgcaaaaaggcaatactttctggcagaatgaaatatttatgtcaattaaattttgaacttttaaattagtcaattataaatttaacactcctgtccttttaatgttttgtgtgcttttacaaaagcgcttttgttattttggcccaccagcttggaataaagtggacattgaaaattagaagtgttattacctcttttttacaattatattttacaaaattcaaaatgaatgtgcaaaggaattgaatacaaaaaccatagcaaaattactaagataaatctctaaaaaggttcactaccgccactttgatttgtttctgacccgcaggtgagacattgctaatcactaatagtctctttaaattttatttgggcaatttctctttgacatcagaaccaacaattacattgtaatcctgggccccagtttgaattcggaatcattcacaaaaaaaaaattaaataatgaattctaaatcaagcaatgttcaaattcacatgaacatatttcttaaagcgaagggcatggattgaataacttattacctacaaatcggtaatgaatgagtccaagagtcattaatgagcagtcaagtgttcgccgaattttcaattaaattcggtttaaaccacaggtgctttttagtgatcaattgacgggttagagcaccagtaaattgccagacttttgctacgttttgggctttatagacaaggagacatcggcagattaggcctaacagcagcagtgagtggcaaagtcattccaataagcattaatgaaattgcattaaggaggcgactttcgaacgcacatttggccgttcccagtttgctgttttaagacggtttgcttttgtttccggcccacaggcttgggatttttttgacagttcttcaccaacttgacacttttttacttccgtttcgggtttaatgtgtgtaagtgcattcattgctccggatctcggctcttcgtctttgtaattgcgacgctcctgaattttaagatctagcaaagcctgagccaagttttgaaaaaattcagctgaagcattcgaggaacttggggcatccatcatgttaacggaactctgcctattttgccattgtccttgcgattggtgtggctgttggttggaccatcttccttgactgaaattggcacggcgttgatagcagttgtaagccacatgtccaacgcggtcacaataatcgcatctgggatttcttgaccaatttctttgactaaattgttcttgatggctttctccccagttgcgagatcgattttgtccttctcctcccccttgttgctgggtttgttcatccgatcctgaaaaagaactgaatcctctgacattgttacctgatgcccactgtccagcaaagtcattgttcaggttcgcttctgtaaaccaacgggactgtgatgactgattgtttagcgcgttgactacgtcagagaggcgcactgcctcgtcactcttgctcatcatcagtaaagcctccaactcctcagcttgtgctcttaccaagtccaaatctttagctcgtgacaatcccaccagacgaatgagaaagcttatatttggtttcaatctatccaaaaattcttcgcaaattttttcttttcgcgaattaccggtcaatgacgaatttgtcgcatccaccaacggagttaaacgcctcagaaattgtgccactgtctcatcttccctttgcttgcacaatgataatgttcgctttgtaatttcccgacgttgaggggagtccaatttccgtcgaagttcactcagtgctgtgtcgagagtgtccgtttgtgctggtaataattctttaaacaatgccagtggcgtgtccttcagagccaatttgagtctggtgactttttcgcgctcagtgtaagccttgcctgacacagaaaggtagtccttaaaacgttcagcccaatcgtcaaatgcaaaaactgactcttctctgaacatttccaaacctgaccctactgccggtccactcattagcatgttcaggccaaaaagagtcggcccgtcatcttcgtcttcgcttgacagttgctggattggcacttgattcggcatgagttggttgggctgtgcattgcccattggcatcacaaacggcgcgagcgatgctctgttttgattaataagactaaaagttccacctgaattcgccccatcattgtcacgttccaaaatatcgactctttcggttagggtctcgaattgtaccttcagcgtttcaaaattggcatttgtattagccacaacatcattcacccaagtgactttttggtttaaggaacggttcaagtggcgaaaagctctattcactccatcttccaatttccccatgtcattttgaactttttctaagtcagaaatttttacagtgacctttccttgccaaagttttctatcaatagccgtgattgaggacgcatcgtcctttccactcaaaaacatttttgtttcctgcccgcaggcttgggatgtaccagaggcgggctcacttgaacagccccctgatgtagacattcgtagtcgttcggttcgtaataagattttgattttattttgctaaaaaattggtaatcccattacgcattaattgagagaaaaagaattaatgaatgacagcggataatcgaatggatgcgaatgccttccaagaatgggcttatctgctcccatctccgcttaaactccgcctaacaagagcaattaacaattctcaggcgtcgcaaaaatgtgtaaagtgaatgatctcgcccaatgaaaaatgcggcggcacgtgattacttgaatattcttatggcgtgaaaaacgagagaaaacaaagagataaaatgaactttggaacttgtaaaaactgtaactcatactgtaagcaaaatgatagggcctaattttcattttttttttaattggttgccttatttttttaggcagttaaactagcgcccctttgattgtttatcagtccgggcctttttgcttctccgaaatttgtttctcttttctttgcctcactttttctctctctctttttttggcttctttctcttttttttggccgttcaaacagtttttaaattagttaattttcggctactgccaggccccttttttggttatttttggcttatttcactctcttcttattctctgtctctctcgtcaaatttgtcaattttctgagcaatcagcccctttagcatttagactagcccgggcaaattttgtcctctttttttgcatttttgaagtccctttagctttaactagccctgacgaatttttggcctccttttctcttcgtttttaatgtccctttagtttccaactagcccggacaaattttctcttttttaaagtccctttagtcttcgactagcccggacaactttagaatctcagacttctttacttgcgtgtacacgtctttttttctagccctcaggccagggagatctcccacaaacttctgccggcttatccaattctctgcttcgtcgtcaatgatgggtcgtttcccaaaatgggaaccatccggtgctaccagtgagggatgcgcactgtgccccccagaccaaccgcaccgtctatcccggatggaacatgggagggaatggggaaagccatggccagtgactaagccccaaaatcccaacgactcattgactgtcgatatatttattcactcgttgttggatttacacgaagcgagaaaaggagataataattgaagtctgttccatcacaaataacaaagggagggatcactgggggaaggagaaatgcgaagagaatggg

SEQ ID NO: 2574 - DNA, 5038 bp, Heterodera glycines
  unsure (1)..(5038): unsure at all n locations
tgtaaatcagtgatttntagtcgttccttatattnnttgtacacaatccacannnttntcgaanagcttttcttgtgaaaaatttttgtacccgctcaatnttgtctatatctttttttaaattagggttccaaacttcggtagcctattctaattgaggtcgtacaaaagttttataagctgctgttagagtctttatttccctgcttttcaacactctcaaaatctgaaagcttctaagatatgcgtttcgtataattttgcttatatgttctgaaaaattaagtttcgagtcaattataatgcctaggtcacgaacattatccgattctgaaatcttttttgagttaattaaataatcttttttcttgttatttttccctaaatacagaacaaaacatttttcagttgaaatttctaacccatttatttttgaccatttttccaaagcctcaattagcctcaattgctttatccaactgatttgaatggccatcattttcatgggcataatataatttaacatcgtcggcatacatttttatgccaactgatgccttttcatttgcaataaaggacggcagatcatttataaaaattaaaaagagtaatggccctaagacacttccctggggcactcccgaaaatattttgaaattttctgacaattcttctccgattttaactttaaaacttcgattttttaaaaaattatttaaaaaattataaatttttccttcaattcctatctttttgatttttttaagtaataaatcaacgggaacagaatcaaacgccttgacaaaatcaatataaataatgtcaatttgttgattcttttgtagataattatatatatcgtccatcgtttttaatatttgggttgtagtcgatctattttttaaaaagccaaattgttctttatcaaaaaattctatactgttcaaaattccaaaattttgctactcaaaattctttcgaaaactgcaaatagtgcttgttaatgaaatcggtctataattcatcggattttttcgccttttttgaaaattggtacaactaatgatgttcgccatatttccggaatttgaccggaatccaaaattaatctaaataaatccgctaatattttggtaattggctctgcacaattttttaacaaaatgtaaggaacattatctggtgaagttgaattacgccggggaagtcttcttaatatattccaaattgttccattattcaattcaatatccaaaagtttagtcttattctgtgctgattgagtcagtgaaccattaacaattgaattttctaaaaaagatttttgaaatatttctgctaatatttcgcatttttgctcattactggaaaacatatttccagcactatcaattaacgtaggaatttcattaacttttgataatttatttcgaataaatttgttaactgaattttgcccctgggaaataatttttgactcttgttcatttcttaatttgtgcaattgttttttcatttccctagaaataattttgtaatttaaaatgatttcacttttttcaggaaattttcttacaagcttatgcaaacgtaatttctctgaaaataaatctcttattttttgaggatacgattgttttattatcgattttagaggtctatttggtataaaagtatcatataatttcagtactttatttaagaattctttatatttttgatcaacggtgtacactgagtttattgataaatcaatacgattttcaagaatcgcccgacttaatttcgaaaaattaatatttttaaaatctcttctataaacactgggattattacgccggaatttttcttttatttgaaatccgaccattttatgatcggaagttgaaaaatgttccaatacaattaattcattaattaattctgattcactagtcattactaagtctaaaatcgtattttctctggtcggttctttaacatgctgtttcaattgtttttggttcataaactcaatcagcatatttgacataggatcatttatatgttttaccttattttcatcccataaaatgtttgggatgttaaaatccccacattatatgatattttcggaatcgctttgatccgaaataaatttgaatagctttttagtattctgaacggtacaattcggtggacgatatatatttataatttgaattggttttttaaaaagtaatttaatgtgtataatttcgcattggaattttgtcccagagaaaagtgtctgataagggatcaatgtttttaatagaattgccgatcctccgccctttttttctgttcggtttgcataaacaatttggtattgacaatttattgtaagttccgcttctaccgtatttctggagtttaaccaggtctcattgattaggattatagacggattgtattttttagctaaatgttctaaatcagctattttatttgctattgatcgggcatttattaaaaggcaagaaatccagggattgttttttaccgttttttttatttttttcggttggtttgctcgcgtgtccctagcgagttctgagcgggtgggggtttttcagggacctgatttccaaatcaaccacaaaatatttatattcaccagcagcaatattggcctgataggcttgttgccgaagggaatataaaattttgagttcgttttgggtcatgtccctgcggactttgatatgttggggcaaattagtcaattttttcagagcattgcggaaattatagataaatttgtctcgcgaaaatttgtccaaaaatggaacttcagaattctgtccttttttacccctccatcaggccgcgttcttgggtggcgatgaatgtctggcgaaagtttgtccttgacaccgcattcttcggcaatttgatccaccagtgcccgttcatcgattgcctccggcaatttctcaatgaccgcacgatttgccttctccttcagctgctctgagttgatgatggcgtcggttatcatccgcgacactgcgccggtgccagcaaaaggcggcggttgaccccattgaaaattgccgtttgtgggggtgggagccgaagtggaggaggtgtgctgggggtcaccaaatcgatgtccatatcgattctcgccctccacgagccgctccaccaacctttccaacttttcgagccgttcgatgattgggttcagtgtgggattccctgaaccttctaacaacttttcaagccggtcaagacgggcgagaatgtctacgatcacttcagtgaattggaaaaaattacaattgctatgaaaaaatgaaatagataaaatatgttgctgaataaaataattctaattctgttcaaataatggcaataatgtgttattattatatttgcggaatgcgcaggcttttttcttgaaattattaattttacaatcaatcaattagtaactgttttgattttattattaaaagcatcaaaataaaaattgataaaatatcacaaaagaaagttttctgttcaaatcaaaaatttttaattttaggagtaattttctttcatgcaataaatgaataaatatgtgtacaaaattaatttttatatggaaacaaaaagaccgagacccaaaaaacccgagacttttttcaaaaaattttccattcgcttaaaaattgtttaaaaaattcttttaactctattcttaactattttttgctttttttattttgattcaatttggtacaatattaatcatttcaaaaacgcacaaaacaaaaattcgttattttttcgcggtttttgagtcaatttaaaaaataaagggtattttggagctcttaatagattttaaaataaaaaatgcttaaatctgtagtaaaatattgatttaggattttaatttttccaggaacctataataaaatgtgaattaatggaaaaaataaataaaaattaatcattattttacttattcttgccaataatttgttcagtagaatgaattttaataaaatctttaattattttttattttcaattaaatagcacttcttatttgtaagaaatcagtgggatttagatttttattatttataaaaaataaaattgtataaattaaaatttgagaaaaataatatcaaattatttttgagaaaatgaagaaaatgaaactccacttattattcattttaattatttttttgatcacccaaattaatcaaattgaaacagaaaagaaaaaattggaacaaaaatcatttgatgaaatatttggagaaaaatgggaagaaaaagaagaagaaaaacgaaatgaactcaaaaaaagagaaataattggaaaattttataaaataaaagaaaaaataaagcaaaaagggagaaaatattcacaaaaaatactggagtaaaatagaagtaaaaatagcgaaaaaattgggggaaaatcgaatgaaaatttataaatgaattaagcaattagtacttaatcaaaaatttaatctgtctaaattggtgctgtaacatttcgacagtggctgatttcgacagagaattaaattattattttattattattatgtattcacatgaacaagccggaatccacggtttgcccgaagcaaactgcctcagggtcaaactgacccaaaaagtcatttttatttaaaaaatcactatgcttaatgaaaattgatatatgtgtgtgtcgaaatttcctggcacgcttccaattataaatattctgttgagaagtgtttaaaatttttgcaatttcattattactcattttgtattttcttttttaatttcccaatacttttttattttttgcattttttctttctccgtcattcttttactggcaattccaaattgtttcatccattttttaattatgaaatggcttactccaattttcttacaaatttcggcataattttggtaccattctttggttgaatattttcctttttgtttatattcatttgacatttcaatgaacttttgtacaatttcaaatttttgttca

SEQ ID NO: 2575 - DNA, 6959 bp, Heterodera glycines
  unsure (1)..(6959): unsure at all n locations
caacgaaattcgtgattttttgaaaagtcagtcgaagagtatgttgattgacgaattttcatcatttgaggaattgatctgtaatttcggagaaattttcgcaatttctgaaaacgaattgacacaaacaaatttggtcgaacacaaaattgatacggttgatacaaaaccgatcaaagcaaaacataggcctgttccatacgcctaccgagaaaaggtggctgaaatgatcaatgattatcttaggagaggtctgatcagaccatctttttcaccgtgggcatcgccaatagtgattgttccaaagcgcgacggaaccctccgtttctgtgttgattacagaggcctaaattcagttacagtaaaagacgcatttcctttaccaaacattgacaatactcttttggcacttgggggacgaaaatttttctctgttattgattttatgtcaggttactggcaaataaaaatggaacccgaatcagtcgaaaagacagcttttgttacggaatttggattgtatgaatttacagttttacctttcggtctttgtaatgcagtagcgactttccaacgcttcatgacgcgacttttcgatggaatggtaaacgattcagtgttcattacattgatgatattctgattgcttccgagacctggagcgatcatttaagagaccttggaacagtttttgaacgcattanagcagcgggactgaaactcaaaatcacaaaatgccactttgccgcaaaggaaatccctttccttggccatattctgacccgtaagggcataaagatggacattgacaaagtcaagccaattatcaaccttccaactcctaaaacgaaaaaagaattacattcactcctcggatttttcacttattacagaaaatacattttcggttttggagcattggccaaaccactttttcgcctacttaaaaaggacgtgaaattcgaaatgggagaaattgaatttggagcgattaaaacactgaaaaagagtattttggatcaagtagttctgtatttgggtcagcttaggccaatttatttcgcgtcaagacaatgtaataatcacgagtcacgctattgtccaacagagcttgaagcgttggcaattcgtttcggaacaaagaaatacgctcaagaatttaggcctctgtaatcaacacagaaattatgttttgttaattggtttttctcaattcattttgggttttttctgagttcttcggattgatattttttttttgctgtgaatgacttttttgcttctcaatttctctctcctccgatctttgaatattttttggaaataaatctctctcatctggtgaagtcgtttggattgtcgtgttcgtcttttgtttaattttgtttggacagggttttaattgttggaatttgccgtggtgtaattgttggtcaacgagcgaaaatttgtgcctgtttcagtcgaaaattggagagtatttgactggccgtataattaaaataaaataaaaatataaaaaattaatatttgtgctgttaaccagggcggttgctttaaagctccgtttatcctggcagcaatttgccttttagggcctgaggtcgttttaattacacacacaaatttcccgagccgtttaggtgccctgtcgtcttgtgcttcatgggtggcggtgtgctgctcctcaggccatagttggttttctaatacatgtcaaaattggggggccgtataattaaataaataataaattaatattttttttttgctgttaaccagggcggttgctttaaagatccgtttatcttggcagcaatttgccttttagggcctgaggtcgttctatcgttctaatttctgtcaccaatttcccgagccgtttaggtgcactgtcgtcttgtgcttcatgggtggcggtgtgctgctcctcaggccatagttggttttatggccaaatgatttactttgaactcttttcaatgcttattccctatcatccccttcacccctcccttccatttatttaccgccatataaattcattcatttcatgcaattcgccattttgaaaattaaaaaattcatctattctcaccttcctatgctgggcattgtccaacagggaaaaggagctgagacaacatcgaccaaaaaactaccggctgaatacgtggaaaagatggactgcatcatggagcacgttgccaaatttcatttcaccaaagtgaagtcgagatttgtcataaaagatgtgcctgcagaccccgaaggactgctagcggccattttccaacactgcattgatgaagcaaagaaggacagtcgcgaaaagggaagcgaaccgacacaccttggctgtgtcatcagcagcccactgctggatggtggcgacataccaattccgctacgtcaaattaccgacaacacaatcaacaccatcctaaatcagttcatcaaggtggcacaaagcaaaaagcagcaaaacatgactttgtggggcgagccgttcatcatcgccataacatcggttgatcgcagtggacttccgatgaagcggcacatcaaagggggcgccagacgtcgcttggcacaagttcagcaccaagtgcatgagaagtgcttgattaaggtgaagcgccatctttgtttattgtatgacacctactcatatatttaagatcaacaaccaaaacggggacaacactgacaattattgcttgttttacgccctacaagcaacaatggtggccaagacgcgcagatggccaaagtggaagttttacgattatgtgcatagtcgccgtggtcagcgaggacagttccagcaagacacattgaaagtgatgcggcaaatcagagcaccactcgatttggacgcatacgacgccgacacttatgctccattggtcatcaatcactggaacaacgcgcagcagcagcaccggtttgctgttttcatctttggaacgaccggccactacaagccgctttacaaatacggcaacgacgactacgatacgccattggcgctttatttcaacaacagtcattttgatggcgtgcagtttctgagtggtctctttgacggcaaaaagtactgcctggcgtgtgaaggaccatactcgagaccatcaatgcataatcaatcatgcaaagcgcactgcctcatgtgttcccgtgttggccctgagtttccgtgtccctcggaagctgacttcttccgacaatgcaaagcgtgccacaaaaacttccacaacgcgggctgttacaatcaccacattcagtccaactattgtgcgcgttcaaagaagtgcaaagactgcggtgtcattttggacgtcaataacaattctcaaaaagggcggaaggtaccaaactcaaaaaaaaatttttttaaccataaacactttaagggacacgtgtgcggagaaaaattctgtcagctctgcaacaacttccacagcaccgagcgtggctgtttcattgcaccacttgagcctaaggaggagatggagtcctatcggttcgtggcctttgatctggagacaatgcagcatctccctgttgaccctcgtctacctgagagcgcaaccacgagccaaacttcattgcagcgaaagtgatttgtccaatgtgcattgaaaatgggagctggaaacaaggaactgccgggtgttgggtgtgcggcccacaccgaaccgttgccttctgccaacgaccatttaacggcacttctgttgacaaacaagtggtcaccgacaatccaatgcaagcgtttgtgggatggctgatcaatgacctaccgaagaaaaccaacacgtacgcatactcccattttggcggacgctttgatatggtcatcacattcagtgaactatttcgtcgcggatttaacccggaaatgattagacgagtgagaggctctctttacttttatttttacttagtgaatgtttagggcaacaaaatgtacgagatgaagctaaaggcacagaagaacaaaaatccgaacatcattttccgcgactccttcaatctgatgccctgtgcgctcggacaactggtgccagcatacggcttggacgtcgaggagaagccctttttcccgcacatggccaatcgtcctgacaactatgggcgcgaaatttttccaacacccgaagactacctggcccaaggaatgatgccggagaaacgacgtcagttcgaccactggtatgaacaacatcgacgagagccgtttttattggatgaggcgttggccagctactgcaccaacgacgtggagatcttgatggcagcgttggtggcatttcgacgtgaattcctggaaatcactaagcgacaagaatatgtggatggtgtcgataaccgcgaaaatcacgatggcattgacgttctgaagcagtgcatgaccatcgccagcgcctgcatgaagcacttccggatcaatcatctcccggctaaccatctggccatcgtaccggaaagaggctacgacaacgcccaaaaccaatcattactggccctccgcttcttcaaatggtatgcggagaagcacggagtccaactgcagacggcccacaccgctgaaggtgagaagcgcgtcgccaactactcactggacggttggatcgaatccgagaagagaggcattgaagtgaacggtaattttagaaaataaaacatgtgctagaaaaatttgtgtaggctgcgtttggcacgggtgccgcaaatgtttcccagaggacaacatgctactgcctaatggaaagtcggccggtgaagtgcgggagcgggacgcaaagcgccttgaatttttgcggaaccaagtgggccgtgtggacgtctactgggagtgtgaaatcgagcgcatgctgacgacagaccctgagatgcggcaggccttcgcaggatatgttgatgatggaccattggagatccgcgccgcgttcatgggcgggcgcactggtcctctgaagctctaccacaaggcgcgagaaggggagaaaatttcgtacttcgacttcacttccctctaccccttcattaagtgagttttagcattaaaaatgacacttaaaaatttatgtatttagttttacgatacgctatcctgttggccacccaaaagtgcacgttttgaacgaggacgtggaatggaagtgcgcagcggacaacccctacgatttgtcgctgctcaaagtgtgggtcgtgccacctcgtcgatgcgatgtgccggtcaaggtggatgagcggctgtgcttcccgctgtgcttcaaatgcgccaaagactacccgaccggcggagttgacaacgaatacaactgtcgtcacaccgatgaacaacgcggctgggtcagcacctgcacttcgcttgaattgaatgccgcattggatgaaggctaccgagtcaacaaactgttccgtgtgctgcaatatgagcagagcgacgaccaactattccgctcctacatatccgagttcatggcgctcaaaatccaggccagcggcttcgacgccaacatcaaaggaaacagcgagctggaagaagaatttgtcagcgaatgctatgaaaagttcggcatcaccattgaacaggcaaagatggagccgaataagggcaggcgcttgatcgcgaagctttgcctgaacaatttatgtgagttgacttttatttgccttctataaaaaatttttgaagggagccgattctcgctgcgtaactttgggttgtcgcagacgctggtcaccgacgaccctgctgttctcgctgagtacttggacaaccgctcgctcgaagttacggcgctcgacgagcttgatgctgagcacatcctgatcagctatgagacaaagaaggagtgcgtggaggagaatgcatgctcaaatattggtaaaaaatattttaaatttttaaaattaatgtttttatagtgatttcgctatggaccacttccgcagcacggctcctcttgttgaaagcaatgcagaaggtggtgagaacaccttcctgccaactcctttacaccggttaaaaaaagcacatattttatgtacataaaaacaattgttcagacactgacagcattattttgacttatccggatgccaattgcccattgaagacgggccctcacctcagggagttcactgatgaatacccgaagcacgagattttggagttttgcagtggcggtgcaaaacaagtaaattttgtttttttacaataaataaatttatgataaaaactatatttagtatggactcaagctgcgtcgcaaggatgcacctgccgacgctgacctcgaatacgtgctcaagatgcgtggaatgacgctgaactacgacgtcatccagaaccaggggttgcgctacgacacgttcaaggacaaggtgttaaaatatgctgagactggtgaaccacaaccgataaatgttatataccccaatttccttcgccccagtataaaggatggaagggtcacttcatgccccctccaaaagatttacaaaccctttgtcggcaaaggtattgtcggagccgaccttagagttcaagactttggccacacattgtaactgttttgttcgccattcattgtgtcttatatacatacacatgcacacacatgcatacacccacatacacacatgtactctttattttataacaatttctgtaattttatcttttttttgtgtgttattcatgtttttcataaaaatgtatgccccacaaattgcttgctgatacaaattgttttcatctggttgatccctacacaattanattagcggtggtagaatgtcggagaccggtggttgaccatcaatcaggtttgtcagctttggaaaatcgtcaaattttatggttcgtttttgaaggaatggccaaagtggtggaaatgctacgctgagctctgattaatatttcggtgttactatatgttgtt

SEQ ID NO: 2576 - DNA, 3020 bp, Heterodera glycines
  unsure (1)..(3020): unsure at all n locations
tcccattcacccataactaccagcattatccctccgccgtgcactgattgtttgaatttgatgctcaccgctgtagttccattttttattaggtcaaacagcgcagcttgatcatccccgctgttagtcaaattgaacacataaatgcaatgggttttcccgaactgttcatagctaattccattgctttccaatgaattggcgaatcccaccgcttcgttcatgtcattgaaagggcgaacatatttcaaattagggtagtccaagtcgtaaggcgcttggggaaaggagcggccattagcaacaattgagatttcgcgcacattaaacggttgaaaattgaacggactgcgcgaaattgttccaatatagtcagagttagccaccaaccccattgttatacggcgaggaatttggtccatgaacaaattggcagtaaactcaaaacgacctggactgatgaacattgacttcatcaacgttttcctcacggcgtatcgtgccggtttcacttcaagttttcgcgcaatgtccaacgccagtccatccatcaatgaaaccttcttcacatacattttcaaaccgacaacctcaaagtggtagcgaggggcagccgcaagagtcgtaattaacaaaaagttgttgtcattgggtaaaacttcaatgtccagctcacagaagttgatcaaatagagtggctggttgaacaaatcggcgtcaattttggcaatgaattgagctgttctgcttcctgcaaacaagttacgtcgagcaatgcagccgtcccctgtctcaagcgtgccgcccgtgtccctataatagcccgctgcattcaaatgagagtcctttgccgtagtggaataggacaactcatgggagaagtatgttttgtaggccatcagagaatttgagttgaaaacttcacgtccatttatgctcattttgatgtttcggatgaaagtctgtccaatcatctggatcggagcaacttcgtcagctgcgaggccaatcagttgaccatgctcattttctttgcgaattcggaattcagttagtaaataacatttggacaaatcaacaaagttttggctggagtgaagcttaaagttgtagggagtgtccgtcagtggattactaggcaacagctcaaaaacttttgatgaagacacgctcacatttgtcgggggtatacggaaaaagtccaatgcattggtgattgagtttgcactgcattgtcaatcttatggaaggccattttttatttaataaagtccaaaagcgtccgaacgaatacgcttatttcctgctttgctgattgcccgtccaattattgtctgatggcttggtgcatgagctctctttctttttatacccattcttcgaccactgccaaactgttttggcaggccgcccttctccaacaccgtgtcaattcctttctttccctcgctcacaaatgcctccttaaacggtactccttcgtttccaactcgctcaagtactcgttgccccgtgctcaacgcctccgatcctactgtagtgccaacacgacgaaggatgggaaggaaaaaacgccaaagtccacgaaaaacatcacccacccctgcgcctcgttgtccataccctcgctggaaggggctggaccctcggaagtaatcctcgctctctatgccacttccgtattgcatgtactcatcatatccgattatgcttggatcaaacacaatatgaaccattttatttacgtaaaaatgctttaaaaacacaaatgagtgagtttaaaaatttatcactttcttaaatattaataccaccatggtcgtgccgtaggcaaatgggaccagtcgacccttgtccatcgtgcgcaactcaatctcaatttcgttgatctcccgctgcaacactcgagcgtatattggcgaatcataaatcttctcattgtagtcaccgggtgtggcaccgctaactgacacaacgcgaagcagcgaactcagcgaattacccacaatcatattctcagtcaatcctttggaatagacagcaaaacttgagaagccaccccgtaagtcacaaccgtattttgccatttcttgatctccaacgtgttgggggttttcaaagccaagcacatagcctagctgaggtgagaatgacaagtggcttatgattggacttttgagcaccaccttgaatcgctcaaagtcatcaagatattgtatttctacatcatcaacaatgtttttgaaaggctcatatggccactcggactctttgtcatcgtcgtcaggaaattcgtctccggcaggtaaaccgccaaaaaacctatcatccacatctaaaattctcttcgattccttttcgtttttgtttggggcttcgactgatcgcttaacgtctttatccgctgctttgttatctttaggttttgcagaagcagtcggtgaagctatttttgtagtctgagtaggagatgaagcagatttagcaaaaggaggtgtgggtttaacagttgtaactggatgttttattgcgtcaattgatgctgatggtttagaaggagcgggaggggttgagacgatgtttggtttgcttaaaaaaggctgtgttgtagaaacaggagcggacggcttaaaagctggagagctcggagtcactttagcgggagtaatcggtgtaatggactttggtttgggaggtatttgggctggcgaaggattgactggggggattgacgtaggcttactaataggttgcgctggagttattgcagggggtggagtaggcttttgcaattttggagttgccggtgttggtgccgtaaatggctgctctttagcaggtggtggtggtggtataggctgcttagcaggttgaggtggtgtaggctgctttgtcggagtagctggtgtagactgtttagttgggtgagaaggatgtgttatagactgcttagcagaaggagttggtatagagtgcttagttgcgggaggaggagatggaatangctgattagcaggagg

SEQ ID NO: 2577 - DNA, 5451 bp, Heterodera glycines
  unsure (1)..(5451): unsure at all n locations
cgttggtcggccatgtccttcgtaatattccatgcttggatggcattctctttaaaaggacaccggttcccgagaggacagccacttggattgtaaaaatctcgtctttttctaaggctctttttctttgactgctcctgttcttctattgtgtccgcttcggaaggcgaattcagagaatcttttaaaattaaagcttcacaaaagcataataggtattttgtcagtcttataatacctttgtttcctcgatccactgtcactctgatttgtttgccactgtgtccacttgactctgattgcgaatcagatgattcaagaccaatcattttttagcatgaattcacacttaaaaattgccgctaatgctttattttagtttgaaaattcacagtttaaaaatagccatttaatgcagggcttccatttgttcttatttataagagatgttctgatttggagggtccaaatcttacaaaataaaaatgttctgattttgggctattattcttatttcttaaaattattcataaatttagaaatttatggcataaatgttcttattttccctagaaattaaaaaaaaaatttccccggcggcgcctatcggcaccgccggacccactcgcctcccccgttctccaaaattccttggaaaaatgcgccgcaaaaaatttgttaaaaatttgtttttttagattaaaaatgcactgaatttgctaatttacttcccaaaatcgttaaatatgataattggaggcgaaaaatacaaaagttgatgctatattaattttataaagtgttatacaagcgatttaagcattttttgttaaatgttcttatttttgaccctaaaatcttattttatggcctggatgttcttattttgaaattttttcgatggaagccctggtttaatgtaatgttttattttagtttgaaagtaacattaagacataaatttaaaaaaaaggaaaatgactaaattatattttgatgatgagtgagataagtgaaagtagtggcaacataaacaaaaactagagtgcccgccctatttagcaaatgacacaaaaaccaagggtacccgtttgattttaaattgggttttcgacttttattagagttcgggattagaaatcaattaaaattgttgtcagattcgtgatcactgatcccccgagaactcatgggaaagtttccacgacttatcacaaaaaaatacaaatcaaagggtcccacaatgattttctgttgtggcattcggcaatagcattgtgttgtcaattaaatctttaacccatttcgctgttttatttgagttattgataataaataacctacaacgcctaaatggaattttcttcaactgattatctcaatgagcatcaacgttttgactatcagattttgccaaaagtagaatacactggtgtatgttataaaacgaccttttttttaattcgggagctaaattttagacaactttggtgggcatggaatgctttggcggaattgtcgttgctactgattctcgttcttccagtggaacttatatatcgaatcgcacaaccgacaaaattaccatgcttaacgaccgtattgtgatcctgcgagcgggcactcaagcagacacacaggccttggccgatatcgtcatgtattatgcggaagcgcatgcgtgtgttcttttattaaaaagacgcattcacaatttttctcatttcaaggatcatggacgaagaggatgagattaccgtgcgcaacgttgccaattacgcccgcaaaatgcactacaattatcgcggacaactcaacagcacttttcttgtggctggttacgactccctcaacatgggtcaactgtatgtcatcccaggcggaggatacaccacgcgacacccttattatacgtctggcagtgggtcgtcatacatccgagaatatctccaaaaccaatggaaggaagatttggacggagaagttgttcgtcaggtatttaagttcaattcgttattttatataatacaaatagaattaaacgagtatgtcaggatgtcttaatttttcagattttgaaaaaagctgtttttgaagcgcagagaagggacggtgcttcgggtggtttgattcacacggcaataattaatgcgaaaggaatctcgcgaaaggtttttataatttatttttttgtttctgctaagcttttttaagacttatcgccccgacaaagaagattttccaattgtttcgcccgaaaaattctacccaaatttgcctgagcatattctacagcccggcttggttaccattgaacgcatggaaacttgaatcactctgatgctgatgattgaaaaataaatgattttggacacatgtatcaattgttctatcgattgttaattattctgcaatgtgcttatgttggataaaatcatcagaatattataatgataacaatcttaatgttgatttatttgttgtaatattccggtccactatcttaaactccgttccgtaaaaagagaattgcggcgctctaaacattcgtacggttccgatgatattttgggacaacgtatccccccaaatagcttaataattaaattttcaaaagattttgaccagcatcaaaagtaaattgacaggaattcgaaattatttctccacttaaaattgagtttttcatcgattgaatgtttgggggtcattcctttgcacttgactgtaagaaagaatgagcttatccgctggcatctctcaacacctttgtcggtgtctcagccaagtcggctctgagtcaactgaacagtggaatgcgttcncaatgtcaaacggacgggccaattagggtttcctccgtttcttctgatggtattgccaatgtgacggaacctatggattcacagcgacataagttgctatttttatggacgactgtcgtctatataagtttttttaagacgccgactttacgaacttttcgcactgattgagaaggaaatggatgcgcttttaatggaaaactgcgcacttcgcgcacaattgggagtacaatcggaggaaaagcctgcctttgaccctccggaaacccctaccagcaagaatgttgcctccgttcaaactgtggaatttgaatcggaacagaagccaagcgggactagcagcatcaaaaaaaattgtaacaatcggtacccaattgtactcaacaatcaatcatttcagcatctcaaagcaaacagcagcgttggaagtcagcattcaaaaacccttcaagcaaattgacgcttaaagtcggcgccaatttcccggaatcaaagcacaaagtggtccaatccttcaaaggccattccgacggagtttggcacataagcacagcccaagttggaaattcaactcatgttattgccagtgcaagtgccggtaaagaatagaattgtgcagcagcttttgagcatgttcataactaattcagaccaaacttccaaaatttggtttgccgaccatggctcccacccattggttagctattctggccacaaaggttccataaattcggtggctattcgtcctgaaacaagccgagtgttttcttccatctatggcaagcatttgacgttgctcacttgtggaggggacagatcggcacacatttggaacgttaacttggatgaacttatggagcggcgaaaagagaaggaaaatggtaaaatttaaggagcattactttatttcctccaaagacgagagggcttaattttttcggctaattgggcgaaagtaaaaaagcatttacaattcagaagaaccgacacagcaaatttctcatcccattacgctgttggatggccattctgacgtcataatggctggggaatggctgatcggcggagatcagatcataacggcatcgtgggatcgaactgctaatttatttgacgcagaaagtgggaaaatcatcaaatgtttatcaggtgaatattatatttaaaaaacaagacgtaaagtacttggttttattttaatgtgaaaattaatgttttctttaaggtcatgatcgagaactgacctcatgttctgctcatccatcacaaaaattggttgcaacggccagcaaagactttactttccgtttgtgggacttccgagacccaatccattcagttgcagtttttcagggccacaatgagtgggatttattctcgactcacaatcagtttaataataagtttccctttgcagttttgttacatcggtcgccttctccgccctccaccacattgtgtccggcagcgatgaccgaacagtgaaagtgtgggacctcagaaatatgcgcagcccaatttcagccattcgtttaaacagcgcggtaaaagaaaagggtttgtcaagaaaaaaaaaaacattctaacttgtcaggcaaaccgaatttcaatttgtaacaacaaaaatttgatcgcaattccccaagacaacagaaacatttccgtgttcgatctaaacgggaataaacagacgagaattccacggagtgcgggaaaggtaagcggaaagaattacttatgcccttcttgttccattcactcattttttgcttggtctcagtttcaccaccgattggtcaatgcttgcgcttggatcagcgaccatccgttgaacaatcttatcacttgtggcttcgaaaagcagataatcggttggcgcgttcacttaccatgattattttaacaaaacttaacattcacaaaaacattgtctacgcttgcccaaattcaaaagctaagatctcagtcattcttcaattgtcctaacattaagatagccttttcttgtcactctattcttttgctttcaaacaaacttttgatttcttttgctatatttttgaaacaaaaaatatttacaatttttatttacatacctattggataaattatttgagtatgtgtaaaaatgcaagattcataataaaattgagcgatcaatggttgaataaggttcaattggtattcactccgaaggcattgcaattgtctagtccaataaaatatttcaacgctgaatgcatctcttcgatatccaaacgtgagagaaaggtcgcacgaagcttaagtgaattaaattttggacaattctaacaaaaaaatgatgtacctgcaattcggcggcactgacatccgatggtttggcgagctgcagagaaattgtttctgtcgcgaagagttctgcgagttgccgtagtctttcattcagccgatctttcatctgaaacaactgcgtgattcttcgtttattcgtggtcccctcactttaggttggaaggaacgattcagcagagagtaaatgccatcgaaagtcgaactggccaattcgatgccacactcccggagaaatgtgtggatactgtgtacaaaacggagcaaagaaacagcaacgacattggccgcgact

SEQ ID NO: 2578 - DNA, 997 bp, Heterodera glycines
  unsure (1)..(997): unsure at all n locations
tttccagttgcaaatgccgtcccaanatcgctgaggacgaggtgtggcacttcagctgaaaagggaaacttttgatggagaaaaatacaagcaagaaagcaccttcactgtcaaaatccaaaaggatgttgtccgatttcatatcctaaatatttttttcaatttccttctaatttatccctctctctctttacccgatgacaaattttgtttttgtgtaaaaagacaacagcttccaacaattgtccgaacaaaagtcggcccaccattgggtctcttttctcgtaatcgttcttcagttccaaatagtcatgcaaagtcattcgatagcttaaaaaagtgtattattattttgttctgaaaatgacgaatttcaccgtttcatcaccaaatgaagcgttttcaactcataagtcaaagggttttcggctgcgtttggcaacgcctcggggtaaagtttctccgcttcgggaagaattggcatacgatcgacaaaggcggtgtacattttgatgatgttggggtggggacgtgggagtgtctttactcttgaaaacttgcattttttttattggaattggtctctgttggcagttaattttaattctctctcactttgccattctcgcccctctcaaaacggcctttggcaatggtacgagtggaattagttcagtgcccatttgtttccataaaacccgttcaggcacttcctcccaattgtaattgaacattattttgagggcgagtggaaattccttaaaattttaaagcgttctttaagctttgacttaaaagtgccgaatttgccttctgagaagtcattggagcgatgcgccgcgaatgtccgtcggcgacgcgcagtttcaactcgtgcaccgccccattgcaccccttggcaatgaaggcacctcaatgtccaaccaaaattgagaaatgagaagggcatcaataacagatttcgtatccgtccaaatgatccggcagttccgtgact

SEQ ID NO: 2579 - DNA, 3865 bp, Heterodera glycines
tctttttcgtccttttttggtcaatttttccaaattttctcccattataatccgttaatttttaagccaattgctttattcagctgaggatttcactgtggtgagtgtttgccgtgctttgccatttcccgtgctcccatttccggacagattcgcggtgctctaatggttgcagccatgaaaatgatttccctggcatttgatgccgaagatgggtcttttcatacgattggtctcggcgattgttggcattcctcgctgtttctcaaaagagtgtgttcgatgttcgcctttgtgttcagtccgtgctccgttctgttcggacctccgattcaattcgagcaattcgacgattggactttccgtcgtgtccattccttcggcttcttcgtatggcttttcctcggctcctttctctgcatttcgtctgctgtcccttttagcctctgctaaaacgtctcctccacttttctctgcttctcctctcttcccttctcttcctttccctctcctcttgtctgattgacccttcgtccgactttttcccctcccatttgtccccttggctcttccttcactttttaaatgctcagtccttccgcttctcccacttcttcatttgttatttggcctccgcttgtgccgttttggctggccatccaactgttgaaatcactcgttggacttccatcgaatggccccgttcgatggctgaagtggccgtccattggaacaagccaatgcatttctttctgcacaaatgtttcccattcagtcgcaattcctctctaaactgtctcttaagatgtctatcggagggccaaagtccgcttgggctccctcttctcccttttgctgacatttgctgtctcttccgctttgcatgttcgcttcgttttgctcactgatttttgaataatttttaatttcttttagggctttgattttcaaatgctcgccgttctcctttcccttggcctttttgtcttctcagaaaccagtgactaattaattagttatttaatctctccgctttgtccgttttgctttgattgttcttttttcatggcttcgcgatgcgctatctcttttgttgtccgcttgtcttcgttcaaaagaatgtcctgccaattgccaccaccgttataaaaaggtgtgccaaacagcaaaagaatccattcgctttctctcccatttttccatttcgtctctttttagggtcatttttcgcttctcattgttcgtctctgtttcactttggtcaacattttccttctaatttatctcggtaataatattttttggcattgttcagttgtgtttaattaattgcttttttcccaaaggttctccgttccatggcgaaggccaatttaccggatacagcgcggaacatttgctgtcaatttggagggatcaattccattattcggggcatctgatcgcttttgtcaccattcttatttctttcgttattccaaggaaatgcaaagataattagccatttaacgcattttattttatttatttttcactttgcctaataaatttcgagacttttgattttgtttgtttatttactattgtttcgggtgagggtgcacgttttgaagttcttttgccgttcaaaagaagcaaaaggcgagcgcacgcactgatcgattttagccacacaaatccccaaatctcactcaaaaccctaattaatgacggtgatcaatcaattaactctcgaccaatttaagaccacaacaatccatccgaattcctttaaacttttctgtgagtcattcccttctttttcaactttcttttgcccccaattgatttctcggcccgcgcattttcactgaaccaaaatgtgaaaagggaggtgacggagagagttttattgggaaaatgcgaaggaatgaatgtccccgaggcatggaaaacgaacgccgccagggcccaaaaataggagagaaaccgccattagttgcgccagcagcgatcggtgcggtgcgtacgccttcggccggggcggctgaattccaattattttgtttgtcattttcactgtttaggcaatttgctgtgctagtgccacgaaaattgctaagtgcacggccaaccactcgctaattaagacataattagctaattgggttaggagtgctcatttgaggcttatcggttgctgatgagcgcaagtgacacaatgccaaagaaagcattgacatttaaatatatttcgtttgtgcgttcagatccccctaatcagctgattgtgagctaattagtgtttttttcctcccattatgccgtcgatcacttcgtccgtcccttttgtctctttgcccttttctctgttttctctgcttctcctcctcttccccattgtcttttgctttcctcctaattttgaaactgtctgtccgacactttcttcgggagtcgagtaagtcgataaattaaccctccctgcccgttgccgtaattttttgccgttttttaggctccgatgcgcaagggcatgctgccgaagccttgagggggaaaatcaggtaattaagaggcattcttgtcattttctgttttattggggtcaatccaccggaaattggctttaccacagggttatttctgctgtgaacctgacaatgtgaatgttgtggaatcgtccggccaaatcaccgactttggccaacacaaaagggaggaacgtttcgctgccgtgtacgcccccggcggcggttttcagttcgtttttcggcatggtaaaagtttcgtccaattcgcccctaaagggtcgactggtccctgttcatcatcggcctcatcctctccatttttttgtccatcctcctctccttcttctgctgcttgctctgcaacgggtgttggctccatcggcgccgcaacccgcatatgtacgaaaatgtgggagaacggggcgaggacggcttttatcacatttgttgcggtttcggcattccaaccggcacaggtgaagcagcagcacatcaatcggaaaagcaaatgcttgtccattcccataatttcagtggtgttcagcacccatcccccgcagttctccgacggcgtttatgccccgccttcgtctctgagttcggcctcgcgaagccgagtccgtttcaacgaaggcgccgcgccgaagggagtgctgaaaaacggagactttcagcagcagcagtacccaacgccaccaatgggcaatgggggcggatattatggacactgatcggagagagaacggaggcaaaagcatttgagggaaatgccaatgccatcgtaaggggcaaaggacggataataaaaaaataaaatgtacaaacaaaaagcataatttgcaacgctaaaacatttgaagccttttgaccaatgccttaagccgatcaatcagtaattatattatgttgttgcgcatatttcttcagtttttttttccattaaaagaataattttcatttggcccttaattgtcaaatttcacaattattaatttgctatcaattaagagtcaattaattgtcgttaattggagagggcaaagaatgggcaaagaattcggctgaactttggtaattgaatggcaattccttcagcatttcacttcttaattaactgtcgttgattgacttccgtcgccgttgcgtcgtcactatttttcgtcaatctttgccctttgtcgttcaaaaaatatcgctgtctttttacagcgaaagtggcggcgaaatgagcgcttttaaagacacccctcggccgggttttgcagcattgaaaaattttaacaaattttcgtcatgagcaaatccatcgtcaatttgtgccttttgagcattgttttgctggcgttttgtgt

SEQ ID NO: 2580 - DNA, 2963 bp, Heterodera glycines
tagaccgcagtatctcggctcagagtgaagattaagggtcgcaaaagagacgatttaacatcgattggaaagttatctcgactgatataataatgatgcagtcgcggcgatgtccactgagatggtaccaaaagttacataatatctttctataaggcaggaaaggcagaatttgaatggccagtctatgtgtacaacgagcgcccgctgaagcgggtgatgtgaatccatagcaaattgtatgattaactttgtgccacagttatatcataaacgtgaatggaccgcaggtagcttggctcagagtgaagattaagggtcgcagatgagtacgacttcgtaagcgattggggaacttatatcataatgatataataacgatgcagtcgcggtgttggtgaggagtaagtggcgcaaacgaatcgcgttaatatactcgaaattactcaattccgaacctcggacccgaattcgaacaaaagaagttggattttttctggtaaaagcttcgaattcatttaacaactatttattttgatccaaaataatgcttcaactattaattgcataaaaatatgcaatttacgccaaaagaacatcgattttaacgcgtattttgaataaaaattgaactttttgttcgaattcgggtccgaggttcggaattgggcaactccgagttcacattcgtaatcagaacccttgaaaacctctaaaaacaggttttgagcccaaaattttaaaaatgaaaaattagggacacccattcttcaggattgcctcattttcactaaaaaataaggtaccttttattttagagcgagtcgcaacttcctattcaaggccaaaatcaaaaaaccggaactgattttgtagctggaaatgcccggggatggcgtccagaatttgctggaagaagcgtcgtcagaagcacacaaagccaacctaaacagtggaataattcatcaatgtcctttaatgtggagaaaagaggacgagtaagcaaaagcaaatccatgtcgacaactttggaaaacgaatcaaacgatgaagaaggaacaatgaaacccgcaaagagagaccaaaaccatcgaaactcaacgagtttgttagtccattgtctttttagtcatttattaccataacagatgacttgcgaacaacttcgactaattcggtttccaacggagaatatgccgattgtgatgagagtaatgcttattgttaatgtttagctttacattaaaaggcatatattgcaaagcggtctaactaaagaccaaaatgggggacacttgttttttcctaccccgaccgcttctctgcataattgcatagtttattacctattagtggaattggacgagccgttctctgaatctgaaggggaagactttccacaagcgaagggcgttgagaagccgtgtttggtcatcccccgtggacgcatccgctcgctttccggtgtttctcctttgctttttgtttacttatttgacttgttcaggtacaattccccccgtgggctttgcgccccattggggcgggccgacgatgtgtttgagttgcttccaatttttccaattgcctgagatgatttgcgagttttccactcatctcctcactgagcatcaaatctttatcgatgggatggatataatcgtggacttgaaacgttacattgagtattggcgccagcaattcaccaagcgaaacattgcagagattttcccaaaaatttgtcctaagcccgaagatgatgtattcggtaaagtgggtttctactttttgatggacgaaagtgtgaaagaaggtggcgagtggggacttcacagttaaatggtcattgcctttcacagattacggattacgccaacgtttggccatgcgtcgtctcgaggaggctttggcatgccaacagcgcgagagagaagactccgtcttctcaattcaatgcattttctgtcgctacatggcgcgaggaaatcgttctaagatcatccaccatctttataccatccatcatctcaaccttggctcaccggacagtacgttttttccctattctttaactaatttcctacaactttttttttttttttgctcttaagagggtaaaaacccaattcatactaggccaactcgtaccatacatggaaacgggggggggggggtcgccggcgaagggaaaaagagggaaatttctgaaaaattcgcctattttcttaacaaaattgtttaaaattctgaaaatttttccccggcggcgcctacaggcaccgccggcccccttttcttgaaaaaacctcgccgaatctttttgaaatatataaaaatctttcttgaattatgcatgtagaaagagtacctaaagggctatcgaatatactaacgatttacattattttttttgtttagctttaccataatatggtaattctagtaaaaacctttccttgtaaaaagccaactttattcgagaatcataatcaattaaaaaatccccttttgtaccttttccgatataaatcgccactagtgatacttattgttacttttatgaggtttcttgttaagacctcgtcttcgtcactgaatacatcgaacatttgagagagaaacttttgcgaaatgagtgtatttactgcgagaaaacttttgccgaccgaaacgtattaatggaacacatgcgaaagaagaatcaccgagaagtgaacccgaagaataattattacgacaaggcaacattcttttcactttatatggaagacaattgggccttttagttctacatcatcaactacttggaattgggcaagcgttggctggacgttttggctgaggactttgaggacacaatgccaacatttgtcgactctgacgatgaggaggaggaagattcgtggcacgagtggcaggcatttttccggcgttggcatcatgtttcgctaatgctcaattca

SEQ ID NO: 2581 - DNA, 2670 bp, Heterodera glycines
atgatgtattcggtaaagtgggtttctactttttgatggacgaaagtgtgaaagaaggtggcgagtggggacttcacagttaaatggtcattgcctttcacagattacggattacgccaacgtttggccatgcgtcgtctcgaggaggctttggcatgccaacagcgcgagagagaagactccgtcttctcaattcaatgcattttctgtcgctacatggcgcgaggaaatcgttctaagatcatccaccatctttataccatccatcatctcaaccttggctcaccggacagtacgttttttcgcctattctttaggtcgtagcgaagggaaaaagagggaaatttctgaaaaatttgcctattttcttaacaaaattcatttaaaattctgaaaatttttccccggcggcgcctatcggcaccgccggcccccacaaaaatattatttttttaaaaattaccccaaaatctcaaaatttggtcattttttagataaaatctgctaacaatagcattaaaattacaaaaaattccccggcggcgcctacaggcaccgccggcccccttttcttgaaaaaacctcgccgcaaaaatctttttgaaatatataaaaatctttcttgaattatgcatgtagaaagagtacctaaagggctatcgaatatactaacgatttacattatttttttttgtttagctttaccataatatggtaattcgagtaaaaacctttccttgtaaaaagccaactttattcgagaatcataatcaattaaaaaatccccttttggaccttttccgatataaatcgccgctagtgatacttattattacttttatgaggtttcttgttaagacctcgtcttcgtcactgaatacatcgaacatttgagagagaaacttttgcgaaatgagtgtatttactgcgagaaaacttttgccgaccgaaacgtattaatggaacacatgcgaaagaagaatcaccgagaagtgaacccgaagaataattattacgacaaggcaacattcttttcactttatatggaagacaattgggccttttagttctacatcatcaactacttggaattgggcaagcgttggctggacgttttggctgaggactttgaggacacaatgccaacatttgtcgactctgacgatgaggaggaggaggattcgtggcacgagtggcaggcattttccgggcgttggcatcatgtttcgcaaatgctcaattcaggaggacaatgcggacgagggggacctttttgcggtgtgtcttttctgccctcacgcacgggagaaactcgaggaaactatcaaacacatgaatgagactcacaaattcgaccttatcggttacatccacgacaattccatggacacatacgaccggatgaaattcgtcaacttcatccgaaaacgagtaactgaatacttaattcagctcgtgttctctcctcgtcacaattttatatgatttagactttcaacactcggactaaagaccaacagacaatggaatccaaatgcgttgaaattcccgacaaagagcaatgggacaatgaggagaatttggtgccgctgtttgggaatgtcggttttggttttctttgggtctctctccttcacatttgttaacttttcataggaccatttgctttggatgttggagagttggcatttggagcaggaaatggagcaaatcggaaaacaaaaggcgactgaatgtgatgaaccgatagagaaggctgtcactgaaagtgttgtcgattcaccaaaaattaacatgggcacattggtcgaggagtcgaagcaaaacgccgtggaaggggtgcaacaaattatactaacaataaaatcctgactttgtttgggtttgattaaccggatttgcgcccttttacatttctttgcttttcaggtgattgccgaagatttgccggatctgacgggcagtgtcttggccaatgccgagctccaacaatcgctccgttgattttgtggctctccaaaaatcgactaaactgttgctagcacaaattattatgagtattttccagttgttgacaaattatgtattaagtcgaaattttatgtaaattggactttaaatgcgttcgttgtctgtgcacttttcactctttcattttcaaatctttcctacgacatgggtctttgttatgatgtaaaaacatagttgatgtgcgtatttgttgccttgccgcaaacgcttcgataaagggttgctgtgaaaagacaaaaatgtttctgttcctataaaaatagaggatgacgagtcatttcgtcgtaggaattggacatgtttcccccccctggcgttaccgtcgctgtccctaaatattccatcattgtcaaaggcgttttttcctttaggagatggacttggtggttttccctgtccgcggcttctgttttctccgtttccccagttacacaaatgccgagccgataatcccgggattaaaattgcgtttggttgattccctttcacggggttcctttagccattcattcattgacttttgccaattcttcgctttttaattgccgattccctcgggcgcaatgcttttgctccgtttcgatggttatttgcttatttgtctcccaatgtttgcccaatttctgttcatccgtccaa

SEQ ID NO: 2582 - DNA, 3162 bp, Heterodera glycines
acatttctttgcttttcaggtgattgccgaagatttgccggatctgacgggcagtgtcttggccaatgccgagctccaacaatcgctccgttgattttgtggctctccaaaaatcgactaaactgttgctagcacaaattattatgagtattttccagttgttgacaaattatgtattaagtcgaaattttatgtaaattggactttaaatgcgttcgttgtctgtgcacttttcgctctttcattttcaaatctttcctacgacatgggtctttgttatgatgtaaaaacatagttgatgtgcgtatttgttgccttgccgcaaacgcttcgataaaaggttgctgtgaaaagacaaaaatgtctctgttcctataaaaatagaggatgacgagtcatttcgtcgtaggaattggacatgtttcccccctggcgttaccgtcactgtccctaaatattccgtcattgtcaaaggcattttttcctttaggagatggacttggtggttttccctgtccgcggcttctgttttctccgtttccccagttacacaaatgccgagccgataatcccgggattaaaattgcgtttggttgattccctttcacggggttcctttagccattcattcattgacttttgccaattcttcgctttttaattgccgattccctcgggcgcaatgcttttgctccgtttcgatggttatttgcttatttgcctccaatgtttgccaatttctgttcatccgtccaatgttcgtctctttggcgttgtcactttattttgtccatttcaaattcttttttttctccccccccctttcgccccccctttttcagtcattggcaaatacaaattggtggtgaaaatgtgctaattaattaatggattagcttactcaatataaatttgttacgcgatgagagcgaaacaaagaaaagaaagggcaaacgattggaaaggcaaaggaattaattaggagcaaagagagagagagaagaagaagcggactaattaatttcgctgcgttgtgccaatgcgaaggaaatgccatcattgagcgaacgattgcccaattccattcattccttctctgtctctctccacaaaacaaaggacaattttcgcctcctcagctcctcctattcttcgccttaattaattctcaaagaaattataaattaaaaaagtgaccgatcgatcgaaaaggactgatcggaaaggccaaaatgacgacgactcgcgagagttcgacagagatcgctgatcggtaccctttcggctactccaccgaactctcttccaaccacgaatcgtccatttgtacggcaaaacggcttcgacaacgtctgcagaggcaacagtcgggccaatcgggtcattcttttcttttttgggatgaccaaataaagcggattttatgtgaaggacggcgttacaccggcgaaagcagcgaaggatcatctcttgtggtgggaaatggggggggaaggccgagcgaatagcaaagcgacgttttgagggcactccgacggagtcgggccgatgtttcactttcaccgccgcccaacgcattcaccgaaacggagccacaaacagcaccaccacaaccaacaacaacaacagcaccagcatggacgaccagcggaagccgtcgatgaatcaaaatttgtcggaaatgttattggacgtgagtgatcggaaggggccgtaggattgacgtcagccttctcacaattagcgatcctttcgtgtcaattggcccatttaaggccattcacatggaagacgccaatttggtcgaccgtttgctgctgtcccattgcagcaacaaagtgaccaaacactgctcccctcctcaatttctctgatgcctttcaaaggtcctttcctcgtccccctccatcggcagcacaaacactttcaccgatttggcccaacgacggcacggcgccaccggcggaatgggttcgatgcagcaccgacgctccaatgcctcgagcacattgtccacacattcggggggacgctcaaactgtgctgcaatgagcacattgtaagaaagtgaattgtaacggatggaacgaaaaaagcaaaaaaagggacggatttgaattttaagaaattcaaaatgaatgcattttcttcaggcatatggcagtggcacacaaacaacgcgaaattgccgagctgttgctgaagagcggctacgacccgaatttggtggcgttgtgccattgccggggcgcgtgcattaccagcggcaacattcctttgtcatccgttttgccaccaaggcatgccattcactaccaaacgaactttcgcatattaatcttttccctctttaacttcagtcgctcccattcggcggccattaccagcgacatttgctcagtctgttcacatcttcgagtcgtttcaattctcgatcagacccctctggcgattgccgtccgaactcagagtgccgaaatgatgtaccatttgcctaagggctatttaatgagtttgatacttaattgcagaaatttgctggtctcatacggtgcggatgtcaactcagtggacgaggacggcaattcccctttgatgttggctgtccgcgactcgcctttgagttggcactgtcttcacatgttaatcctattcggagcaaagtaataaaatgccgaggaaatagaaaaaagggaccaaattaaggatacaacagaaaaactcacgagggatctgtcctttggatttggctccggaactgcgcaaaatccaagagacgtgtgtggaggccctcttccaaatggcctgctcccggccaaacaatgcctcccaaaacgcatcccccgcggcattacacggcacagaaagtacccagggtcatcaccagcagggctcctcggccacaggtggcaatggcactaacggagcagcagagcgtacggaagaacgcgacgcaaatgggacgaaacaaacggcgggggccgcagcgagtacgcaggagagactgatgcgcaccgcggcgatgatctcagccacgaagcaatcacgaaaagcgcatttggacgcaggtgaaagcggagggagagggggcgggagacattttgagaggggggggggggggggaagggggggggggttgcacattgtaggatggggaaggat

SEQ ID NO: 2583 - DNA, 4359 bp, Heterodera glycines
  unsure (1)..(4359): unsure at all n locations
ttttgggggttggtgacaattnagggaagtatcgtcgtccccccaccgttcgcgttgctgtgctttgtttgttcatctgctctttatcagcttacattctcagagtcgctgcttttgccggccagcttttgcgagcgtggcagtctcagcaaatcgccgctgtccccgcgcacttcggccgccccgtcggtgtccaactcgtcgatcattgaaagtctctcggttaacaaagaccgtatcagcgtgggcggtggcaacgccgactcggcctccattccaaatgtgccaataaatgcggcaaaccgccgcaaatcattcgtgtcgatgcaactttaccgcaagtccaagctgaacaaggaatgtgagctcaattaaagcggcggtgtgccgtctttggcctattttgcttctttagcgccactgtttgtgaacgtaagccgagaacaatcttgggaaacgctgcagaaaatgagcagcaacccagaatgcattgagataatcatggcaagtggtgacaaaaccaaaacgaggacagaaagggcacagagagaaagagactcaattgccaatgggcaatttaaaggaacaaacaaaaccaaatttagggaccatttggtccattaattgctaattacactaatgccttcttttagcgttctctgcacaaatactgcgcccaacaattggacgattattcgaatcccttttgtggcaatgagcgcgacgtgatggactcctttttggggggactgctccatcagatcattttgacagcgatcggtgattattacctaatgaacacgcccagtcaaaagaagtggaacaagcggagattggttggttttattgggggatagccaaggaaatgcccattcagtcgaatgccaaaacacactatctatatttatttgatacttcaggtcggggttctcgtctcgctggtcaacttttgctatttgtgcttacaaaagagtgggacatgtcgtcaatttgccgccctaagcactttaaataaggtttaaataaataaagcaatttcaatacttttgatcacttcctaatcacttcgtttgatctttccatttgacttttttctgatcagtcagttttagtctccattctgatcagttagttttgattccttttctgatcagttagttttgattccttttctgatcaatcccttttctgatcagttagttttgattccttttctgatcaatcccttttctggttagttttagtaatgattccttttctgatcagtctgttgttgattcccgctttgaaccttttgctgaattggttttcctttttaagatcattgacgcgggtctggtcaattcgctcttcacccatcctgaggttgtcttccattcttctcggcttctcaaccgttcctacgactttcatcattcgtactgtagcggggacgacgattacgatgacgaacttccgccgcatgggtcggacccttcgcaggttttgcggggttaacacggacagaaagacccttctgtcccttcactctgatcattcgttgatttacacagcgtccgggaaatgagctcctgtgccagaaaagatttgcatgtgtggctcagtggtttttgtaagatagtaaagggacaaagggtggtggttcgagtccgttgtgcaacatgaatattttcatttatttttgtccaaaatattaaaaaatcacgatatttgggaattatttttgaaggtttttgccaaccaaattggataatcttggtacctttcgaaagctcttgataatgagaagctttttctaagcaaatgctaagcgatttggtgtaccagagaaaagttatgaggctttaaaattttgtttttcttataacttttgaaatagagcattaacaaaaataaattcagcattaatcgatgcagaatttttttctctaacgatatgcaaaatttcctgtggatctaacatatagaaaagaagctaaacatagcgaagtaaatgttgtttttcctaataataaaaatattagatagtacgccaaaaggagacaaaaaattagagaaaaaaagataatgtttttctctggcactctctatttattggtgcacatcctcggctggtccgtgacatcgctttgaaagtcattttcactattatgtaattgacgctctgcaattttccataaaataaaaaaattttatttcttgaaaaatgttcgaatccgggttcgggtccggcgcggctattgcaattgtggcaatagtaacttttttgagtcaatgtacatgacatttttaagagctcactaaagatacaaaatgttaccaatgaggcagcagcggatgcatggagcgaatcatgaggaatctacgtttaagtcacaccttcaagacgaagtgagacaaattctgctcacttgggaaaacgaacaccggaacaatgattgggaaattgagccatctttgaaacggtcagtttccaaaattagttcacagctcttattcgcgcatacatccgccggcaccatccctaccttattctcctgtcatgctttaatgtatttagaatggccgaaatactcgaggaagcgataaacgattatctacagaacaacccagacccaatggttgatacaattacattaactgtgaaaaaaagatgtttaggatgaacggcacccattcaaatcgcaaccctcgcgcccgctaggctatttgctgaaaatgataacaaaggaagagaactttctcaacaaggtttctattttttcgctttgctctttctcattccattgttttcagttgatcatttcgtatcttctcgccagggacaacccccgactgaatatgttcgctgcccgacttcttttggatttgttgcctggaattgacaccaatgtgatccttgcggtaattaataattattcaattacaattggatttaatcgttcttaggatgccgaatcattattaacacaactctttcgctgggcagaaaatggcgattctcgcgaactcagagcgtatagtatggctttacttggatcggcaatggacgctgaacaagcgcatcaatataggcagcagaacgcgactttgatcccaatcgccttgcaacgccttcagtcgctttatgtaacattaaaagttacgcaccgaaatactagtagagcattgttttcttttagtcacaaatgttgtcagaatatgatcatcaagacgagcaactcagaaaggaaagcaaagtagtcgggccaaccgatttttcacttttacgtcaagaagaacaacatgaagaagcatttattggtacgacttctacaccagattctaatgaggaaatgcgttgccggccatcaatatccaatgtgaatttattcttaaattatttaccaatatttaactgattaacttctgcgaaataaatggatcaaactgtccattatcttacaagtcttcttcaggaagaactcataaaggtcgccagaaaacggcataatgaacgacagagtggattgtcaccaacttcaaagcggtcatttcccgaccaaattacggacaatgatttctatgctgattaattcgatacggggcgtttctaccattgacggcggtaacagcaacagcagttggcgtcaaataatgcagccgattttggttggcacccattcattgtacccgctttcgattgaaatggagcaacgacttattcttaactatttgggaccgaccagtgaatatcaagatgtattttcgggttttatctaactttatttccgtaccttctttagaatcttagtattgttctcgagaaccatgcacttgatgttgttttaaactttttggaaatcgatggtccgaatcacaaatgcagagacattcggcttcttttcgacggcgttcgctatatctcctcgctgctcattcaccgcaaatttgcctgggaatttattgcggcgcagggaatccaacgcctcctgcgaatcaatcgtaaatcaattgcctcaactgcagtgaccacgtgcctttattatttggcctattcagcggatataatggaaaaagttttactgtgttttgttattgattccatccaattcaaaataggtgtgtcatttgcctgaacaagttttgaatgacatcatcgattacgctttgtatgcgcttgaccataaccatgaaagtggtcgtgcttcaattgccatgtttcttgcccatgccctccaatttcgtcccatcctcgaccgttttgaccagcgtgatggtcttcgccgtctctacaattacatttcaacattgaccgtactgcagagaattgaggaagacgggtcagatctgctcaacgacgatcacatcgcgcaaagc

SEQ ID NO: 2584 - DNA, 3232 bp, Heterodera glycines
ataaattttgtatatgcaaattgtatattaaatattcattcatatgtacattaaattatacacaaaataatttaaaaagtactgtcgaaatcaattactgtcgaaatcacctggcacttttttggacggtgtccttaacatctgtcgcattataaaaatgtccttgaagaaagcagcatacagatttttcggagaaaaggatcaattttttagcacccggaagaaccagtcgacactccagtaaaatgtccgcagcttcccgccgaattccacgtccacgtcaacaaggtccaattctcgagtttttttttgtacttggggctgagtttgacttttttccatttttggatgaagtgctgatttttgccaattcagtttgttttaatattaattaatgaacattttttaaaatttattcttctttattcttagggtgataaatttttgcgttcattttttgttaacattaagtgtccactaaattctgtcatagtggtcaacaaatttatttaagaattttaacaatccaattacaataatacagcaattttaagaaaactttgccagatcattctcttatattagctccaattggttttttattttgttgaatctcggaattaaattcattgaaaaaactcgaaattgcatttttgaagttgatttagcgatttttaaaaaatctatccgtaaacaaatcaaatttctctcaactatgacagaatttagtggacaccctaataaattttgggattttttttttggagactttcattcccaatttttgtagcgggtattttatttttgtaaaattaatataggatagacactttgcttaaaattttgataaaattgtagttgcctatattaaataaatctgatgttcactatcactttccacattttgcattttaagtctcaccgacctttgccgccaaatgatatgccaataaatgacccgaccatttacttcgataatatgggaaaacccaattttgtatcaaaaattgccaaaaaagctttatcattaccaccatcatcatcatcatcttcatcaccatcattatcatcatcatcttcttcatcaccatcatcattagacggaccaaaaaacaaaaaacaatcaaatcggcaaaattccgctaaaacaatagaaaaaacggattcatcgccgtcgttcagccgattttcaagaacgaaaagcccaaatgatagagctaaaactagcaaaaacaacaacaaagacaatgataacaacagcgtcaatatagatgacatcatgaaagaaatcacagaaaaatataaaactgtccaattatcgggcaatgaaactgataataatgatgtttggctaaacgaagacgagttggccaaatattcagaagtatggtaatgagaaaggaggaaacattgagcaaaaagaaaaagaacggaattgaaaatggaaagaaaaagaaagttgcaaaaaaaaaaccgtatttactgaattcgaacccccgggggttcatttttcaacccccctaaaaggggggttataattcagggggaagagggtttcaaattcagtaaatacggtatttaaaattgcattcccatttattataaacagagcaaataatgcctaatcaatcagaggtggagcgcgactaagacccgcgaccgcggcatttttcccaaaccagcgatttgcaatcgcgacaatttaaagtcgcgatccgtgaccgcggtattttgaatccgcgagcgcggcacttttgtccgcgctccaccccggtgtctgcaattcatcacggcggggctgggcggaaatccactgttttacctacatattcactgaaacggacagaaggaaaaaatggcaaaatttaacagaaaacggcggagttccgcgcagccatctgatcagtgatcacattgttattctgtacctcttttctcaaacattttgtgataagtgattgtgtgggattgtgagattttttgaaaattttgaaaaattcgcacttaaataaaaattctccaaaaaatataaccaattttatcggacatttttgctaaaaataagataaaaaggagaaaagtaagaatagaattccaaaaatttatttctgagataaattttttaattttttacccaattaatttttcgtcgcgtgtctctttttgaaatcgtttgagtggagggcggaggaccgccgaaaaatatttaaaattgtctaaatcagcaaaagaaagttaacaaatttttgaaattttagatgggaatagcgatgaacacttatgactatcgaatgatatcaaggattaatttttttgttttgatggttttttaaataaacccattatgattagggatgcaatttatagtttttcactatttttttcctgagctccccgaggcctgaaatgcacgaaaaacgtgtttttttcgactgttgttaagctacttttcgagttattagcaactattttctagttttttttatttttagcaactaaaaaactataaaatttttgaaaaaaactattttcaactatttttgcttgtgaataaaatttgctatgaaaaatgcaataaaaacgaaaaataaacctctaagaatcgacttaaaattttttcaaaaaatacaccgcctaagaatcgacccgaaaattttcaaaaatgcacccctaagaaatgaaaaatttattccttttaacataattttttattaaattatgattgagtccggcgggcaacagaacgcatcattgtccaacttttttccgtagaaactaaaaaataaattttggagatgaatttgaggaatttttcatttcttaagggtgtttttgaaaaaattttaggtcgatctcaggggagtatttttgtcaattttgggcaaaactccaaaatagattttttcaaaattttttaggtttttattttaaaaacctagaaaataggcactaataactcgaaatgtggcccgggttcgattaaattcatgtgaaaattgatttgtttccgtcctaaaattgttttgttttgaaaataaacaaatttttattgcgcaaatactaaaaattttggtatcttattattttttgtggtgttgtttttgttattatttttagtttacgatttccggtgaattgttgcataatttatatattatttttttaataattttttttttatatttgcataagaaagatttttccctcctttaaacgtggcaaaaaagaaata

SEQ ID NO: 2585 - DNA, 6352 bp, Heterodera glycines
ataaatatttcaataagaataggagcaatcttgttttatgcacattcattcattatcattttatacaaactgtatacatattgacgtgcatattcatattcatattctcactaaattttacgccttttattttgtaataaaattttattaaaaaaatatatataatacatatatatattaatgtttatacaaaaggaaattattaattttactttaaaatttaaaagccaatttttatgagttccaacaacgtctagcaaaatttttttaaaagactcaaaaagcttcagaaaaaattccaaaaagtcaacgcctcttacatattatgattttatttccgaaaaatataaatttattaaaataatttttatttaaaagtaaatttaaataaatattcattaagtaagtgtgtgttaaaatccatgttttgcttgctccatttcactcttttcactgcgctttatgtcggtgcattaggaggaatgtgttcatcaaaaaaggaaaaggtgcatgaccccttaccaagatacatgcaaccaacgtactcgtttagccaaagtaattaggggaacatttgataaataaatttaaaataaataccaataaattacctgaaatccgcatgtgaactgggattgcaagtgttttcattagaattgtcatgaatttttaattttttttaattttgagggtttggtaatttagggtatttttttttttgaaaatttgaacgtattaattgggattaagggataataggtgtcgataattgtgtgaaaatccccaaaaaaggcaaattaagcaattttcaaattttctgagagctttatcattattcagaatccaatgccgccaaaagttatcagagtacgcctgagcatgggtacaaaacgcctaatcaccccagggaaaatttggcaaaattacgacggacggttgcgcgaaataacacaattccaatgagtggtgcaaaacgcggcccattagcggcatcatcaagcgctgggagctatgcaaattcaccgctaattacccatcaatcgcaacaaaaaaacaaatatttacaacagcgagcatctgatgcatcaccggctgatcgaatttatttgtaggcaaaaaaccaagggcatagcttagccagacacttggcttcgggaggggaggctaatccccgcccgagattgttctttggccttatattttttagactcgattttttaaaaattttttttgtatggtaggatacagtagatctagatccgaaatgcgcctgcctggaaaattttggaattttgccgattttttaactgattttcaccaaaattgcgttttttatgttaagttttaaattataatgaaaactcgcaacaaaactttgtatttttcaaaaattatttattttcattaaaaattttcattttttagtttccggaggggggggggaagggaattcgcaaaaatttaattggattcattcatgggaaaaaggccgcttcaacaacgccggcagcacgaaatgaaccggtccaaaagcaccagaggcatgttacagttggaaccgacatcaccgcggtaccaacagctgctaacaccccaacagacaccacaacaccgtgccatgattaaggtcggttggatgggtgtggagaaggaatggaaaattatagtgatgctcgaaagtctcatttctcgagaaaagtctcgggttttttagtctctgactcgagtctcggcttttcgtctcggtcttcgagactatacgagacttgagaatgagaattttttattcccctaatgattggctttcttgatgctgacagggattgattttaataaatgaagcttgatcaccagggatgggagttatatatgctaaattaaaaaatcctcaaaatgtgtgctaaaaccccaaaaagagccaaaataaatgggacgaaacaaaaatgctttaattggctttaatatttttatgcttataattcgtcaaaattttttttaattagaaaaaatatttaaaggtataaattaatttatatttaaaaccatacaaataccaatccttactgatcattaaatatggtggcgggtgttttaagctaaaacagtcggtttaattttcaggttttcgattgagtaagtttctttggttcctggcttttcgttgaatatattaatggaaaattattttgtcctgtaaattgagcattattaataatgcttcctagacgcatttcgatgaattaaaaaataataatttataataattaattacccttttaatttggtctatctaattaatgtcatagaaacgatttgaaactccgccaccccaattgccatcgccggaagttgtgttcaaacaacggaacaatcagctgaggattgaaggaggacaacaccagcagcagccgcagtcgaaaaggacgctcacacgagtgaattccatgggcagaacgcaatcgtatgccaacgaagtaagggaaaagccgccgaaaaactaagccttcaaggcagaaggaatctcgacgaaccattaaatggtcgagagtcagtctgagcctgtggtataatgtaaataggcttgaattagttctaaattttctatgtaagcttgcaaaatttaaaaaatttgcatctacttaaatcaatttttagagatttgactggtcacaggttgtttgatctgctagatgaaatttgaaattttataggcgaataaagaaaacagagctaaaaaaacttattttttgctcaaaattttgttgggttaagttttgaattgaaaatgcacaaccactaaagacgaaagaattttttaaaaagacttggtttgaatctttcatgttggtcagatagctaaaattatttttatattaattttcttatctaataaatcattttaagatttccaaaaatatgcggagtattgaaaaattcttgtaaatttaaaaacttttataaacaaaatttagctgattacctatttttacttatggaaagtgcctggattttatttgctaaaaacccaaatatatactacatatatatatatatgtgccaaaaacaccaaaaatatttgctaaaatcctaaaaaggccaaatatttgccaaaaattgaaataaaactgctcaagaaataaatgaaattatttaaaaaatatcattgttatccatttcactagcacaatgctaatcaaaatcatttcaatgcttttaggcgataattcatgaaattttaaatccaatgacgatcaaagcagaattaaattgggtctttaggcatctctcatctctgtaagaataaaaattaaaaaccaaatttgactcaattgtacatttatttttttaactgggccctgtttatggaataacctgaaattaaaactaaatgaaccataaaaaagtagcccgagggttgcttgtagtaataatttttaaaattttcctgataaaaattttcattatggaatttctatttttatgggacgaatgccgcaaagaactgggacggaactggcgtgatggaactgaccctttttcatttatcagatgaaggtgaaacatcgccaacgtgctttgcccttgccttcgtcactgtcggttgttggtgcccaaattggggaccgaatgaaacagcaacaacaaaagcttcaacaaaatcgccaaattgcgcaactccaaattgactcaccgcgcggaatgtttgatgacaaacgcattttggacgagaaaacgaccgaagaaaaggaggaactaatggactcactttgggaggagtttaatgacgaaaaactcattagccaaatggacaaccgcccaaaagctggcaacatgaagaagtcgggctcatggtgaagcagtcgaaaaaatttttttttgccaaaatgactgctaaaattggcattttgaaagaaagaaaaatttatatatttgttgactttattgaaatattttttgtaagctttaaaaacatgctctgattttattaaatttcgccttcttggctatttattgagttaattgttttcaatctaatcaaacattgttgggcgtcaatcggccgctctaagttttcttaattagaaatttcaaaaaaaaatttgtaaaatttaaataagaatgtacaaaaagtaagtaattaatttgctgaattaattttttaaaatttgcaaactaacttttgttatgcttttattatgttctgctgattgttaccttgataaaaactttattttgcaaatttttaaaaattttctgttaataaattttatttcaaaactattttcaagaattttttaaaaatttattataaataaataaagttgattataattaataattattcttttaactgtggcgattaaaggaaatttaattttagtacatgttttttgtgtttttaaaatttttcgttagataaaattttttaaatttatatgatctaaagttttaaagagagtttctggggatgaggaaaagtgtgtattttagccaatttttaaaagaaaaaatcttttaaatgttttatgtttttaagctagaattttaatcagaaatgtaatttagtttaagaaatattttacaaaaagaggaattaatggaaaaaatctttctgttcaagtaagaaacgagtgaacaaacccacaaaaaagcagatgattgagactacaagtttaccaattggaataatttatttaaagcattataaattatataaatattttctatcattctcaatttacataaatattttatactcagattcccattacaatgctcaaaattgtggattaatttcggaaaatcgcaaaaatttagcaacccgcaaaacgtaaaattgtcgacccccaaaacccgcaatttcagcaatccgcaattcctgatgtacaaacatattttctttattttctttaaaagtaattcaactgccgtatttattcatttccgagattttcgcttaataacttgaattaattaaaaaaattctatgcataatttataagtttttgtgctgcgcattttacgtttttatgtgttggtattttgcagttctagtcacttaatagtgcctattttctaggtttttaaaactttaaattttgaaaaaacctattttgacctattttattttgtccaaaatttattaacaaaatgcattaaaaacgaaaaatacacccataagattaattataaaatttcagaaaatatacctctaaaaaatgaaaaatattctcaaaaattcatctccaaattaatttatttatttttgttgatagaattttgaaaatattatgtatctcaatactgttttggcttaattttgttgctttatggataaaatttactacacccctaaatttgaaactttttggcacctattttctttccaattttagcatctgttgtgcgttttttagaacgtaaaaactaactattttggcaatttttagcacctaaaaatataatccctagtcattaccagttaattacttttttccgttaatttccgccttttctgctgttattggtgttggcttatgtcttcatatatatgtcatttatacattataattttgtataatttgatgtaaatctaattttatgtgtaaattacataataataacaataataatattgattaaaaaagaaattgagaggattttttatagattttcatttaataaaaaaaatattttttcaatatatgtataatattattattcattcattttaaaattaaattttttctcacatctttatttaagtcaaattaaatgaaaaaaaaacaacaattagtgctcccatttttttccaataagaaactatgctttttaatatatatttttgaactattttttttgaagcgatctatttttgtgcctcgaatttgatcagaaacaactgttagtgcccgcctaaatgttgatttatcaacaatttttgctaattttctcgttgtttttgtgggacggtgtgtttggcggcgtttgcttctccacaccaaggacaagctccagctcctccgcgccggcacagctgatgcgcggcggtggtggaagcagccgaggaggacaaatgccgtcgccgcaaagggaacgaaaaaaattgaaacgggcaaaaagtgcaacgccacggacatcggtggcaacggttaatccgcattcatcactctcgagaacccattcagaagaagcgattgagggtaaaattgactttttgatttacaagcttatataaaattacgtatttaggttctagaaatttttgtggctatattcgaaatttaaggaattttaatttttttttatccattaggtataaaacgaggccctgctgaaaattgcatggcaa

SEQ ID NO: 2586 - DNA, 7669 bp, Heterodera glycines
tttcagccggaatttctataaaaatgttcgtgtgtaacctttttttgtctattcggataagtaagaaattgaaatattcgtattacttttcctcccttaaagctttataatgaaagcgtcgttgtctattttggatttgccgttgcaattctgtaattccactttggaatccaaaggaatttgattcgcttttacaaaatagacagtgccgaaatttgtagatcggctaaaccttaactgaaacataccatatcagcgagacgccatgctgatttgttgtaatcataataaaaaggcccttattgtttaattcggcctttcctataagcacaatgtgtttgatgggctctacaaaatattgcttctgcaaagcaattattttcttggaggctttaattttctgtagtcatttgatatgcatctgctatttttctagtcacaaacaccaatatttttcggcccgaattttataggcgtgaaaagtactgatttccaacttctttctattcggatacacccaaaatttgaaaagcatctttaatttagcctcttttaaatcttaattttctgaaacccgaatttagaaaatatgaatgtatttctgcgacgccttctatacttaattcatccataatgggccaaaaatcataagttaagaccaaaagagggatgttagtttcagccggaatttctataaaaatgttcgtgtgtaacctatctttgtctattcggataagtaagaaattgaaatattcgtccgagtagccagtccactatttttggccataattgccttccttgccctatttggaagcaacggagcatccgaaatgaaggcaaagcccatgatatgtctcccggatgctcccaccagtatttggtcattgcctgtcgaccctatctgccctaattgggttccaacgcaggtccccgttccttttgcattaaatatatatcgaccaaacactgtacaatacaaaaccgaagctacagcctgcagctgcattttaacgcgcatttcaaggaggagaggattttttggtggaacatatgaagaaataagtgcctttcattcggtagtgcctacggcaatttgcaggaaaatggcagttgataaggactctccagcaggcgaattatacgttaatgacgaaacgttaatggcaacaaataattccctagaaattgggtggggaaaatggccatcaaatttgttttggagaacggaagaaatcgataattgttatgtgtataagacaattgtttttacacgtcatggaatggaggggttgaatacaccaatcggagagtgctctaattgcttttataaatcaggcgaatgtcaatgcataaaaattagtctgatttggacccccgacaagacccaactttgcccttttgtttggttgtcaaaatggtctggtgaatatgcaagtctaatatggacgacggaaagtggtgattttgcattgagttttgaaaatacctcgtctcatagtcagcccgggtgctatgccgagtcgggcgaactaattgtgtcggaccaagcgtttgccgtacctgtttcggacttccaagaaatggtcgagaaagccaaaggaagcggcaccaggaaaacgagagaaacaaccgaaattggtcctgtttatagttctcagcttgctgcacagcttacagccttaagcacaaaaatggccataacgactcagcggctatttacggagacaattcgtaaaatttgcacgagcatgcaaataatggcagaccaagctttaaccttgtctataacaaacccatcgttattagcgaggtttttcctgggaaatccttttttatcggctcgattgatcacggaaaaactaatggaggtaaaaacgtgttttcctatttatgagggcgaagtacattttgactggcaaaatggtcactgttttgagtttcttccggtaacattttatttataccgtcagcaaaagcacggttttatcgacccaaacacgttaattatccatacaaaatctaaagaggtggattgcggtaatggaagattcatttttatggagatttttggcatgataatacgatacgatcaaaaaacaggaaatgtcagccaaatttcaacagaaggaataagggaaatcagccgatatggaaaaatagacatcccagaaataaacctcccttttttcaaaaataaagttttggccaattttacggaactttactcgcgtgaaaatttcaaagaaacagtggaaggagccaaaataattcaggagatttcccgcttatcgcgagttgattcgtggaatagtccctcggaacacaaaaaccgtatttcgggtggaatagtgagcagcggactgttttcatttttacgtggcggtattctgagtctaaaccaactttgggtttttggatgctgctgttatgttacgctaacaattataatccaaattttgttaccgtcgacaatcgctcaggccttacagtacctcaatcttggaggaattttcttcagattctttcgatttgcatggcatattttctttagggggaagagaagaggtaaaaaaccccgagatgaaattgaggagggagcctatcccgtggaaaagaaaaccatacaaaagaaagactcaaaaaatcggaaaaggctaactcgtacgcactcagttccgctaacggaaagatggccatctccggaacaaaaaccgaccataccagtaaaaaagggcttaaaagtgagcgtgttggcaatcattgaatggaacacaaggtgcgatgaaacttttaaaattgaaggattcgtttacgggaaaataactcggtttcaattggacactggcgcacatgtgtcaatctgcagcctacgcactgcagaaaaacttggaataaaattgcttagtcctgaggtggctggtgttatcggaattagtggtgaatttgcaccagttattggcagtggaaaaattgaattggaactggccggagtgaaaatcataacagaagtggcggtgattgataaggaaattggtaaaggaggtgcatatgacatgctaattgggcgcaacacatttaaaaagacacccttctacctcgatttacaaaatggttacctgatcaaaaaaggcagcaacgaaataatggagtgtggcacctcacagagaaaaattgaaaatttggagcagcatgtcggaaaatcggggaaccgagaagcagaacggaacgaaacggaagacaggcaattgaaaagttgcttagaacaaaataaaaatgccttctctaagcacgaatatgacttaggaacttgtaaaattatggcaccaaagattttaactacaacagaattgccagaaagggttaaaccgtaccccgtgccggaaaaatacgaaagcgaattgaaaaagcaaatcgataaaatgttgagagctggcgtaataaaggaaagccatacgccttgggtgcataatatggtgcttgtaaaaaaggcaaatgggcagttaagaccatgtgtggattttaggccattgaacaaagtcactattcccgacccttaccctttaccgagaatggaaaaggtcatttttcgggtcgcagggaaaaagttttattcgagtcttgatctcgcctcgggcttttggcagatcccattggatcccgagagttcatataaatgcggaataattaccccatggggtgtttatcaaatgctaaaattgccttttggcctgtgcaacgcaccaagcatttttcaaagaacgatggacaaagttttggatgacataaaaaatgtaaatgtttacattgatgacatattgatacattcgaacacattagaagagcatttggaaagtttggatttagtttttaatcgcctacaaaagtacggtctaaaattaaagggagataaatgcaattttcttcaaaataaatgccattacctggggcatattttgtcggaagcaggctatcaaccgtcgttgggcaataaagaagttattgataagttcccggaacctacaaatgtgaaagaggttaaacgatttttgggaatggcatcgttttttcgaaaatttattccgggttttgcctcaatcgctcaccccctcaataaattgacaagaggaaatggcacggaattcgtatggggaggagcagaaaaagccgcgatggatgaattaaaacagcatttgttgaaagcaccttgcctacgcccgccaaactacgacttggccttttacttattcaccgacgcatcagcaatcgcttatggcggggctttaatgcagactaaggataataatgagatgcatgctgttagcttttggtcccgtacactcactccaacagagagtaaattaccacccactcatggggaattagcggcaattgttcatgcgatacagaattttcgagcaattctgtatggggcagaattaatcgtactcactgatcatcgaccattaacattcctcttccaaaaagccagtacaaatccaaaattaaaccggtggctcatggctctgcaggaatttgagccgaaagtaatatacattgagggtaaagcaaataaagtggcggatgctttatcacgagtccctatcccatgggaaaatgtggaaacaaaattaaaagaggatgtcccttatgtgttggcaatagaaagtagtttgaatagacaaacatttgtaaaagaaacaaaagatgatcaaattatgtcaaaagtaattgccaaaataaatgaaaactgggcagagccaatagagaaggaactggaaatatattttaaaaaccgagataaattgtatgtcgaaggcggaataattcgaaaacatccccagggccaatttgtggtaccaaagaaactaaaagttgccattttggaacaaattcacaaggctcattttggaatcgtacggggaaagtcaaaggccagaaggtatgtatggtggccaggaatgtcggaggacatcgaaaattttgtgaaagaatgtgaggtgtgtcaaagaaatggcccaagcccgccccgattggatccggaacaccgttggcccgcagcaaaataccccttcgagaggctccatgccgatttggcaggcccggtttggggaacgaattttttaataatggttgactcgtattcacgctatccatttgtctttcagacaaattcaaccagtagcgcaactttgatcgcatttttccgggacatttttgccttatttgggtccccaaaaaccttaattaccgataacggcccacagtttatttcggtagaattcgaaaattttttgtgtgaggaaggggttacccatttaacctcgccaacatatcatcccgccagcaacggagaggcggagcggttcgtgcgaacctttaaagaaggaattaaaaaattgttggatgaggggagaaatctccgtattgcacaattcatccttttacaggaataccgatcctcaccatgcccaattttgaaaggaaatagtccggcacaaatgtttttgaaaagagaaatgcgcacgagtttggataaaataagaatttcccaagtggaaagagacaaaggcactcctacgggcgaccccgtgagagataaaggggctcaaaatcagcaaaggcagttgccgaaatatgagccaggagattcggtatggatgcgcgaccaacaggacaaaaagtggacgccggccatactgcttgagccaataggagagaggatgtggcgtttggagatggaagggggcggagaaagaactgcgcatgtggagcaaataaaagcgcgtcgaatggtcgccggacgagcctagcccacatcattctccggcaaaactgttttttataaataattttctttttttttttttgcttttgtaagtctaaaatttttggtttccattccaaatttcgtatttttttttgtaattcatttttgtttctgcaagattttcttttgtcgctttgtccctcttctcgaacctttccgacccaaatcatgtcaaccaccgaaagagaagtcggcacttcggtcgagaatcttgaaaatgtgccaccacagcagagcaacgtcgccgagctcgaccaggacgggatgaccaagcaacgcaaaaagcgcccggccattgcaccagtgactgttgagatcggacagttgctggaggccttcaaatcatcattgtcggccgagatccgttcatcagtcgaacaacttcacaaggagttgacgggagaagtgcaccacgcactgaacgcactttggaccaaaatggagccggtgctcagcgatcagtcgcgctgcattgcggcgctgactgatgcgattgacgagttgtcactcaagggaaccgagcaatcggtaaacccatccacggatggaggtccagctgagttggccaaagaagcaccgatgaacccgcagggcggaggtccagcccctgagctggctaatgaggccccgttaaacccgcagggcggaggtccagcttctgagctggctaaagggcgtaccagcccagctcgttcgaccggaagagcatggcacggaaagcaacatcgacaacccgcacgcaaagccggccgtctaaactacctgatgcgccaattggagcgcgaggtcggcggcagccaaatggtccgatccccgcatccgtactgggaaaaccgccgagggaatggttttggaggaccgcgcggtgggggacgcggaggctacaatgcgtatcgcggagaccgttctgagcgcgtcggcccgtcaaacaatggacgttgaatctgtggtgtggtttggactccggaaggggggagagatgttgaatccccttttgacaaaatcatttatttaatttaatgatcaattttcacttatttattttgtacaacttttcttctctctccaccgatttcctctcccatcctaaccaatcgttacactttactgtaaacccaagccaagccaatttgtgtccatcccagctcactctcgactccaccccttttctcttttgctatttaaactgaattcattccttgcattattaccctttttttttactcactttgactcattcccattttacttgcctttctcacttttgctaaataaactttcattaacaaacctaaagtcttacttttgattgggaaataagtcgggaacacaacactatgctatcaagcgaagaggtttaatcaaattttatttgatttttgctaatttttcaaaaaagcaaataacaatgaataaaacagtaacaataacaacaaacggctcaagcttgattggttttccgctctcttcttttctgaaagggtgctgctgcctttcttggattttttcgaccagcgccgccgccattagccaccgaatgttcccgcggcggttgctctttgcctttgcccaatagcaaatccaacaaagacttggcgccggacaaatgcgaattcttaaaataaaaataataatttaaatgtcgaaattcgatgagaggtgtatgagccatggagtggaatgacatttgtgggatccgaaaattgaggatttttcaggcagaaaaaggtttatttgtttcgtgtgagcaagaggcattcgaagtccaccgtcttttcaagttgcggaaattagaaaataaatctttttttgtttgtttgtgctgaaaattgcaaactttta

SEQ ID NO: 2587 - DNA, 1902 bp, Heterodera glycines
aaattttggcctcaaaacggaactttaagacttttgctctgatcactcattcatcccttccctccccccccccctctgatcagttcgtcttttgctctgatcactcatccatcccttcccccctgatcagtccctcttttctctgatcactcatccatcccttcccccctgatcagtccctcttttctctgatcactcatccatcccttcccccctgatcagtccctcttttctctgatcactcatccatccctttctctcccttttcccactctttcgcttgccttcttctgctttttctttgcgcttctcccaccgttcgcatttgtcccataattcgttcagcagttcattcagtgtctcaattgcgtctgttctttttggcattgtttttatgccgacttttccgccccatttgtcaatgcttgcgtggatttgcttttcatgcttacaattaaaattgtcatcccccgcttcttcatgccaatttcggctttgtcccattcggctcaaacgttcataagtcaattgggacattcgctgttcggacagctaacaataagtaaatgatcattaattatttgttaattggacgtttagtaaactagccacgattaatatttgttaattaatccgctgtttagtatgttaaccattagttgtattaattatattgattcacttttaatgttttactcactcttctttcttcagttgcttgtgcttctaactctttcctcttcaaattttcttcagttttaatacgcaattctctttctctgttgtaagctgaaagacaatatcaaatggaagcccatttttaatcacccctaatttttttatgaattcccctagcctaattagttttaattacccctaattatcttccactgatttcccttacccttttccactttgatcaattccgcctccaatttggcgtttcgccccttctgctctccgttggtccgtctcagcagtgcgatttcgtcgtttgcctcgttcagttccgtcttcaggtgttccgtcgagctgttttgcgcgacacttcgctcgcttaactttttaattggcatttactctttaattatttttaaatgccccaaattggctttttcgccagtccattcacctcagatcgtctaattcggcgattagcttttggtacatttccttgcccattttgatttggaattccgcgatgctcagctgatgcttcaattgcgcctcgttttcgcggagttcggccagttcggcacttctgttacttatttcggcctttgcgcggtccaattccgctttatagcgtctttcgcggtcgtccatcagatcctccgtctgacgacgcgattccgcggcttccgcttccgtgtgcgttagcgattgttgtagccgttccgcacgctgacgccacgcttccgtttgcgggtgttctccgagtgcatgctgaaccttctcttccgctttgaccagcctttgctggaggcactcctcaattaattaattgatcaattagtgttcgttatgcctttcgttgtgcttaactaagcaccttttctgcctccaatttgccaatgattctctcctgctcctcccattccttgtcgcacctttccgcgtctgtcaaacgcgtctctctctccgtgcgcaatcgctgttccgcgtggtgcaaccgacctccacaagaagttgcagccaaatcggtgatgggaacaagcagacaaatcgcctaccttttagcgtctccaactccgcgtccgcctcggccatgcgttgatgcacttccgcgtcattttcaacacgcgttcggtccgtttcttccgcttgcgttatcacagccgcaagacgcacttgcaactcggacagttggacagtctttgctcgttggtctcttcaaaatgc

SEQ ID NO: 2588 - DNA, 1135 bp, Heterodera glycines
  unsure (1)..(1135): unsure at all n locations
tccatcgatcgcgacttttccgcgaagggaatttcaaccaaatgaaagccgtcgtagaaatattcgcgcgcgagtgtctaaaaaatgcatctgatgagagtgaccatccattcggatggaactgctcacacaaccactcggaattcggtcggccgattgggggacgagcgcacaaagctttggaggctaaacgaagcgaataattaagggttttatcgactaatggacatgaaaaacaaacagtgttcgttttatgcgtataacggacgaggacaaacaattgtttgtccatacagcgcttcagaagggcacggtaaagggcggaactgccggagattacctaaaccaaccgacgacgaaggggaaatgttgagtgaaaacaaaagcgaaaagcacaccgaccgattcgatgggatagacaaaaacggcggcgcccatccgatgcgaatccttcagcaaatgcaacggtttgaagccgatcacaacaatgccttagggagtcgttgttacggtagaatcgttacggtaaggaaatgcgaatgctttttcccttaggccgttttatcgtattccttccgttttctctgcccacccggcttttccaatcggcgcagcttctccaactcggcccgactcagcacaacttcgaccccgcccacttgccgactgaagcccaactcgccctcgaacacttcgtccgccggcgtctctttttctttgccctcctccgccggcatttcttcgggcgcctctccctcccgtggagcaacgaggtaatggacgcgttgttcaatcctgcccagataaagtgacaaaaatggagttcatcacaaccaacagctgtggcacagtgtacctttcacccgtttccgtgtccatcataaccgcgggcggtttgccctgcggtttgatcaaatagtaaaggccaactgcgaattcgaagttgtcgcccattttgaagggaagcgaagtggtggaacgcagcgcgtaattcttcaggcggagactgaattcagtcgacaaattgtcattcattcccgtacattctcaccccgactgaangtcggccggactcgaaaagcgggacaacgatgggtcaacttctgcctgatgccattagaaagtttcaaaatga

SEQ ID NO: 2589 - DNA, 6403 bp, Heterodera glycines
  unsure (1)..(6403): unsure at all n locations
actgaattcgacggggtaacgccgttatattaagccataaatgagagagagactgactatcggagcagcttntggcacagatagagcagctcagcccaattgcaaacgcccgaaccgccgagaaaagtgtccaaagattggcgaaggtcagccncactcaaaaggtcgtccaatcccttcacaaactccgcgtccatcgtgcccatttcgcggaaaacgaacactgtgagaaaagtcaacaggaaatgagagacattttgccaaaaggaaaagcggatattgcaaatcccccgtggtgagagagacgcactgttgtcaatgttctccgccttgtcatttgtgcgctcagtgttcgcaaataccacagcacacatttcgccccaattgcccatgcagcaaatgtcgctgatctgattgcggacggcctcaaaacccaaaatgaaatggagcaattacaatcccgacgattggcatgagaagggatcaactaatggaagacatgtaaaaaggccatttccgaatgcattggcagaaaagcccacttgtaaagccattctgaagcgaaatccgttgccaacaaacatttcggcgccgtaattgatcacgaaaatgcgtccctttttgccgccctcataaacgatgctctgctgctccccctcccattgctgctgaccgtttgaatcgtccattcttaatacaacatttttgtgttcaaaaacccacaaaactctacaaaagtaatcgcgctcaaattaaatggataaatcaaacaattaataaaacccattttttgaagaaaagataaaagttttcacatataaaggaaatgagggaaacactacagtaaactgtgcacaatttaaaagagaaaagaattcgaattgtaaaaaaaaacaatttgttcaaaatggaaacatctgacgaaaagtggccaacacaaagcacacagaacaaatgagcaggaggaacaaggctacggtatccaccaaaaaacactgtgtgatcagtgtcggcacaattcagacagatcataaggcaatgagcggaggaagtcacccactgatcagaaggaacccagagaagtgagaggaaagaaagacttgaaacacaatcggacgacgatggtaattacagtaaaaattacagtatgaaggcataagcactgtttcatttaatgccatccatcgtcagattgcctatggaatacaacaaagaggaggaggaggatttgatagcgaatgctaatagaattggaaataggtacaacacaaattgccgaacacaatcaaccgatcgctctccgaccactttctgactctgtctgtccgtctgctctcattgtatctctccaccgtcttcccgcagttcgacgtccctcccattttctctctcgtcctcctcctcctcctcggtttgcagtcggtcttcgtctccctgaccgccccattcgtatccgcccggtctttggtcggggtccacccgcggcaacggggcggggtcaaacagccatttgagcacacgcggcgtttccaacacgcgaaagcctccgggctgattggggaacacgtcctcgagaaagtagtacaaatggccacaggcaatcccttgagggggggggggggaattaacaaacattccatgaaaatgggaaataaacacacggataactcaccgaaaatgtccacaataacagtttgtccgagcaaaagtgagaagaacatcagcacccaaggctaaatgggggagagagcgaaaaatgagggaaaatggaggaaaggggggacaaaccaaataaggggcagaaaaggagaaaatgccgaaaaaattcatccctttaaataaataaatgcaaaaaaggaaatggcgaaaacggaccaatgaaagggtttcttctcgaccaaacgtaaaccaactgaaaactgaacaatgtaaaaaaaaataaaaatatattaccataatggtaaatgcatggccaaggaaaatgagatggacaaaacaggcacaaataatctgaaaatggcacggatgatgaacaaatggaagaaaggaccatgaaaactgcgccaaaaatgaacataaagacaaagtcagccgttcgaccacggaaagagccctcttccaacatggaacaatgcctaaaagagggggggggagaaggaataaaaggacgaaaaacaaataatggaagacggagcagcaccacctgtaggtgaacacgatgttgaagaggaaggaaaagccgacggagccgaggtaacagaaggaagtgagcaaacgccaaaactgaacggagggacgaatttggcgagaagtacaaaacgaatggaccacctgccattcgcgaatgatcaaatgccaattgaagtagagatgaaacggggtgaccagctccaaatggaccgccaaagtggtcacctgaaaaagcaaattggcaattaattggctactgccctttttcgattggctttcaccacacaggcggtcacataggcacgagtcacctgaaaaaatggactaattatggtaatgaaaccaacgaatgagccaaaaaaacaaaacacggaaattaaagggaccgggaataaaaccaatcaaagactaaagcaattaacaagaaataagacgaaaagctaccggcggcatctcagcatatgcttggatcactgattgcattttgttggcttaaccattcaattatttttgtaaaaatggtgcaaacgaacaacgaaatgagaggacaaagtgccaatatatacgtcaaattgtcgtttaaacagccgagttttctttatcaagaaataacaaaataaaattaaaaaacaaaaattttccattttatcgctttgtctttttctcatggagtcaaaatttgtgatttctccgcgttcaactgcagcaattccgcaaaaattttgttgagccggcccaccattttgctggtgtccttcaacagtccggcagtgcacaacgcattctcatacaccttgaattgtgtgttcattaaggaatgtgccctcccatcacatgcgccgtgccacacctgtatagcaatttcagttgccaattcggcattttgacgcttcagacgcatcagtccagcgacgacggggtgcgaaaggttcacatgcaaaacgggacggagcatgacgaggtgttccatctgagaacattgggaaaaaaccttatgggagaaagaacgcaacctctttgatttccgtaattcgaagcatatgacgagcagcgcccatatcagcagaaatggtgatctgtcaagtcaattaaaatttattacaataatttttacgtcagcaacatccaaattttcactattttatgcataggtaaattgccctggttttctcccggtttaatcccccataaatttgtctttctgtctcattccattccaagccatccttttcttctcattcccaatgttattgtgccatttctatctcatttaatctctgttatatatccaatcaaatcttcattattccccctggttttgccaattattgttagtattttatttattccctaaaccttataacacaagaacaatttgttcccattttacctaccataaacggatgttccgattgtcttccgctgggcttaatgtcactgacgcgtacagtgcccaaactgtcgcgcaaccagccaagaaattctgaatgccgagaaaaggatgatacagtaaatgtagaaagtgagagccaatccgagtggcaatagccaacgaacaaacgaagcaattaccctttttggagctgtccctcatcaattcagccgatgattctttgtcagagtcaatgctcagtccctcctccttcgtccatttctccagcgactgcaaagatttcatgcgaaattggggcattgacaaaaagacgagttcatccgctgggtctgaaaaaatggaaaaaataaatggaaaaagggtggggggggggagtgacaaacccgacaaaaacaacacttcgtatttgtctttgaacagttcaaagtaaggcgacgtttcggcgagttgacggctaaataaaagtgacaaaaatgtatatgtcttcgtgtcataccttggtgcgtaaatgtaataaatgttcttttggtccgattgcattcgttcgacatattccgacagagtggtcaaagtgccagaccgaaaactggacgattcgaacaacagaagctgagcaatttcttcctgaacaaagttttgatgaagaaaaatgggataaatggcaatggaaaacaccttggtggtgttggactgttccgtgacaacgccttccttgaagaacattgaatagcccatgtaaaagtcgttgtatttgactcggtctttggacaattgtgagagaaagaagcgcacacatcgttcggtaagggtttttctgatttttctgaaaaataatgtaataaagcatataaagaggggggtaatatactcgagaattaggtcagtctgtagcatttctcggcttaaattcaacggcacatctgaaaagatacgagataatgttaaagcgagcgacacttatggcgttaaatcgcaaaacaaaaacattggccaattaataccttcagaatcgacgacctaaaaggggaatgaatgattaattttgctatggcaaagtgcaaaggaccccaattaggaagcgtaaatagtgcggcaccaactctttggcatttggcttaatcaaaacgcgttgattgtacagcgaaatggcgatgtcccgctgtgaatctgctgcaaattccaagtgggagacgcgctttgtgggcactaaaatgaaggaaaatgttcaacaaaaaagatgggatgacgaacggaccataaaacagtgcacggatgttgatcggagaatcggtctgatattggatggtgtactggggacggtcgtctgccaagtgggggtggtgcgtcttggccaattgtctgtaacagttttgaattaaaagcgtaaatgggtgggttgtagccacttgaaaaatgtctcgtgcatttcgggcgtcgtttcgctcggtgccattgtccacaacgcgcgggtcacatttattcgctcgccattcacaaatattggagcggtcacaaaataggaatacctttaaacgcaatcaatcagtcttaagcatttgctgatgttggcattgcccactcacttgttaatgacatcgaccactttctgcggcacagcgaatttctccgcttctcccgccttcaagtgcaattcgaccttcgtcccaatgtcggcatctgctttttcttcaaccgtaaaatgtgtcccgccattccaactccaaatgtgccccatttcttcgccaagttttcgggtggtaacggaaactttctcactaaaacgcgtttaccaaaacgaataaattgcaaaaatatacaagaaaagacctgacaacgaaagccgaataaaagccgaccccgaattgacctaaaaatgttttaaaaaatgaaggaaaatggcaatgatcagaccaaccgatgattgcctcggcagccgcggcgtttttctcgtccgctcgaaacgccttggacccagacttggcaattgtgccgagcaaattgacgagctcgtccctgctcatgccaatgcctaaaatggaaaagacgcaattcagaaaacgcaattctgattttattttatgcctgtgtcgacgaatgtgagttttttgcccttttcatccacttcaattctcagctcgagagttgccgttgcttcggctgcgtcgccttgcaattccgaacaccgccgtttttccagtgcgtccgacgcattcgaaatgagttcacggatgaacacctcaaaataaatgaacacgtaatcaaatgaaatgctcaattcttcgtccgttccacccacttcttggtccgaataaagcgacttcgcaacgatgcccaaaagactgtcaatttcggcttgaaattcataattttcgggtgctacagcagccgcctgtgacgaataacggcatgttctgaagctgttcgtgctggtggtggcggtcagcgattggggacagtgccaaggaactgaagcggaggaagacagaagccgaccaaaatgaagacgaggccaacaatgtctacaaagcacacgacgacagagagaaggggcgatggaaaaacgcattgggaaaatgccaaaaaaagaagtaaaggaagagaaataaaagtacaaatattaaacgaaaaataaactgaaaaattgaaaacagcaaagaaattgcaagaaatattagacgaatttatagaaggaaataatgcgacaattggtaagagtgagttcgttattctaccgcctgatttcttcaagatgttttaatcggagagccgtcattgtgcagggtggccaattgttcaaattgtcgacagtaatcgacggaa

SEQ ID NO: 2590 - DNA, 1963 bp, Heterodera glycines
cagacttggcaattgtgcccagcaaattgacgagctcgtccctgttcatgccaatgcctaaaatggaaattaaggaattaagaaaacgcaattctgattttattttatgcctgtgtcgacgaatgtgagttttttgcccttttcatccacttcaattctcagctcgagagttgccgttgcttcggctgcgtcgccttgcaattccgaacaccgccgtttttccagtgcgtccgacgcattcgaaatgagttcacggatgaacacctcaaaataaatgaacacgtaatcaaatgaaatgctcaattcttcgtccgtttcactcacttcttggtccgaataaagcgacttcgcaacgatgcccaaaagactgttaatttcggcctgaaattcataattttcgggtgctacagcagccgcctgtgacgaataacggcatgttctgaagctgttcgtgctggtggtggcgttcaccgattggggacaatgccaaggaactgaagcggaggaagacagaagccgaccaaaacgaacacgaggccaacaatgtctacaaagcacacgacgacagagagaaggggcgatggaaaaacgcattgggaaaatgccaaaaaaagaaggaaagaaagaaaaataaaagtacaaatattaaacgaaaaataaactgaaaaattgaaaacagcaaagaaattgcaagaaatattagacgaatttatagaaggaaataatgcgacaattggtaagagtgagttcgttattctaccgcctgatttcttcaaatgttttaatcggagagccgtcattgtgcaggttggccaattgttcaaattgtcgacagtaatcgacggaattctctttgagcatctgctcataagcatttcgcacatcttcggggagtgttttggtgggcgaattgtccaagacaattggatgaaactgagaaatggtagcggatgagtccatcgacaattcgccgttcatcaatgtcagctcaatggcagtgtttggcgccgacgacgaggaaggcgacgaaaacgattctgttgttggcacaaattgttgcatgttgttattgttcaaattgacggcattgcgaggctgaaagctatgttttctgttaattatggaaatgaatcgcttcacttcggccgccgggaaattctgaaggaccgaaaagtctgtcgcagtgcccgaagaaagaatttgtgggtggtcaattcgataaagacaatgatgatgcaccggcaacacttcactgtcggacaactgctgccgttggggtatggccatgtccaccgtcgtcgtcctcccaccaattgccgtgttcggcacgtgcaaatgttgattgtgagacattactacgccactggtcagatgttgttgcctctgcggaggaggagcggtaactctgatgagcttctgaagaaaactttgtccttccaacgctttgctctatttttgttgcatttgcttactcggtgattgtcctggaccaattttatctgtctttttggccttttcggctgcaatatgttgcagtgggtcttcagctgttctatgaactgtgcattttcctgctccacaatgccattttctgcgtcatttcttatgtctggcggatggcgtcgattttgctgtggacgaaccgtctcaacggacaacggagaagaggaacagctgttgttgttgttgatcaaaacattgggcgttgctgttgaagttgttgatgctgtcttagtcatctccaaaatgctactgctgctgctcggctggtcgtgaaattccgtcgtggcggtgcctttggccattaattcgtcgtaatccctcgcgaccaacgacttgaacacggtccacgaatggtagcgtggttcatggccagaaatttgataagtaaagctcaattccttcttcatccccaactgaaacgattgaaaaaaattgcaaatgcgaatgatttacaaattta

SEQ ID NO: 2591 - DNA, 5633 bp, Heterodera glycines
aagcactcactttgatctcattttgctgtctcattactgacactgagttttgaatgtcaggaattatttacagaaaataattggttacctgatccgatggattgttttcccatttcggtgctttctatcggacaaaagtctttcttcaatttgctaagcgacaagagaggggaattgccctcatttccaaccaaaacatcgtggataatttggttactttcgccaacaaataaccgaatttcgcccaccacagttcggctagcattattattgtacacatgagcagcgtttttctgtaaccgtcatttaagaaaaagtaaagaaaatgctgtaaaattaccttttgagtgccattttgtaaccatttacatttgagcagttcgaacaaagatgtaattttgtcatttacattaatttggaccatcaaaaggggattttgctcactggcaacaacaaattctctgtcctggttcctcaatggcttaagtctgacaaccaaatgttgtgggatttcacagtttcttctgtcatctgaaccaaaagtaaaaaatccgtaatggcataggcaaatgccattgaattacgaaaactcacatggaaagtatttgagcaaagctggacagtaaggcgtcttcaaattgacaataaactttttccttttcggtcgaaaagatgcgtactgaaatgaaaaattggtgaaggaaagtcaattaataatcaaacagaaaacgtaccccttccattacgagttgcttgaactttttctcgtcaaatgacaaccctttgagccgtttacgccactcgaaaccattgagaagcacaaacaattcccgggcatcgcgtggaatgttctcccaatcgacgtcctcaatttgcgctttgcacttccacactttgaaggtgttcaaatagtagttgcgcacttggtctttgtccttgttgaacttctttttgagcatgaactttgaaattgcgtcaaaatctttcccatgctgaaatttttggtttaggcttatcaattggaccgaaaatcttaccaatttcaaagcctcgtagaacaccgcttgttcgtcaaaggtccaatacattcgccgagttttgtcaaccgtttcaacggaatttgcatttgttgtacactttgaggacgaagcagtaaaatcagaagccgtagtttttatgctcaaagaaaggcccgcagaagtggagagaggaacattatgctcatttttgtcagccgaaacgcaagttgaagaaacaggagttattgcttttttattgctggacagatttggaggcctaaagggaggaaaaaataaatttaagtataaatttatctgaatttgagttagcacaaaatatttgaatttttagctaaatcccgtgttcaagcatttttttatcttttacttaaatgccagcctccttctcgacactataagtgctgttgaggagtcatcgggcatcataccatggacatgtgacggcgaattcatcggcaccaagtgcaacaacaattgtaaaaggttcatgggaatctaacaataaaccataaaggatgttcgagcaaacaaaattcattgaaagcaactcgattaaaattgtttatgaaaacaacaaaaacataaaacaattgacagatttgatttgatcaatctttgaacacctttctgttcccagttggaactttggatttgttagaggcgcgggaaatgttcttcagccgttgcaactcctgcttgttattcttttcccgcttttcctccgccttctcagcaaaataatctttgtatgggtctgaagggagagaatgagcaaaaaaaaacggaagaaataaaaaaaagactcgcctttttggtcgggaatttcaatgagccattccttcgattggttctcggctcgtctgtatccgtatttcggcttccattccttaacatattaacgattgaacaattcgccaatgtctcagattaacctgagtcgttttgtcccagactttcctgtctttcttctttgttatccctttagccctcgcgaacttctcccatttcgttggttctttcggttttggaatcttagaatttggaattatttaattaaaaatttaaaaaatttacgggtttttcacgaggaaggccataagtgtattcgggaagctgaattttataatttaaacggacaaattattttgtacacctgagaacaagtcgcatcttgcacaatttttctgggtaatttccatatttcattgaacaaaagctgggcatttttgcttgtaagttcgttaatccgttctgagttgctactggccaaaccttcggcgtccgtctcaacatcaatgagtaaaagattgccaacatcaatgcaaggagcagtcattggtaaccaacaaatcaaatatgtgaatttcccaaagcaaatacctaattgtttatctcttgaattggcattatatttcttaaaaagcacaacatcctaaaaataatatcgaaattaaataagcgtataaattttggcttagaaattagagaaacacaaagaatctttaataagtttatttaacacaatattattctttaaaaatatgaaaagctttgaaaattggaagtaatttggaggtaatttgggatgtcagtgggtttaagtcaaaaaagattttcaataaatcgaattcgtcatttttcgttcattttctcagagaagttcgatgccacgctgggtccgcacggcgcagtataattcgtccattttggagaccttagggcataaactgctgggcctgcaaactttgtccagcgggtaacaacgtcgcgcttccttacacatgtacattggatgcgaagaaaaacgcgtgcattctatgaaaaaatattatttttttaaataattaattttatcagttttttaataaaaaactttttcaaaagattcaggtgaaaataattaaagggaaatggaggaaaggttcgcatttattaaagtttaataacgcatatatagtaacaaaagagcttatgactatcgtatgcaggagacccaagggataagtcattgatttatccccctccgttccgcaccttcgcatgtgcattccttctcatctgatgcgtcctcacaatctttgtgtccgtcacatcgtcccatactcgaaacgcaacgacgctcactttgacaaagaaatgcttcatttttgcacgtctcgcagtcgcgctcgtcttccccaccaatgcaatccgtgtatcctgaaaaagaaaaattcaatttttagtaccactattaatcagctaattagcactcaccgtcacatttctgagactctgaataacagcgtccagtcggcagtcctttcccgtggtcttggcactgaaacgcgtcgtcgcagtcacaattcgactcgtcagaaccatcgaggcaatccattttgtcatcacaaaccttaatacgtttttacacggcatctagtaggatgtgcgagaaattatttttaccgagaatcgagaccggaaaatgaccccgggaaacgatacgagaaccgagaccccaaaaaacacgagaaatttctcgactcgggaatcgaaaatctaaaattttttagccatttttcaccaaaattactattttttgccattttggtctcaatttttcaaaaatatgataaaatggggggtccgatggtgccgttaggagccccagggaaaaattttgaaaattttaatgccatttgttacgaaaattgcataaaatttcaaaaaaatttgctgaaaatttttactttttgggtttcgaggggggggggggggctttagccgcctcacccaggatttcggcttgggagtggtacatcccccgggcgacgcgacgaattctgtccaaaaaatgaccaattttgcgattttgagtcatttttagcagattttcttcaagtaatagttcacccttaccgcaataggcgccgcgttagaaaaaaatggaatttttgaatatgtatctttcttcagatttcactgaaaaatgggtaattttagattccaattttttccgagactaaaaacccgagaccgggaagcgaaaaacccgggaaatttcacgagtcgggaaccgagactctcacacatccctagcatctagtacaattgagatggatgtcattcactcataggtttttaaaatggattacaaccccaattgtttatgaataattcaaattaccagcgaacgatgaatgcattcattgccgttgctgtcattggaagtctttgtgctgcccacacattggaatgcgctttgcgggttgcaccgatcacagaatttgttgcattcggggaaaagccctccgcaggcgacagcccataagcgagtgactccatcggagcatttgaccattccatccgtattcttgtcctccgttctgctcgctcctttgggcaatgatggacaaatgccatggcaatcgttttcgtcctcccctcccggacagtccgctcgtccgtcacacaatcgtcgcctgtccacgcaaaacttctgctcgccgtcacacaacgcgctgttcattccggaacaagaaggacaatcgcagtccttgaaaagacaattaaatgtattttattttttccaaaagcataatgtaaccaaattaatgtttaattattatgtaatgtaaaaaaccttttcgtcactccctccgtccacttgacagtccacttctccgtcgcataacttccgttttggcagacaatggtcaccgcatcgctttgcttcgcctatatttttaattttttcctataattcataaataaacagttgtgttattccacctcgacattccgtgcagttcagttcgtcgtctccaaaaggacaatgttttattccgtcacagaccacttccttcggaagacaaatttccgacacgcgacacgagaattcttttttgtcgtcacatttcgcacctttaaatacatttcaatccaacattatttgcaaaattgtagatgaaatgacttacggcaataggtcttagaatcttcgtcttctccgtttgcacaatgcgtgacgccatcgcaaagatgctccggagtgagacagaaaagatgttcaggacgagactttgatgggcatgacagcgaagtttgacagcctataaaagattgtagaaacttgctcgagaaatgtgtgttgtactttcacagcccatttcatcactcgagtccaaacaatcggtgtaaccgtcacagcgataattctttggtatgacgatgtgctttaattcaatttttaataccctattgtttaaattaagcttggacatttactaccggttggtccagagcaggcaaagccgaattcgctacaaatgctgacgtttggaggaacaaacagttcagcctggacgatgagatcatcagcatcctcccagtcggtgaacttatgaattggaacctttgaggcatcaggccaagcgtgatgagtccggtggacggagagaatattcttaaaataaatgcaattgttttcagaaaatgtaaatgttatttgtgaaaggttttttaaaccaaataaggatttcattgtgtatttaaacgagatccaaatcattagataaaatagcgattttaaagcttgcttttccttcttgaaga

SEQ ID NO: 2592 - DNA, 10852 bp, Heterodera glycines
cagataaggcaaaatcatttcagggcattgctaaaagctatggtatgagttctaagggatttcattgacatttgtattgacattatttattattttatttattttatactttttcatattgttgtactatttgacattttttatttcgatttttttatgcaccacataagagcactaatgtgcctgtggtttgctcaataaatataaattggagtgcaacaaatgagatttcttattccccccattgggtcggggaggaaccttttgatttttttgcagtgcaaaaattaccacaagagagtgatctggtcaagaagaaaaaaaatcgctaaaatccgttaaaattaagaaaatgtttgccatcgtaattttctggctttcaaactcaatttccttaatttaccatggtaatttgaaaaaattcctttaaatttttaacatctttcaactaattcgggaatttttctattttttttcttcgaatttttaaaaagcatgaatataaattttccaaaaagactttgtttttggtttagtatatttttcaaataattacatgaaaaattgcaaaaatattttctataatatttctaatttatcatcacaaataaatatttaaattaaaataaaaattatagatttattcagaaaatcgaaggattatctaaaaaggaaattaccttttagtcagttatttctttgtgcaaataaattgtgttattatccgactttaaaggagctactgaccaagtgaaatgtttcggacttcatttgatttaacgaaaatattcattaatataaaaaaaaatatttgggtattttaaaaaaaataattaattatttattttgttcttttgaagttttcattaacaaataataaaattaccctagaaaagtgctttcctttgttggaagtcaactaaattccaatatttcactctgaatattggcatcgctgttgcgcctctaatatccgttgatgattttgattttaagactgaaaaatgtaactaaaagacatagaatttatcgtcaacaacaacaacaagccaagaataggcatgtattaaggatcataatcactttggcgcgggacattttgatgttaaatttacagggtaataattcttgaatattgaaaaatgcattaacgtttggcgccaaagtgtcccgtcctgatcgaacaaatcaacaatactatccgaacaaattttcatctgctcaacttactatacagtatctctttcggtttttcgctctacgggagtacaaaaagtgcaccattgccatcatcaaggaaacataattgaccaaattcattacgaaaataatgacgcactccttccgaaaagtccaattcagcgccatttccagcaacttcacgcaacagctgtactgttgcagaaccaaaataaaccttaaaaatttgtctattcatttacctttttatgattttgaatataatttcaatttttattaagaaatactaaaagctagccttttttataccaacagttattgagtctttaaaccattattcggagacatcaattttattggcaagagacttttttatcaatttcactgttggtgaaaatacatgggaatttaaatttttatccaaatggaaactggttccgagccgggaaatttgagaatccgatttgaacagcatcggagagactcggaaccgattgcttttgaagggatcagcccgtctcgacccgcccaatttcaaaattgcagtttctagaaatttcatattgaaaaatttttaatttttcatttatttttcttacttgtactcctctgcattttttgaaagtaatcacagcatgatcgctcaaatattcccagattgaaggatcaaatttcaaaccatatttgccctctcttctgtattcttgtactcttgcgtctcttcgttgattaggccataagcatacccactcttggtccccataaaatggacaaacatttctaattggtctattcaatgggaaaaacactttctttttcaccatcattattaattcatgatttgtttgatgcaatagtcctgctgtggttttaccaaaagtctgaaatggatatgatttcattaatgaaggccgagtgacttggatttctcgccgttttccttttgagctcgatctcgagttttgtgacaattacaaactcaacttttgtttttttatgatattttgttctactcgggggtttatgtttaaagatctttttatgcatctaaaattgcataaaacaaacgactttgactaaaaagtgtcggaatttttattcctatcgccgatcaatgatcggcggaattaagagggaggaggcccttcaccaatcccccgtccgccgcgcgacatgttttcgccgttccatccctctatcccccatttcccttcaaattgtcaattgtttttgtgtgttcctcccccgccccgcgcacaaattaatgaccaatttgtcaaaccgcaacttttcgccgccgtccccaattcggcgaatgagactccaaagaacgatgaacccccaatttcccgttttcctcccaatttgttcattcgttcatttttgtgccctctttttcaattcatgcccaattttcggcccattttcgttctgctcaatttcaccactttttgttcaattttgctcgtatttaatgcgacaaatccccaccaattcctacaatcagaagcaccagcaaaggcaagcaatgcctcttccgtccctctctctcagtccccctcatttcattatccttttcccccggcccaattgtccgttccatttctgtcattcacccggtccctatcattgaattttgtgattttttccatttgccccatttctgaaatttctgtcccatcccggtgcccaattccatttgtgataattccccggtgatggcatttctgtgatcaatttgtgataattcgttcaccatttcaaaatttttgtttaattacccaagtttgaggtcatttcccggaataaattttttattaattctgtgtctcgtccctgcctgcccctgaaccccgcaccgtggaattcatttggcccgaccccagagcaagtcgggacaaattggcgctcctgggtggatttgctgtgaaccacggactgaaatcgacggatcccggtgacaaagggggaagggaaaagcaaattagagagcctagacaagaccctctgaggcttgtctagtgttcatagtttcgtgtagttattgtcctccgaggcataacttcacgagggacgtagcggacttagtgtttaccctctgaggaagcacttcgtccgaacagagggttggaaggtgttgtgtagtggacaaagtacttgccctccgaggaagtacttcgtacaaaagggtgttcaagcgcgcacaaggccattgacaaataaggaaaaaaggcaaactaacagtcctccgaggctttagtttagccataaggcaaaaggcaaactaacagtcctccgaggctttagtttagccataaggcaaaaggcaaactaacagtcctccgaggctttagtttagccataaggcaaaaggcaaactaacagtcctccgaggctttagtttagccataaggcaaaaggcaaacaccttgtcctccgaggcaggtgtttagtcacaaaaggtccaggaccaaggccagactgatcccggaaaaagacacaaaacaacaagtgcaccacaacacacacacacgcacaaccaaactgcacgcaatgtctgggccaatacaaaaagggatcatcaatgcactcaaagctctggacaatgccaaaagcgccacctcactccttctacaccccgacccggacctgtcaaactgggaaaatgccatcaacttggaggctcaatttgatcgcgtcgtcaaggaaatccgtacaacggaaatgcagatggacagtctacgagacttatccaacgcttggattgaacttctcgcccgcctgaccggagacgacaaagacaacggcgaaaaagaatacatcaaattcgacaaaaatgagaaaatcgccgaacgatacgacgcagcatcaaccaaacttcgggatttgcgagatctcgaagcaacactcagtgccgcagccaaactgcacagaggcagagccgacagagaagcaaaggcggatcaattggccaatccacagcaacaaccgcccatgccaccagcaatggcagcaccaatgacaatgccaacattcacagcaccgctctaccaattccagccaattcaactggataaatttttcggccaaaagcgaaaatggcccgaattctacgaatccttcaaatcggcaatcggcagtcaatcaatcagtaaagcgcagaagctgaacttactctgcaatctactgggcggagaagcgcgagaactcatagcgggcttccggctggaagacgcaaactacgagacggtccttcagctgttaaaggacacgtacggagctccggaggaacacatcagaagtcttcacttcgaactggccaatctcaagccgtgccgaagcctccgtgagaccaaagactttctgcttcaacttgagcggcttacaagggagctgaacaatgccggagaggacatcgagggaccgcaggtgttcctcatgctggagaagaagctgactccaccattcctacgaagcatcctcacaaagaaaggagaggatccggcaaactggacgacaaccaaattccgggatgtgctaaccgaagcagtccggaaagaagtccaaatccaagaagtgatgggagaatatgggcatcactacgtccaaccaaaagcagaagtcgtctcagcagcacctgtacaagcaccgagaacaccaaaccaaaggtcacgaaggcctaaccaaccaatggcactgcgtgatatgacatttatagcctcatcactggacgagggtcacagacatcaagggtatgtaagccaacagcacacacaacaagcaaagaaacactgccaacaaatgcgaaaccaagtacaaagcgtcaaaaagggtccgccatacccctgcattttctgcaacagcaatcattggcatgacgaatgccaaaacgtcgacacactcaaccaacggatcagcatcgtcagagaaaagaagctgtgcttcaaatgcatgaagccaaaccaccgcgcatcaaattgcgctcgaccatctaagtgctatcactgcaaacgtcggcatcccacggcactctgccgagatcagtacaaagccgagaatggcatcaactcgcctagcacctcttgcagtgaagagaagccaaatgccaacgatggcaagcgatcaacagtgatcgaacaacaacaaatgtgtaatgccatccaaagcaaggaaaccagagcgttgctaatgacgacaaaggcaacgatcttcaatccgtcacggccatccctcagcatgatgggaaccatcttcattgacccgggaagccaccgatcattcatctcgagcagtgcagctgaacaattggatctgaacgtcctcagcacggaagaatgctacttgtccagcttcggtgaacgagaaccgaagcgatacataagcgaccgcgtcgaaatcggcattttatgccccgaccaggacaggttcattttcaacctgaacgctttgaagttcctgctgaatgatttgccggtactacaactaaacgcattggataatgacgaacttcaacaaaagaagctttccctgccgaatgagtcacggcaaccggacattctcctcggaatggacgtttggcaccagctgaatgttcaaccaattgaacaactgccaagcggatttacgatttgccaatcgaaaatcggcaatatcatcagtggaacagggcgaatcaagctcaagcaaccgtccaacatctctttcgtgctaatggtcaacaacgatgaatcgccacaaagcagtaaagcggctcagaggcagaaaaacattcaacaaaaagaaaaggacgaactgagacggcatcaacgcaacaaactcttgtccagcattgcaacattgcgatcaagacggaagagagaatcggctcccatcagctcaaaatcaatcgtgattgatctttcatcagacagcgacgcatccggcattgagatcatacaaaatccagtcagggatagacaagccaaatcaccaaatgagcattcaacggcaccaatgcctatggcagtgcaacggctaacaccaacaaggaagagttcatcagttgccatgcgaccagcattttcttccagcaaacaaccaaaaggaaaagcagcgaatcccgcacaaacaagccaaacaaatgaactcaacagaaaaatgaaagccttgtcgccaaccgcaagtggatcaggcgccaaccatcattgcgtcgctacattggccagaagctcggactcaacaacagtaattgataagggcagtcaacagaattgcctaaacatgagctcggcaacaatcagtaagacaccatgccaacagcactcgtccgagaagacgttaaactaagctaatcaccaacaatcgtccgcaatgacgttaaactagcctaagccatcaacaactgtccgaaacgctaatcacccggctgccacgagtccggaatgacgttaaactagcaaagcatcggccaacccacacaacaatcgtccgcaatgacattaaactaaagaaccaaccaaacaacaaatgtccgcaaaaacgttaaactagcaaagcatcaattgtccgcaatgacgttaaactagcaaagcaccggccaccaaacaaccattgtccgaaaagacgctaaactagcaagcaatctatccgacggtcagggtccgaaatgacgtcaaacaagcaacgacaattggtcataaggacgttaaactacgtcaccaattcaagcaaaagcactcgagcatgcagctgacagcacgtttccggaagcaaattcacatgtcctcaacgattgaggaggttcagcagcgaatgaaccacaacagaccgcaaccgcggaggtcacaacagaggggactaaggccaactcaagcgcctaaaatatgccaatccgggatggcacagtacaagcagggtcgagggatccgccttcaccctgcgtcttctgcaatggcactcactggaccacgacgacgactcagcgaacaacccttgcaacgagagcaaggacacgaatccagtacgtcaccaggacgagaacgcagaccacgaaagagccaacgacacgccccagatcgcgtaagcacgatttggaaactcaagagcacggaaaattcacctttttgccgtcccccgccatcactcactgctcaatggctcaacctggcaattgagctcttcgcaaaaaatcatcaagcccgagcagagaatgcccattcgccaagtctgaaatgacgaatcacgaagcacaattgtggtcaacgaatgacgaattggaagtcaacttccctggaccaatcgccggacttttcaaaggcgaacaaatcagcacggcgacaaactgctttgctcaaccagcaacacttttcaactgtcaatatgcaaccgaattctgccaactgcccgacaactcaactctgatttggaaatcaacctgaaatggcaacgaatgccaaacatgcgactacgagaaggcggaagccatcaacggaaaattcactgcggcctacggagaatcaatggccacttggatctccgaagatcaccaaaaggcattaactttcgccaaaaatgcgccagaactcatcgcctgcgatggcacgcacacgcatcgtcatgtccgaacagaacttcggaattgccaaggagcaatacgacgacattgtcagcaccacgacacgatggaaaagaggcatccgaccagaacagctcgcatcacagctctcggcatcccaagtggcaacaagcgttgcgttaaatcagctctacacgagggaatgtcagcgaaacacgagggcagccaacccgactctccaggccagacgcttactacggcaaccaaacatccaagctcgttggatcggcgaaacgacaatggaagtgtttccatgtgtcaacatttcgctacaggacatctcatacaggccaatgaatgaatgtcgcctctacattcccgtgactgcgcactttcccgaccgagctatcgcagctttcctggatccggaacttcgcatcatctcgctgacagcacaacaggcaagctgtaatagctaccggttccatcatcttcaactgcgaagcaatcccaacatctggttacggatcgactctcgaaccggcacagcacgacgaatgccaaaagattacgtgcacgaattgtacgaaacaacgatcaaccaaacaaacagcaacttggaacttcatccattgatcttccacgcatggcaactcgacaatgagtctgacgcgacacgcttcccgcacatcaacgaattcatcaactcggagcagttcaaggacaagctggaacagcacattacagcaaggactgaagctttgggcgcgttgaagggcggaatagaaggattcaccatgcgctggctaaaaggcctgatcgacgaagcaatcacgtggtggattcgagtcgcctgcgtttattcaaccttcctcatgctgcgcgacattgttctcccatgcactctggcgtatttgctcaatcccatccgagtgactcttcacagcctcgttggagtacgcccgcacccgacattccgacccaccgtttctaaaccactcgggatcgaagagggaatgccgctgcgtgaaatgccacgaacccccaaaccaccagcgcgcagggcagagcatcgatccatgtcaccaatcaaattggacatgattgccagaacggctcggtaccaacaaccactaacacagagccatctcgacctcacagaagactcgccctttgggaggccgagacgaaaagaattctgacgggccccatcctttttcgcgccggaatgtcggaatttttattcctatcgccgatcaatgatcggcggaattaagagggaggaggcccttcaccaatcccccgcccgccgcgcgacatgttttcgccgttccatccctctgtccccttttccttcaaattgtcaattgtttttgtgtgttcctcccccactccgcgcacaaattaatgaccaatttgtcaaaccgcaactttctgcccccgtccccaaatttggcgaatcgactccaaagaacgatgaacccccaaatttcccgttttccgcccattttgttcatctgttcattttgtcccccgtttttcatttcgtgcccaaattttcggcccattttgttctgctcacatttgccactttttatttaaatttattgttatttaagcggccaaaaatgcccccaatttcacaaccaaaattcattaggcatttttgccgtttctctcccctcccttccatttgcctttaactgtgataaccccattcgtgatcattctttgacccccggttattgatttttgttctgtggccccagtgccctccatttcctgtcccatcccggtgcccaattccatttgtgataattccccggtgatggcatttctgtgatcaatttgtgataattcgttcaccatttcaaaatttttgtttaattacccaagtttgaggtcatttcccggaataaattttttattaattccgtgtctcgtccctgcctgcccctgaaccccgcaccgtggaattcatttggcccgaccccagagcaagtcgggacaaattggcgctcctgggtggatttgctgtgaaccacggactgaaatcgacggatcccggtgacaaagggggaagggaaaagcaaattagagagcctagacaagaccctctgaggcttgtctagtgttcatagtttcgtgtagttattgtcctccgaggcataacttcacgagggacgtagcggacttagtgtttaccctctgaggaagcacttcgtctgaacagagggttggaaggtgttgtgtagtggacgaagtacttgccctccgaggaagtacttcgtacaaaagggtgttcaagcgcgcacaaggccattgacaaataaggaaaaaaggcaaactaacagtcctccgaggctttagtttagccataaggcaaaaggcaaactaacagtcctccgaggctttagtttagccataaggcaaaaggcaaactaacagtcctctgaggctttagtttagccataaggcaaaaggcaaacaccttgtcctccgaggcaggtgtttagtcacagaggtccatcaaaggccccagggccgagaccagactgatcccggcaaaagacacaaaacaacacacacacatacgcacaatcaaacagcacaatgtctgggccaatacaaaaagggatcatcaatgcactcaaagctctcgacaatgccaaaagcgccacttcactccttctacaccccgatccggacctgtcaaactgggaaaatgccgtcaacttggaggctcaatttgatcgcgtcgtcaaggaaatccgtacaatggaaatgcagatggacagtctacgagacttatccaacgcttggattgaacttctcgcccgcctgaccggagacgacaaagacaacggcgaaaaagaatacatcaaattcgacaaaaatgagaaaatcgccgaacgatacgacgcagcatcaaccaaacttcgggatttgcgagatctcgaagcaacactcagtgccgcagccaaactgcacagaggcagagccgacagagaagcaaaggcggatcaattggccaatccacagcaacaaccgcccatgccaccagcaatggcagcaccaatgacaatgccaacattcaca

SEQ ID NO: 2593 - DNA, 2960 bp, Heterodera glycines
tcagagggagcggcttctaatggaattaaatatttttgacgctcttctcacattacattcattcattctttttgatttccctcaaccgccgcccccacacggccgcgcaattcatttgtcatttggtggcggtcgtcgtcgtcataatgcccttttgtgtttgtgtgggtgtgttggcgttgtgatcggagggacaacccacgcaaaacaatgatcagaggggggagagttaagggttgattgatcaatgtgatcaatgaataagtgcattaaaagagattttatgaaattaaaataggcgattttatattaaattttaaatcataatttttattggcgttgtgatcggaggacagccaactcaaaacgatgatcagacggggagggattaggggttgattgatcaatgaataagtacattaaaagtgaattttatgaaattaaaaatgggcaataattaattaaaattataaattatctctctatgccgaaattactcatcgttgtacttagggtggaacataatttttgatacccaaattttttttattaaaatttttttttttaatttcaacaaaacacaatcatgattcaaaatacccgccattattatcaataatatgttgccattattttggcaagagatcaattaccaatggaaaagtatttagagagttagagttaagtaagtaaaaatggtcattttagaggtaggtatttttgatggctgatttaaagaaaaataaaagagatacagagccagataaatagtgattcaatagagcaaagttaggaatataagaacacaaaaatataaaattttaattacaaaaattgaattattggagagccgagactgaaagtggtctccaaaaacggcatttttcaagaccacaagtaacataatgttttaaaagtggttttggaaattctgaatttaattaaacaaggtaaatcgggtatgttgagttcgaatatggtcttagatttggtctctgggatcgcaacaaacctgtacagctcgaacttcatgcatggagttggagcagtacaagctcaggttgaaaagataggtcccatttaaggccatattcggattctactggtctaaattgtatagaaaaactaagattttgttatatcagctttggtttttgaccataaaaaattcgagaaaaattagtgggccaattttcaattttggcatggtcgggaaaaaaggcagaaaaatctatcaatcaaataaaaagtgaaacgatagtaagatataaaagaggacaccatgaagaacaaaataaaaaaagaatcatttaaataggcgcagaaataacggcgttatgaatttttaaaaaattggaaaaaatttgggtatcaaaaattatgttccaccctaagtaaataatgatgattgatgtaaaaaacagcagcaactgttttttttcctataattttctgatcagtttcaaaactaagtgtcaaaaatttgattgagaaaaaacgtacttaattatgaatgttttgataaaaagaaattagtgcattgttttaaaaaaacaaaattaatacataaattgtccattgcatactgttgtataaaacattggaaatgctaaaatgaggtcaaaccaaaataacgaaaaaaataatttctcgaatttatcgtaatcagcgatctgaaaccaatagaaaacatgcattttaattatgagttactttcttcgaataatgagggaatcaaaatcgctaatgccgaatagggcaaaaaaaatctttgaaattaaaaaaatcaaataattaaaaagaccctttcgtacattaaaaaaaaattaatctttaccttgatttcgcgttttctcgcgaatatgcttaaataagctttattaaaatactgataaatatgaagcaaaaattaatactttcagccatttttcgctaaaaattaataaatgcccaaaactattctcctctattagcatacaaaattttgaaagctgtccagattcaaatacgctgtgactaacaaatccaaaaaattctattttacttacattccatgaactttgaaatatctgattttcttagttagttagttcatagttgtcagaaaatattttcgcaacaataagcgtgtttttaaaacccgaaaattttcatgtaaatttcattttacaaaaagagatcagttttttttaattttaggtgaacgaaacacttgaattttgcagaattttagcccttatattaaggtgttttctataggcgtaggcaggagggctgagggggctaaagtccccccgaaaccgaaaaaaaatttgagtaaatttttcgtaattttaagcaattttcttagcaaatgtattaaaattctcaaaaattttcccggcggcgcctaacggcaccgccggacccccattttatctattgttgaaaaatggcgaccaaaatggcaaaaataataattttctggtgaaaaacggctaaaatttttggaaaatacacccccccccctaatctgtatttcaaaaaacgaaaaatacacctctataaattgaaagaaaaaacaacctaacacccctaataagcacattatggcctacagcccccctaaatacgtttcgaatcacatttgagtattttaaaaatcaatttttgatacctattttaaaaaaagggtttttagggatatatttacaaacaaaaatcttttatttttcacaagaaatttttgacaaattctcaacaatatctccaaaaatatgcaaagaaaatgaaatatgtacgaaaaaattgcgaaattgcgaaattttgggcttctgggacatttaataaaaatttcataaaatatccattaaaaaagggatgaaaaagtgctaaaaaatataaaatatttacgagactctctgaaagaaatatatgtatttacataaaattgacaaccctaattatagaccatccaaaaa

SEQ ID NO: 2594 - DNA, 5474 bp, Heterodera glycines
cccccccccccccccccccccgaagccaagggtctggctacgcccttggcattttcctaaaacatttcaagccgttctgacaaactatgaaatgaacagcagtaaatcagaattaaaatcgaacttcgtttgttgtttttctttaaaaatcattctcattactaatcattagactccgtttctttttccaacgattaattgactttaaactaacgccaaatttcttcgcaatttgttcatcaatttttttggtgcttttcctttggaatttgcgcgaaaatttctcttttagcatttcaaaattctcaattatttctttcttttggcttattgaaagtcgtttttttggctctaaaataattattaaatatgttttttttgctatactccttttttcattatttcttcgatttttgattatttgttgaagaatttttctattattttgtgattatttcatttttttaaattataaagaatgctattttaataatagagcaaaatttccaaattcttccaaaaatttttttgttatatggctttgttatagtttctccaaaacgcttaaattaaggggtaggttgttaaaaattgatgacaaatatttttgtaaacacttattttttgttttttcagtttatgcaaatttttgctttttggttttataatcgcgttttaattatgtccttatttttgacaccataattttgctttaaccttcgatgtccttattttgaaaattttctatcacaaccctttttatttttatttctgttcacctaattttcccaattcattttcaccactttcacccgtttctttttggcgcatttcccttttccattcgtaaattttcctccgatttgtccccaatttcatggcaatttcattctcagtttggtttttgctttttttcattttgtcaaatgctttcacaattcgcattttttcactttggcttacttcatccatcttcagattttcttcccttttccattcgtaaatctgttcacgggtggtgccaaatttgttggcaatttcgcattccattttaatgcgattttcattgtcattgtcattttcatttttatttgtaattttttcaaattttttcactatgctcatttttatttcattttcattctgctgttgtcgttttcttgtgttgtttttgttgctgaattcctttttccattcgtaaatattattacaggttgtgcccaacgcgttggcaattcttcctagaaatgattaaaaagaattcaaatcaattaggattattttttacacttttgagccggatataattagctaattagattggttatttttttttaccaaggatgagagacatctcttgtgcgagtgaaatttatgaaaatacatatcaaaagttggcgcattttggaatgcgtccctcaaatccctgcgtgtccccctctgtcccgaccagcagggctgggcgtaataacggattacgggaaattgcggccttttttgacccctgtcatgacggattacagaatctgtaattgatcaattcgccgtaattacggatgacgagtttccttaattgaaaatccagttacgcccagcgctggtcccgacccctcccattgtcgctgatttcaccttcgattttgtgccgcttttcgctccaatatccgattctcaattggcattccttttttgtttggtcaaatttgttgatcagctctcgtcttctctcattttccttctgctcttccgcttttgttggtctttcatcgccctcgtcttttttcatcatccgattaatttctcttttccattggtaaatttttcgtcgatttgagcccaattcaatggcaattttttgttcgattttataacggtcttttccatctttgatcccctttttctttttgtattcatttttcattcggtcatattcattgatcaccatcagtttgattttatctacaccttctgctgctttccgcttgtcatcttcttgatcaaagtcggcttcatcttcttccagtgtttctggcggactttccgtaattttttcagttattttgtccgctttttcttccgttttgatcacttttggcacgtttccaggatcttcggcaattttatcggcttcttcttttttgatcatcttttgataaatttttcttatcttcgcctgttttgtcctcttcctcctcaaactttggttctttttttatttttaaaaatttgtgtgccaattttcctgccattttttgttcatcatattcaatttgttcacgttttacaacatttccagcattttgttcatcacttttatgtgaagttgattcattagaatttacaacaattttttcaaataaatcatttaatccttcgtccacagcgaaaatttgaagacaatttaaacaaaaaatgtaaaataaaattagtataaaaggcatctaaaggaagcaaaaatttattactaatgaaataatttatgtaataaatactttaattatcaaaaatttttcaataaaatataaacaatttaaatttcatttaataagaaattttatgaattatcctttcaacaatatcttatcacatagaaaagctataataaaattacaattttattattcttcaagtattcaacaacaaaaaaaaatcgacatatcgatgatttgttccattagcaaatacatttttcaataaacaaaaaattatattcatttttcaatgacaaaaaatattttttctaaaataccttctttttttaagcattaaatggcccaaattttattgaaaataataataataataacaatgaaacattttgaataaaaaaattataatatgaattcggttgcacttagcatttataaatttgactatacttttgaatgttagggaagggattttcactttataaaatattattttgtatcaaaatatttttacaagttaagctacaaaatactaaaatttgaaaatttacatcagaatttaactgtttataaaaaataattaaaattatttgacaattaaataaataaaaaattactttgttgctctttgacatggtttaacttaaaaacacaaagttcttaatattacatataattttcaatgaatatttttttggttttagcttactttttattttgtttattttttgccaacctaataaaaaaaaaagtcaaagtatctgctggcagtgccatctttttcttgccgttgttggaagcggaagtgcggcgaatattttgcacagcgcagcaattgagtgaagcagcggtggtgccatcgccaaaaagtgaaaaattttttttataattttttaggttcgcctcatttcgatttatttagggtttccatagttatcagtacttttaataaacatttgaatagtcaaatttatgcattaattagtattaatgtgacattatgctaatggctgaagctgcttttcaaccacttgttctcttctctaataggtcatcaacatctctcattttcatgcagcgcttttgcggaatacaactgatttccggcttaattaactgctgagggtcatttgtaagtaaaacctgaaataaaaaaaacatagatgacatataaaaaaaaaaattagttatgccgaaagaatatcaaaaaataataaaaatattatttattacgaacattttaaatttaaagaacattttaaaaattcaagcgaattaatcacaagtttcatttccataactttaatcttggcttaattaattattttaattttttaattttacaacttcataatttagagaactttactaaatgatggtaattaacgctgaaaattcaacactcaccgtgatatattggacagtccatgttggcatttccggactttcgtactggcaatctgtcacttcgccatccgtgtcaaatttcactttatatttgccggtgttgtccgtgacgtgaatgccaatgttgaactgctttatctttgtcatgtccaacttctcttcgattttacaactttcaaaatttcccagcgaaaagttggaagtctaacgggaaaatttgggaaaaattttgaaaatccggcaaaatttccgcatcacaatttggctccatcaaacaaacgaaccttactatgcctctgactatcatagctgctaaaatagagtgcatttgtgccgctaaatatcattttcatggccgtttttccaacttaaaaaaattcatttaaattttcgatcattgcgaaatttagcatttcgtaaaaagtgccaagaaaagcgactttggtgccattttatatgcttgcatttttggtggctattgctagcattttatagggtaagattggctaacacgacaacatttttatgccaatttgcgcttttaaaggaatgatgattttttaattaaattataggatattaatttttttttttttgggtatatacatttttatttttttaaaattattctctcaaaaatttgtgaccgaagagcaaaaaaaaaaataaaaaaattcacttgggttttgcctacataattttcttgttagggcctgccccaggggtaatggggagggataactgtccctaccccgtgccctccgattttttataatattttatttctactgtaattttagcgctgaactgaacgtgccgtgagatttttttagacaaaaaaatatataacatacaaggatgttacaaaagaaataaataccgtagggtggaagaattctcccagaatttttttagagaaattaagtgtaatgaaattcacgattccggcacatttaactcactgatcggatgaaatcgaaggccttcgtacagcaaataaatttcaaatttaagcgacccattcagcttgttcggtattttcacattgatctgttcatctttgcttaacagtcggccattctccaagtcaatcactcgggcaaagtgccgaacatagatgctttccgttattttggcatttgtatgattgattttaaatgctttgagttccattcccccaactgactcaatctgaacaaaaaaaatatggtgagtttccagcacacgactcgcggctgtccttatttctgtccttaattttcctaatattttattttaggtttcaacctcttaaatatgattattttgtcatacttttgaataataaaagttgcaaagcatttttctgtattgtggcccatgaaataatgaaaatgaattactgaataatttaatgtacaatttggggccgggttgcgttactcaaaaaccatcaaaatgaaaatttttgacagaaaattattcataactttgcccaaaatgaaccaaattttaatttggtatctttcgatagtaagtgttttctaatatgctgcaaacaaaaaaattcattaagatgaaaaaaagttatgacctgagaaactcaaaaaaccaagggtggttttttgaacatttttggtcataactttcttcaaattt

SEQ ID NO: 2595 - DNA, 3792 bp, Heterodera glycines
  unsure (1)..(3792): unsure at all n locations
ttacctaattaaattatttaaaacttaaaatgaattttaaattatttattatacatatagaaaactaatntgggtttataataacatcaaatttaattcatttttaatgacattgatacttttttgtataagttttttaatttaaaatttaaaattttattttttaatttttaattattttcatacatttcttgaatttctcattttcgcgcagttcttctgcaatatgctcgggcactgattctttgccggacaatgcatgtacagcgcacattaccgtagaatactcaataaaatcagccaccaattcttgcgaataaatattttccgatggttgccaactttcctcgcccgggtaacctatgccagaattaatttatgaaacaatcgatggtgccgggtcgttactcaaaaaactagagtagagcggtaattgtaaaaaaaaaccggtaccgggacttttcgggttgaaaaaccgggcctttttggctcgcaaaaccggaaaaaacccgggactagtcccggtcccagtcaaaaccgggacttgggtactcatgtgtacctttttttcagtaccagtcttggtcccgtgcaacgctacaaaaaaccatcaaaatgaaaatttttgacagaaaattattcataacttcccccaaaatgaaccaaattcttaaaccttggtatctttcgatagtaagtgttttcaaatatgctgcaaacaaaaaaattcattaagtttaaaaaaagttatgacctgagaaacccaaaaaaccaagttttttttttgaacatttttggtcataactttcttcaaatttaacaaattttttgaaattttgcatgataatagaaacacttagggccattgaatgatattaagaattaaaaattgagttgctttttgcactacgttgttagcaatatatatattttttgatggtttttgcgtaacgtcatagcacctccaattttacttgaattttatccactgcccatggtgggtatatgaagcgttcatcttttgagaaatctttcggaattccatatttgcaatccagttgaaaaccgacttgatcaattctgatttcaaaatgcttggccgtcgcattgatcagtaaatcaaaatgttggccatattggttcagcttgtgcgtgccattattaccaattgaaaagttttggttctgtaatacatgatacagtactcagcatttgattgttgctatatgtctgatacggttttgtttctctgttcagttattaataagctgacatttggcacgagctggttactgtattcatttgtaagtgaatgttacaagttggttactgtatttatttaacaagtcggcatttcgtatacgaaattgccattgtattaaattaataaactgacattgtttgcatataattcggttttttgtaggtaaaagtgggaaattcatttgtgacaacaaattggatgacaagcttttcgcttacaatttcctatattactgtaaaatttcaaaaaaggacaacaaacaactgtaaattttacagatgtttctacaaaatttttcaactctatattacagaatttgtaaaaaaaaaattatttaaatattatctcacagcgtgcagataattcctgcagctaatatcaggctttgaaagatcgaattccaataacagcaaaatgtcaccaactgaaaatgacaaattaaatggattaaccaatgcccatttaaagcttccaaaatttttgccagccgaaagaggataaataaatatggactaaacggtttacctcagtttggccccagccaattttttgactataacttttttctttgccaaccaaaacaaacgaattttgtatcattcgaaagcttaatatgtttagaagctttttctaaaatattgcttcgcgattagacaatttcaaaaaaagttatacatgaaaatttcgaaaagtcgaatttttgaagttttttcttaataaatttttttaattttttccaggcttggaaatctttttgctttttgtaaggttaatagagttatgtaaagagctttcgaatgataccaagattgttgattgggttaacaaaaaaaaaagttatagatcgaagacttggctggacccgaaccatgcggggccgaattgagcgagtccgggactaaattgtttaaaaaattattaagttaattgtgtatcgactcaagtccaaaggaaataccgattttataatattctttattttctggctaacagaatcaaccctgaattgaactgactttttgtgctgggtttcactgattcgtgcatcaatcgaatgtagaattttttggttgtttcactgatgatcatttccatccaaatttcgtcaccgtagttaagtaccgtatccaatgatgcgacaatgttcaaatttgcttttttcttaatgcaatgtgaaaaagtagtacagtctgttaagaaaaaaaataaggccactaaattttttttttttgtttcatttatcatacttcccatgtcccaaccgagctgaaattttttaccaattttaccctccccctataaatattaagaatcacacactaaaaaattaaaaatgtaaaagaaattttatttttatgaatttaattccaaaattttgcccaaatttgctgtaaagaaattatcaggctacttcataaaacacaaaaaacttttttcaaagacatcataaaaatctggaaaaattcatgtaagcataactttttgtgctgatcaaaaagtccactatgataaatgaagaaaaaaaaattgaggctttataattcctttacagactgcaataatgaatatgaaaaaaaaacttgtggattttattaaacatatgtaatggaattggctttaaaatttgaaaaaagtgaattttcatttgggtttttcaaattttcgccggggganaattttgaaatttttagtgcactttgtgaacaaatttagtccaaaaataacaatattttctcattttaattgttaaaattgtgattgaattcccaccgaaaagggaataattttgaaaattagaagaaaaaagaactacttttggggaacaaggggggagatggtccggtggcgccgataggcgccgccgggganaaattttgtaatttttaatgcgattgcttttttgtcaaaaaataactaaattttgagcaaaccctatattttcttgataaaatagtgacattctgccataaaatttcaaaattttgaatatatttaagaaataagaacaaaataagaacaatagcccgaaataaggacaaatcttacaaataaggacatttttattttgtaagatttggaccctccaaataaggacaaatcttataaataaggacagatccgaaccctgatttatatacatatttttaccaatttttgtacatatttttgacatccctacacataacactcacagacataccagcgacggggtgaacgcattacaccttcaggatctatacataaagagatgcatttcggaaaatttttttggtgcctgtggaaaatagcccgcccgatacacacattggcataaacccttaaatccaattcgcatttccccacttttttttgggtcgcatacttttaagttttttgttttccttttgctttatttttacactatcaaatgaagcaatcgctcctttcaaatgtgcacattaaattattatcttcagttcatttatcttttgtttgtttgttttcacattatataaggcgaaagaaaacttacacaaatggaatttacg

SEQ ID NO: 2596 - DNA, 1392 bp, Heterodera glycines
  unsure (1)..(1392): unsure at all n locations
catccaaattttgtcaccgtagttaagtaccgtatccaatgatgcgacaatgttcaaatttgcttttttcttaatgcaatgtgaanaagtagtacagtctgttaagaaaaaaaataaggccactaaattttttttttttgtttcatttatcatacttcccatgtcccaaccgagctgaaattttttaccaattttaccctccccctataaatattaagaatcacacactaaaaaattaaaaatgtaaaagaaattttatttttatgaatttaattccaaaattttgcccaaatttgctgtaaagaaattatcaggctacttcataaaacacaaaaaacttttttcaaagacatcataaaaatctggaaaaattcatgtaagcataactttttgtgctgatcaaaaagtccactatgataaatgaagaaaaaaaaattgaggctttataattcctttacagactgcaataatgaatatgaaaaaaaaacttgtggattttattaaacatatgtaatggaattggctttaaaatttgaaaaaagtgaattttcatttgggtttttcaaattttttctggcaaaaatttgaaaaattacctgcttttctgttttcggtggtaaatatggccggtccagcaacctgatgtgctcaccctttacctgtaaaaaattggcatatttttcaattttttcatttatttattttttgcatttacccgaataaaattgacggcccaaattggcacaattgtaggcaatgaatatgtttttttgttctcattaaaagtaacactaaattggtagccttcctgcgcaatgattttaatgtccgtcagtcgagttaaatataaattgaaagtttcaggtggttctgccttctaaaaataaaataaactattttaaaaaataaataaaataaatatcacataaacttgtaataaaaaatagttttcacaattttgtttcatttagttgtagcacacgacttggttattttcactttaaccggtactgattctgtactgtaaaaaccggtaccgtttctgataaaatttttgcaattcaataattttcgcgaaattgtctattattttggaaattacaaaagattcgctgccgaaatttttttttttttgagaaattttatttattttttcttcaaattaattattaaattgaatgatttgttttaaaaattggtgagcaaaaaagaaagagtattaatttttttgaaaatttttacattgaaaatatggacgacctgccgcctggttattataatagcctgtttacttacctcaacagaataggatgtaaatttcatgtggccaagaataaaatttaattccaacacagtcgcaccgactaaaataaattacatttaaaatgacat

SEQ ID NO: 2597 - DNA, 3093 bp, Heterodera glycines
tgaagaaattcatagacattgtgtaaggaaattctaggatctctcttcttggcctcctcccaaacttttagcataccagcatagctggccggtgagcgtaaatcgtaataaatttgttccaataatttatccacagtcggctgctttggtgctatagtcttgcccataattcaggtttaaatttgcgttttggttccgttcggtgtaatcctgcggtttttatagacgatgaattcatcatattgacaagcactaattttttctttcccattttcttcactgtgctacgccgccggccttcccccgtttgtggtattttttgaagcagtttcatcatttccgggtcttttgagatgcgttgaatgaagaagcgatgtcctctgggcacatcttcgcgctgacctgtcaaatgctttaacgattcggtgaaatgagagcctgaaacgggtttattgaaattagtcaaaatttctccgctgcttgcgttgacaccgaattttttgtgatccttcccgataatgcccatcatttttgggaaatttttcgggctggtccttaaagaaaccgttggcgtcttttgatgcggcgttttctttgacgaagtagtagcagcatcagcagcaggctcaaactgatcagaagcagttgaaaagtccgtgtcctcttctacatcagtgttgctcttacttactgcaccaattgattgaattgaagccgagttgcggtgtggtgtgctcacatgcgacggtgtttgttgtttctgaatgcccatatacggcgcaacgtttggtgctgtaactgagccactctcaacaattactttttgaggtttgttctcaataatatcttttagttggtgtctacgtttgtacaaccatgagtgacgcttcatttttatttctgcgttcgtttttggatcaaccaaattcttttgaatctgtacatcaagcagcgttttctcgccctgtaacgggtcgcctagaggaggagatacggcgctgtttcctttcagtagattaatgagggccaaatactcactctctggcaccataaccatcttttttgtatatttcattggtagctcccgcctgttaggtcgtaattttctcgaccaggtgttgagctagtgcgccaagaataggcactaatattgcccctaatgctacaccacttccctgttgtagcctttttctcgcagtcttttcgctacgcgagcgtgcaattgcacgataatagtccgcgtattcggccaaccgtttcctttggcttctgcttaggctgaaattgaattttaatatgtttgcacaaatttcaacaagtcctaatatttgttcggctgttgcgtctcgcagaaggatgtttttctttttttccgatttcgtggaggcgatttttttaaaaaattctgcgttttcacttatatatggactgaattcatacatttgtagtgaaaattacagattttctcaaccttttataccctttctttattcaattggtaggtacacctcacgctgttcatccgggaagattttagttgttaaacgttcagactcgggcgcattaggatgcatatttataaccaaatagctgaatggttcgctggttgcatcgttgtatgcctccataaaatagtttagcctcttcggaaacaattgagagcccaccgttctgacctgaagttgaccagaaggattccgggttaaaaccaaataatggctgttggctcttgcggtacgaatattgcgtccgtagagactttgtgttacaaaaataacacttacatcccagttatgggagcctcgggtgaacaataaatccaaaaaatcgttatttacactcaacatcaggtcgtccaggattaaaagtaagggtttgggcatactttgaaccaacgtttgggtcggtaccccattatatgtctcaattccttgtttcattaacccgatcacagaatcgttcatctcggaataacaatagagtatttttacaggaggcggtgcgattagcatactgtaatgttttaaaagtttcaatagccattgagtttttccacttcccgtagcgccagataaaattaatgtaaacggtgcgttgaacattttttataaaatttctttgtgcttttttgcttacaaatatccctttatataggcaaaagggagaatgtcgcctgcatcccctctcccgtccatttttgactcttgcgacactttttttttactacataactgacaaatatcctttttcggatgactatgttcctcggtcaattggttgtgcgttggatttggccttttgggttcgaatccccctcccattggtgaattatttaatcgattttaaattatatatatataattgctaattatcctttttcggatagctgtatcgctgacccagtggtagtgctttggattaagacctcttgggttcgagtccctctgcctctgaattaatttaatttaattaatcctctcctggatttggaccccggcacctgggacaaaatcatgaagaacaaaaaatgggtgtttttttaagcggggcaggggtctggacccccgcccccggggccttatactactgttgacaagtgatttataccggatcaatggaagtggaacggcacaccgacgtaactgaaaagaatcaaaggcatttgttttatatcaatcaagaattcaaaatcaaagtcaccagcagaaaagatggacggatgtccacgtgaaagaacccttcgcaaacaaagcatgaaaggaagtcgaaagcgcaatttaccaaggaattaaacaaattcaaacaatcaaaaacaaaaaatgacggttgtaaagtggatataaaccgtaaaattacaaattcacattataattaatggtactagtgcaggtgttttcaatggttttcgagggtgcagattatgaatccgatctccatttcaaaaccaattccgagtcttgaactcaaatttgaacatttttcgaagtcaaaattcgcaaaatctgattgacgtaaaggttcttttcggatttgtgacccccccactgaaaattttcaaataaaaagtcatttcagggttaccctttgtcctta

SEQ ID NO: 2598 - DNA, 1045 bp, Heterodera glycines
cccccaccctccgccaaatgcgccggtaatcttgagtctcactttcggttgctttttcaaaatcccgagtgtattgtttccgaaaattgtagtgagcaggaattttaatgtgaattggacaacacccgacgacataccctatgatggatggacttttgaaagtaaaagtgatcccaccgaaaattcttttgtaccccctcctccccctgcacatcgatgacatgctcctcttccccaattgttgggcttgtgcaaaaagggccaagaatgagtttgtgatgacaaaagatgtaaagaaatgtaaccatcgtccagcgcagagagcatttttggggacattcacctcaattgagttgcggaaggctttagagctaggatatagaattgtgggattctatcgagcgtatcactttgaacaatttgacagtcaactgtttaaaggatatgtgcgtatgtttttgaagataaaggttgaggcatcggggtggccggcggaggtgaagagtgaggaggaaaagagagcattcctcaagatgtataaggcaaaatatgacattaatttggattacgataaaattggactcaatcccgggttaagaatgattgcgaaattggtgagaaattattttaaaaaatcgaaaaattgtttaatttaagggattaaacagtttgtggggcaaattttcaatgcgcaataccctttcaaatacggaaattgtgggcagcatggaacgctggatggaattgggaagagataatacaattgaatttgggcgcccagtaaaaataagcgaagaaatatcacgggtggtgtaccggaaaaaggaggagttcatcagggagcataaagtttcaaatattgttttgtcattgtggaccactagcgcagcaaggataaaactgtacgagtacatggagcaggtctacagggaggaagggtctaagctgctgtattgcgatacaggtgggcaggaataaaaagaaaataaaaaccaaaaatttagattctctagcttttgctcatcggaaggggcggtgtccgttg

SEQ ID NO: 2599 - DNA, 2435 bp, Heterodera glycines
caaggataaaactgtacgagtacatggagcaggtcttccccgaggaagggtctaagctgctgtattgtgatacaggtgctcaggaataaaaagaaaataaaaaccaaaaatttagattctctagcttttgctcatcggaaggggcggtgtccgttggtggaggggaaatttttggggtaaaacattatttttgaaacgcatctaaattgtggttttaagggagatgactcgagagtatgcggacagcgaaattttggagtttgtgtccgcgggcccgaaacagtacgccttgaaacttagaagaaagaaggatggtgtgatttggcacaaaaccaaaatcagagggatgacattggatagacgaaacgaatttaaatatgaattgttcaaagagatggtgctggactacaaagaaggggtaaagaaagtttttcactacccggagaagatcgggccaacaaacgacttccgggttctctcaaaaaatgtgcaaaaagaatatacgccggtgcagaaaaaaggaattattgacgatcactttaatgttttaccctttggatattattgataattttttggataattttgtccatgtttataacatttaatattttaaattaatcaaatttgtttccttttttagaatgtcaaagaaaaatttccaagaaacttcaaaagaaatccgccgctcgaaaaatacaaaaaattatttcaaaaacagttttaatttagaaaaaagtttcgaagaagtggagagtcacataaaggaaaataaaaaatttgggataaaagagcaagtgacaactttctattttaagtgccccgaaaatgaagatcccgaacaaatgtttaaaaaaatcctgaaaaaattaatgacggatgcaatgaaccgtgaagctgagcctggctggaaaattgagaaaatttcagtggacctttattgcagcgccctgtcggaccccgtgatcatccctgcccgccccttccaacattcgaacccagacattgttttcaatgagttcatgcacaggcatcaatcatttggggaagtgaatttgttagaccagagaatttcaataattattgccacttattctttccctgttaaataaattttttaattttttgatttctttattttttgtttattacaataattatttattcgaccttttttctttaataatttttcagttatgtactcctttaaaaaatattttgaggagactctcgaaaaagaggactttttctggccgaaaaacagagaagacgttgaggcgttgttatttgagtcatcagattataaaattgcaatacatagagactacgaaagcccttattccgattatataaccatatataatcgtacctcgattttttgtttcaccatggttgagagaaatttaagattttttcatgacttaggaagagggacgcctatcggaaggtttacaactgtgctaaatgttacggtacaggcgaattatacgggagaagggtacatggcaccagcgttttacttttggttcttttgggagggcagaagtcaaacaaccaacgcatccttcaggagccgttttttttgtattgcgtttcagcgttgagagtgatgggcagggcatggggcagagaactacttatgaaccctatcgaaattttacttgacatcttcttccaacgcatggataggttagaaaaaaagcaaacataagcttaaaaattttttagagatttggttggaacatgggcactactctatagactcccgccctcactttttgacgcttcacgccgagtcgttgcaaagaaggcaatggaagaatttttaaaattaccatcattttttcgcatgattttttataataaatattaattggaaatgtctttttaaaattcggtttctggccaaactattcattcgatcctaatttgctattttttcgtagaaatttagaaaaaatgcaaacaatcgctggaattaaaaatttcgagattgttgatggtgtaagagtttttgttgtgagagcgagaattgagaatgtgacggaggcggagtacagggtttgtaataaaaatgaaagaaaatttcagtttgtttaggcatgcactttatgcgtaaaggggcttgttcttgcggggctgagaaaaagatgacatcttatttgaaggtgtctgtggcagatgatacagggcttttggaaaatgtgggatttttcggtgtgcgtgggaaacagaatgggatggtaacgcaacgcttttttaaaaatccatatacattaaatttaggatgaggtcaaaagtttggcaggcgccgtgtgcactatgaaagtcggggcgagggtgaaagaattcggagggaagaagggaatttattactctttgattgatattgttagcctttaaatctataaataaacttgttaattttttctaat

SEQ ID NO: 2600 - DNA, 2416 bp, Heterodera glycines
  unsure (1)..(2416): unsure at all n locations
gataggttagaaaaaaagcaaacataagcttaaaaattttttagagatttggttggaacatgggcactactctatagactcccgccctcactttttgacacttcacgccgagtcgttgcaaagaagacaatggaggaatttttaaaattaccatctttttttcgcatgattttttataataaatattaatttgaaatgcctttttaaaaattggtttatgctggccaaactattcattcgatcctaatttgctattttttcgtagaaattcagaaaaaaatgcaaacaatcgctggaattaaaaatttcgagattgttgatggtggaagagtttttgttgtgagagcgagaattgagaatgtgatgcaggcggagtacagggtttgtaataaaaatgaaagaaaatttcagtttgtttaggcatgcactttatgccgtaaaggggcttgttcttgcggggctgagaaaaagatgacaccttatttgaaggtgtctgtggcagatgatactgggattctggaaaatgtggcattttttggtgtgcgtgggaagcagaacgggatggtaccccaatgttttttaaaaaattcgtatacaatataatttaggatgaggtgaaaagtttgtcgggggctgtgtgcactatgaaaatcggggcgagggtgaaagaattcggagggaagaaggggatttattactctttgattgatattgtcagcctttaaatctataaataaacttgttaattttttcaaataaaaatgttttacttaaaattatttctagtttggttcttgttggtcggaacggaaagttgttgcctttcaaaagaagaaaaagagcaatttaccagtgcccgaagaactgtagaaggcgtatttagagatataattagattagataacgaagcaaaagaattttctttttctgcacataataccatgggtgaagcccaaaatattaaaaataaaaaccctgataaacctgtgtgaatttttggcatagcaaaatattagatggagttttaaaattcatgccctatttgacaaaataaaatgaagaaaaaaatatgaaaaatattaaaaaaggtatggaaaaatgtctagacagaaaagatttaactatgtgtcaagaattagcagaagaggccaaacaatcaatcgaaatagctaaaaattatcggcaagaaattgggcaaatttatcggaccgcttactcgcagccagatttaggtattggagatttggcaaataaactaaaagaaacaatgcgcgaaaaccaaatacggtttgaaaggcaaagacctcaggaagaatttagggatgaatttattgcttataaaatttaagaaaaaaataaaaattcgagaaaatgaaactgcatgagaatcaaaggttgtgggacataaaccaaaaacaggtgaaaagggaaacaggtgaaaataggtgaaaaggaaacaggtgaaaacaggtgaaaataggtgaaatttcacctaaaaatatataggggcgtgcatttaatggggcatattagagaatgtctcaactagtatcaataaaaagtgccaaaagaaaattttgtgatggttatcgctattacaaacataaaacgaccaagttcaaactttggtggaaatgtgaacttaattcacatgggtgccagggctggggttttgaaaaggaagggttttttacaatgacgcgccgacacaatcatcatcctgaccctatattaattgaaatcgaagaggacataaaatatcataatttttctgcgggggcaaaatgctttttgggtgacaacaagaaatagttgatgatgctaagaaaaatccgagactccaaactgaatttagagatgaatttattgtttgtaaactataaataggatcaagaaaaaaaataccaattaaataaaaatgaattttcataaatcggaaaaagctaatgccattttattggaggcagctaaaagagagacggagagagcatggaaggatgttgttgcactagaggaagaggttagcgattttgccaaatcttctcgggaaactcttaatcgtgcgataaaatcccgagagaaagccccatacgctaatggtgttcgggagttttacataaaaatatccgactcaatctgggaaattttcacaatcttggacaaaattaatgtagagtcagaaaaggcagaagctgtatggagggaattggaaaaatgcaaagacttcgaactggcaactaaatttgaggaaaaatcaataaacgcattaaccgaagcccataggttgcatttcgaatcccgaagagtgcataataaaataagagcgtatgaaagtagacttcaaaatattgtctgggaatttattggactaaggggggagatataaaaagaaatntttttttattaaaattaatgg

SEQ ID NO: 2601 - DNA, 5741 bp, Heterodera glycines
tgatgctcgaggaggccatcagagtgccttggatctgttaacagttaaattgtttacaaagttgttttgtttcaattagagagtccctctctttccccgagccttcggtggaaaaaaagtcagggatttcgggaattaaattaaacattttaaattattattttttcaaataaacatttggtaatcggacgcacaatggccattttgtcctcgtacactttcggcggcacaaagtcgtcaatcgtggcattacagcggaattggtccatgctcatgaacgctttgatcttcagcagaatgggtgggggtggtgacaaatttaattttcaataattgaaaattagggcttaacgccaaccgatggaatgtaagcgaaagcgacgccttggagaagagccaacctcaaaaaaagcatttttattggaagttaaagaagataatttaatttcaaaattaaattaatatttaaaaaaaaatattttcgaaatttttttgacctcatcccaaacgccgtctgcaaaattgtgccaatgccacaggtgacaaaagtggcggcgatcagacgcactcggagctgatcacggtcccttcctgggcacacctcgtccgagatcagaaacgggatggatacgagcacggacagggacaccatcacttgctaaagccggaattaacagctttcattggttagggtacggtacggtatgaaattattacggtatgatgagcattgattgattggactgatcactgattgcaatttgttttacctgaaagccaaacaaaaaggtcagcagaaatggtgggttttcgtccgctttgtacagttttctttgctgctggtgtcttttgtcggcttttccctccgtttcggcattgcccgagggcacaaatccgtggccattcattgccgctgaatttttgtgctgctcgccattggcagtgtccggctccgattcgttgggacaaatcatttggaggacaaaaaattggcgaaaattagggacaagggattaattgtcaagttaattgatctgtgaagaagcgatcagcagatctaaaaggaaggaactgtaatacagtaagaaaccaatgagtttcgatccaagcggcgattgtgccaagccaaatacggcattttaactgtccagcatgaggtttcttcctatcaatacatatgccaaaaaaatcggtggaatttcgtgccttcaaaactgttggggcttcaagggtcgggggcatcggacgggtcgacttcctctcccaaatagtcctcggctgatcacctgactgatcagtgagtgtgtgctgtccatggactgatctctgctgcccaccccaaatttcattattttatttatttataaatttatttttcctgggatttttctttaatatatataaaaagttttttataaaaacttcggccattcttttttcttttttttttgctcattttttggtgagtcagccaaacttcgctcggcactctttggccttcgtggcaaatgaaaatgagaaagaaaatgacacatttattccctcctcccccctttttttttgttaatattttttgctttttagattagaatttcttcacgtttctgagcattgttaaattaaattgtgtgtaaataaaaaattattggaagaattttaaaaataaatcctggcaaaatttcggatttgtaaataaatgcaaaaatggaaaatgatacaatttttggtatgttttatgttttaaaagtttaaaccaaattggcattttctgaaatatttatgcgaatgttttggcactttttgtctatcatttcacaaaaattggcccaataaaataaagtggcaaaaatttcaatgttttttaacatttttgttttgttgcgaaaattaaattaacaaaaatttgtgcgatgatttttcatcattttggaattatctttggaatttgagaaaaatgaaaaaattgcctatatcaaagcaaatttttagaatggaatttgataaggcattttagaaataaaaaattaaaataaaacgaaataaaaatggaaaattgaaaaaatggcaaaaaaggaataaataaaaaataatggcatttagcattttatattaagtaaaatttaatgagagcaataaaaatgtgagaaaaaagaatatttctgataaaaacccaaaagaaaaattttgagtgataaaagacaaaaggaaaaaccataaaaagaaatgttttattttatggaaagaatttgcaagcaaaaagagagggtttaataaagtgattaaaagttttagagagtgagtaaataagtgaatggcttctcctttttgaaaggaaacaattggccaaggacagaaaagaagtggaaaagcactgatcagtcagaagaagtgaagttggcttaaattctaaaaagcgagagttaaattcggattaaatgaatgattgagtttttaaaattgggaaaatttaaaaggaactgactgatcagtgatcactgatcagtttgatccaaggaaaaatattttaacaatgaattgggttttcaatcatttttggcaactgtaaaattgattgattggtcagggtgatgtgacacttgcgccgcgacagttgccccccccctattttgacacaagcgaaaccaaaattaatattttcaacagtattctaatcccatccttcgaatcccttcatccccacacggtattgcaatgcatgaatatgtcggatcaaatcatcgtcatttttttcttctttcgcgtcataagcaataaaattgtgtttaaaagccggaaaaattgaaattgagttcattaaaaaataatcaaaaatgaaaatatttcttttttatttcttgctactctcggcagtgaagaagaaaaaaacttgtcattgctcttactgtatgcgttgaccaaagacaaaaaattaagtatttaccattgtgattagtgatttattgttgtgtttttttaattagttgtcattttgcgtttaatttatagttttagtaaaatttgttgataattacctaatgttgaattttatttaaaatataattggaatggaagttttaattctgaatactacattaactttaaacattaaaattgattgagaaaattatgctttaaataatcaaaattgggggtgggcggcgcaactgtcgcggcacaaatgtcggccaatcattggtcagtacgctttgcatttgatagaattatttgtttaatattcaataaacaaaaatttatcggaaaattttttgactgatcgatggacagacaaaaaatggacaaattaaaacaaaaaataaataaataacggaagatgtaaatatgcacacaataacataataataataataatttaaggacggaagtgaagtgcgacggaaaaaacggaacgaaaacatttcaaaaattaaattaaatttcttcggtcttccgattttattcttacattttttttgtttgctcaatttatttatttatttttcaatttttgtccactaaattttgctcaaaacaacgcactttttaaaagattccctcacaaaaaatcctttaaaattctttcaaaagaccacacaaagtgcaaaaaatgggggggggggggaaggtttaaaattagaagagaatggaaacaaataatttgaggttaccttattaaatccatccttttagtttaattaaatttgtttaaaatataattcaaatttataattaatctttaaatataaaataaaaaagaattttggaaaatatccagaaaattgtgatgtaattaatgggttagcaacatctcagaatgattatgaccttttgaactgaaagaaagcgaaggtgaaactgaaacggcaaaatgatcgatggacaaattgggaaaattaatcaccaaaacaccactaattactaaaaataatttgcattaattaatccgagcgatttgcgtgtgaagatgatgatgtgatgcgacgtaaatgtggtgaagtggaagaaatgtggaagaaagctgcttgcaaatggaaggtcacataaataattgggggagagggcgggtaattagcaaaagcaattaatattaattatgaatgcccgagggcatggaaaaatggagaagcaaagacaaatgataaatgcataaaattaatcattgaaaaacggtacctaaagagaaaagaatgaattggagacgggcaaaattattgcaaattaataataataaattaaacattaattattttttaattgccccaattagttgcattattttcaaaaataatgggttttacaaaatataaatttgaaggaaaataaggacacgattctttatgacatttttgtaattccatcaagaaggcgcttttcaaggacaaatcattcgtaatttaatttatcaataatttagcgatcaattaaatatattatttttcctttactaacacaattttgtaaattgacaaataaacatgactgctaatcagtaattaactaattatttaaccatcaaactaagacaacactttcgagtcgtaaattgcaattaacgaaacatcaaaaatcggcgaaaattactgaattaattgctttccaatttaaatccattaaaaatataataagagtaatataataataatttgatttgttttccaattgtccaaatgccatttattattccgtcaaagagaagaagcgtaaaaataattctttcttttcacgaaggcataaaaaggcaaaaagaatgcttttgcctcgggcaaaagcatttgttcgcttttcagcagacgaccattagtggacaaagcagcaaaagcaggtggacaaagtgaaaaatgagagcacaacagcaggaggagaaacagaagaagagaagcatagggaacggagggaaaagcatggccaaaagggaggaggaaaagcatcgatcagtggcggaagacgaataatggtgataaagctgacgatgatcagcatagtgcatgtggcgagcgatcaggaaaacaatgggaccaaaagaagtgatcagatcccgttttcatgtgatccaaatcccacttttcctattttttttttttacgaaaactgtaaggtcgtaaagcaggaatccagtagcatcgggattgatcagtgatcaaattggtcaggcaaaaaagcggtggacaattcacattgattgatcagcagaaaagtgtttgggggggggtgatcgaatcaaaattagcagagaactgagaaaactgtggttggtttagatcgatgaaatgcacatctttttgttcatttgtgctgtgctgatcactcctcagcagagagcagtgatcgatcaatttgatcaaaaccctccaaactctccaatcacttttcgttttttccatttaaaattttccatcatatccccttaatgtgttttaatgcttaatcccccgcttttccctcccatggatttgttttggctctgtttgttgcttcagctgcacaaatccgtcaaatccatgctgggcagggcgggggagtgtgaatgagtcggtgagtgagtgctttggccacctccgcgtcagctgtccgtccgcccgtccgctcattaaattttttcgccgcttacaaacgatcaatttgccgcgggtgggggggggagacgaatggattccgcccaccccctctgctcggggtttgcggatggactccttccccgatcactcgccgatcagacccattccgccactgatcggatcagaggc

SEQ ID NO: 2602 - DNA, 2161 bp, Heterodera glycines
  unsure (1)..(2161): unsure at all n locations
aagcagcaaaagcaggtggacaagtgaaaaatgagagcacacnagcaggaggagaaacagaagaagaagaagcatagggaacggagggaaaagcatggccaaaagggaggaggaaaagcatcgatcagtggcggaagacgaataatggtgataaagctgacgatgatcagcatagtgcatgtggcgagcgatcaggaaaacaatgggaccaaaagaagtgatcagatcccgtttccatgggatccaaaccccacttttcctatgttttttttacaaaaactgtaaggtcgtaaagcaggaatccagtagcatcgggattgatcagtgatcaaattagtcaggcaaaaaagcggtggacaattcacattgattgatcagcagaaaagtgtttgggggggggtgatcgaatcaaaattagcagagaactgagaaaactgtggttggtttagatcgatgaaatgcacatctttttgttcatttgtgctgtgctgatcactcctcagcagagagcagtgatcgatcaatttgatcaaaaccctccaaactctccgatcacttttcgttttttccatttaaattttccatcatatccccttaatgtgttttaatgcttaatcccccgcttttccctcccatggatttgttttggctctgtttgttgcttcagctgcacaaatccgtcaaatccatgctgggcagggcgggggagtgtgaatgagtcggtgagtgagtgctttggccaccgccgcgtcagctgtccgtccgcccgtccgctcattaaattttttcgccgcttacaaacgatcaatttgccgcgggtgggggggggacgaatggattccgcccaccccctctgctcgggttttgcggatggactccttcaccgatcactcgccgatcagacccattccgccactgatcggatcagaggcggaagcagcaggtgggcactgacgacgggccagcattgggcggtcgcaaaaagaccgatcaatttgccccgggccaaaagtgtgtaatccattgcggcggattttgttatgccgaccaccacagctttatcagcatatttttattcttttgctgatcagtttccgtcttgtggaaatgccttttagctgagcattaaaagtccgactgatcagcggactgatcaagccaaactaattttggctatgattattggcatttggaaaaacattttttacacgaatccgaaattgatattcagtttaaaaatcagagaatttctggtgctgattgtcaattatccatattatctgatcaatcatttatctcagaatgcccactgatttccgtgccgtccgtcggttccatgcccaatttccccccttaacaaattgccccgttcccaacaaaatatgaattgatttccaatcaaatcctgacgattaatttaatcactctcatttaaatttgtctgataactaattagtcatttggtccctcccttaacgcagaggaaaagccgaggccgacgaatccatccgccacatttccccgtcgacgtcccaacgcaaaagcagtcgttagttgctgaagtgatcaaagccattaaaagtgaacgaaccgcagcaagcataacacatttttggtcagtttaattgctaatttggcaacaatttattcaaaaataaaaataaattggcaatgaatttttagagcgaatttaaatgctcttttaaagtgaacaaattttcattggcttaaaacctccttttgaagcggatcaaatttatgccaagcaattgcttaaacttcacaaattaccacccccaaaaaatgttttttactctttttttattacatttttcaatgtttgattgacttttttatttgattttctccgtttgttttatccgatttttcgataattacccgccccaatttccgcttccattattattttgtatgttcgtcgttgtccccattttcaagtgtccccctaagtccccgccccccattttcttgcgcaaagatctccagatcactcaagcagcagttgtgtccccacaaatcagccctttggccattagctgcttcattcccctccattagcttctcctccctcgcgcatttctctctttctctgcccatctctcaggagtgcgcactttctcccttcccctcccattgcgct

SEQ ID NO: 2603 - DNA, 2654 bp, Heterodera glycines
  unsure (1)..(2654): unsure at all n locations
taaaataatgattcattgggccaagcaaaatgaaataataattaattggaagagcagcacaaatggaaaatggaaaatgcaaatttaagacactttttcgctgggctttccttcggcaaaatgcgacggggcatcagacaaatgcttaacgggggagcagcgaacacaaagtaacaggacaagggagcttattttgttaaggggtggcagccgacccctcagggggggggggaggagacggaggacaaatgccggggtcggacccaattaaaaatgattaaatttggtattgcagcggccagcaggaagtgaacggagacggtacggccaggcaacagatccctcaggaaatgcctctgcaaaaaccggccggatttttacacgtaatgaatgtgtttttttgttactcaattaaatttttgcacatttttttgcagaaaattctgcgcgggggaggcataaccatggatttaaaccaaaacggacaacaacagcaacaacagaaacagaagcaacaaggggcatacccacgccaaccccaacaacaacaacagccccaggcacaaaaaataattgaaattttaaacaaattattttaaatttttgaagtaccaccgaattgcgcaaccgcaaccgccgcccgcttccgtcacggcggcactaccgcaagcgcaaagagtccgcgagttcgactccgtcgacggtgacggatacgcagagattgggggacagcaacatgcgcaatggaagagacgagaaagtgccgaaaacaataagaatttataaacaattaaaatttgcaaagtgagtacgccttcggcctcaccgcgcaacgtgaagttcagcgaagatcaggaacagcagcagctgtacagccccgcgccgcaccgcagtggcagcgaaggacagcagcggatggccgaggcaggcgcagcgtcggcacagcaacagcccatgacgcagtcgatgtacgtgcagtcgtcgatgccgcgtcagcaagcgcagtacggacgcgtgggcaccgacacgtttgcggttggtccgcaccatttcgatgaataaatctccattattttaaggtgtatacgcctccagcacagcagcaccgctcactgagacaggtgggtaaaggaaaaggaaaattcggaaaatttcttcggaactaaatttcactttcggcacagcaatttgcctccggtcgtcttgtgcccgtagggcacgacccgctgcgtggcggaccgggacggcactttccgtccgcaggcggaaccgccatgggaggcggaggcatggacggctccctcagtacgccaccggcacgcaaatattaccagcgacagccaagcgtggatgaggcgggcgccggtgccgcgctggatgaagcaacgcgcgacatgctgcgactgtccgccgagccggtcggcaccaaattcgcgcggatggacggcgcgggtgggcgcgtgccgcacgttcagaaagccgcttcgacgagtgccgtgcagcgcaatttggtcagaaggggagggggcagtatttcggacagcaaattttctcgtttaagatttccgcacaaagcccattggcacgctttggagtgggtcaaccgccgctgggcactgccgcggggtcgccgctgacaacaggcggtaccgtcggtgcggccggcctgcgcgactactcaccggacacgctgagcgccacagcggccgcggcagcgcgcggtcgccgctcaaccgcgccgtttgccggactgacccgctcaacggggcctccgttggcacaactgacgccaccgccgcaaattggcggtgggacgggtgggggcaatttaaaaataaattaggtaatttaaaaaataattcagcagagggcgaacccatcgctggaggggaggcggaagaagaagcgggcggcaccggccgcgtgctttaccatcaccacgcgcggcgtgagcacgagatggaaggacgacagaaaaaagtgcagttttaaaatgggaacggaatgccaaacaaatggtataaatgaaaatgccaaaaaatgaaggtgggcactccaatggtgaaaacgacggtggagggcaaactaaaaatggagaaatcagtgggcgcaaatttgatgcgctgtgatcacgaagtggccaaagtgaggaaattggaattgaagctgcacataaatatgaaaattaaattggatttgtacaatttgttactgatcgaacattgttcagttttcggatcactctctattggcttttgatctgctcgctgatcatttgcttatcttcgatcagtcttaacatgtcaaaccaacccataataaatgggttttcccccggctaacttagctgattgaactgttgaataatacgaccccttagttttttcttgtaattaacgatttctattttactgagttcggtcaatttattgagtttgatcggcccgatttttgtctgatcagcattgaaaagttaaactttattttaatctgcttctctttcgcttcctctctctctctccttcttttcgntcattgcccattcttctcaggcgtacactttgcgcgacactgtaacccactaccgtatccgggacacttttggcaaacgccagctttttggtgaagaagtgcagcgcgcggccagcggaatg

SEQ ID NO: 2604 - DNA, 1218 bp, Heterodera glycines
  unsure (1)..(1218): unsure at all n locations
tgccaaaaaatgaaggtggggcactccaatggtgaaaacgacggtggagggcnaactgaaaatggagaaatcagtgggcgcaaatttgatgcgctgtgatcacgaagtgcccaaagtgaggaaattggaattgaagctgcacataaatatgaaaattaaattggatttgtacaatttgttactgatcgaacattgttcagttttcggatcactctctattggcttttgatctgctcgctgatcatttgcttatcttcgatcagtcttaacatgtcaaaccaacccataattattatttcttagtgatcaatcgatttcaatttttgatcggtcaatttattggggttgatcggcccaatttcagtctgatcattaacttatttccgataagtcgtaatatgatcaataatggggtttcccccggctaacttagctgattgaactgttgaataatacgaccccttagtttttttcttgtaattaaacgatttctattttactgagttcggtcaatttattgagtttgatcggcccgatttttgtctgatcagcattgaaaagttaaacttattttcaatctgcttctctttcgcttcctctctctctctctccttcttttcgttcattgcccattcttctcaggcgtacactttgcgcgacactgtaacccactaccgtatccggaccacttttggcaaacgccagcttttggtggaagagttgcagcgcgcggccagcggaatgagcggcgaggaggacggtgagccgaaggtgcgcagttcgggcacttatcggctgtccgtgtacgaagacggcaaagaagtgggcacgcatgaggccaacatccaattgccggaaggaattgtgagccaattaggggcaatcaattagcgctaattaatcgcccaaacaaattgaagaacaaacccgactatttggcgaaagtcagcgagaaactattggctgatttggcatcgctggacgacacggccgaccaaatgaccgccgttacgcgtgtcgaaattgaacgcgttgaagacgtgacggacattataaaaacgtaccgtatcggcgaggcggcacccaaagaggagaagccggctgaggtactgtagatttatcatgagaaatggtaaaaaattgagctgacaaacgagggagatgatttgaaaaagcaatagaagccatttgtaattcaaaggcaacaagacatataaa

SEQ ID NO: 2605 - DNA, 1342 bp, Heterodera glycines
ttatataggttttgagtttcgttgctaaaaccattttctcccggccgaaggccgggagcgccctgaaagtggtggaagggtcttacaactttttgaggagaatccgggaaaactatagagaaaaattcagcgcggacgactgagtcccggggaccgatttctcactttttcttgcagtttagggcccgtaactttttttctaaaactcggatcaaaaaattcccgctgtgagggcactccgcagaagtgtcctctataatccagtattttttattttttgatcagaccaaatcccggacctgtacagacacggagactcagttaatttttttttcccacttcagtaccaggcgaataactcattagggtttgatctgagcgaggtggctccagcggacttattgtagagctttgaaagctcgatttttccagattttaaaatttcgaaaattttcaaaatttttcgagttaggcctaaaaaacggttttcgggttttttaattttatgattttttaacgaattttcccagaaaaacggagaccacttccaaaacatagtttttcgagctctatcgactggtatttttttcggaaaaatttcgattttttcccggaaatagaaaaaaattttggcctgagcgggacatttgagtcccgggctcataactcgttaggggttggttttagccaaaaatggcctaagagcaaaattgtagagctttttaagctctatcgaacggtgtactacatgatgtaaaattttgaaaaattttcgagctaggccccctagaaattttcggaaattttttttcggacgaaaatgggggtgaaaaatattttcctggggtaaaataaggtgctgagtacgaatatgatgtctattttaagtttcagaatttttggaattttttaaaaattcgaaaatatttggcaattttttggccctcgggattttggcctaatatttgaaaattcataactcagttcagatcaggtctattttggcgaattaaagctttaaaaatagcaaaaaatcgggaaaattttatgagatttatttgaaatttatagcacaaaaacaaaaaaagttattccagaaattctggaaattttcgatttttcagaaaaaaattcagaactcggttctgtaaaggtgtttttgaaattttaaatacttaaaaaatccgcaattttttgctctattaaataaattttatttggcatttttatcacttttttgcgaattgttataaaaataaaagtgattttgagattcgggaccaaaggggggtgaccaggatttttgagtggaaaattatctttcacaaaattcttccaaaaa

SEQ ID NO: 2606 - DNA, 2401 bp, Heterodera glycines
gcgaattgttataaaaataaaagtgattttgcgtccgggaccaaaggggggagcacatgatttttgagtgaaaaaattttttcgacaaaaatcttccaaaaacatcgtcactagggctatttgaggctgctgatcatgaatacgtaaacagtttttacttttgacatagtcaagacctcagaatccctgtgtgattggggattctgaggcatcatttttggggggtggggtgcaaagttcgagtccggacggtgtaacattatttttctatttattttttgctattttcaatttttattcatttaaaatatttttattttattaataataaataaaaaattttcatttgaattaaattattttttggtgaaaattttatttaaaaataataattttttaaattaaagaatttaatgtttttttaaattagaaattgtcaaaaaaattattttcaatacaataatacgcaatcattgtaaattcaaagtttatttttaattaataaaagaaagcattttttaataattttttaaaaaatattaatacattttttaattctatttttcataaaccatttactaattttttaatcacagttgtacctcttctaatctctgtaaggtcaacaaataattaatttgaagatttcttttaaattatttaaatttattttttttaaattaaaggatttcattatttatttttgaatttgtaaaaaaattaattaatttcaaattaaataaatattcaattaataatttccaacgttgtttttaattaataaaaagagtttttattataaaaattttttaaaattaaaatgcattgtatttttaattttaataaaacttttaccttatttatttaatttcaaaccatgttgtacctcttccccaatggtagtacctctcctaaccatggtgtacctctcctaatcactgttgtacctcttttaattacttttatacctcttttaatcactgttgtacctctcctaatcactgttgtacctcttttaattacttttatacctcttttaatcacttttgtacctcctttaatcactgatatacctctttgaatcacttttgtacctcttttaattatttttgtacctcttttaatcacttttgtacctcctttaatcacttttgtacgttttttaatcactgatgtacctctttgaatcacttttgtacgtttttgaatcacttttgtacctcttctaatcacttttgcacctcttctaatcacttttgtacgttttttaatcactgatatacctctttgaatcacttttgtacctcttttaatcatttttgtacctcttttaatcacttttgtacctcctttaatcacttttgtacgttttttaatcactgatgtacctctttgaatcacttttgtacgtttttgaatcacttttgtacctcttctaagcacttttgcacctcttctaatcacttttgtacgtcttttaatcactgatatacctctttgaatcacttttgtaccacttttaatcacagttataccttttttaatcaaatttgtacctcttctaatcaaatttgtacctcttctaatcaaatttgtacctccttctaatcatttttgtacctcttttaatcacttttgtacctcctttaatcacagttgtacctcttctaatcatttttgtacctcttttaatcactttttgtacctcttttaatcacttttgtacctcttctaatcactgttgcacctcttctaatcactgttgcacctcttataatcactgttgtacctcctttaatcacagttgtacctcttctaatcacttttgcacctcttctaatcacttttgtacgcacttccggtttccattgcattatgcgatgtgtcaactccaattattggaggaaaccaagtgcatgtcggctgacgcaaagaccctaacagactaaaacgcgcctaggtagcgaagctcacaaagcgcgaagcgctttttcccagcccagatccgacggttcacgcacccgctagtttttataataaattgatagagagcaaaaagcacgattgtataatattcaaaaaatttatctatgcatttgttgaacgattctaaacccgatcgaattttttaaacctttatatgaaaacatttattgcaggaaatgacaaattccaacgtgggtgagcacacatttcagataagcttcctatcattatttcttagaaacaactaataatctgttgaacagttatttcaaaataaattcgaatatattagcttattatgcatcttcagtgtgcattctaaaataaaatcattttttgttctaattttatgatttatttattttctgttgactaaatagtcagttcttatagcaaatattaatttatatttgcg

SEQ ID NO: 2607 - DNA, 946 bp, Heterodera glycines
tttgtacctcttctaatcaaatttgtacctcttctaatcatttttgtacctcttttaatcacttttgtacctcctttaatcacttttgtacctcctttaatcacagttgtacctcttctaatcacttttgcacctcttctaatcacttttgtacgcacttccggtttccattgcattatgcgatgtgtcaactccaattattggaggaaaccaagtgcatgtcggctgacgcaaagaccctaacagactaaaacgcgcctaggtagcgaagctcacaaagcgcgaagcgctttttcccagcccagatccgacggttcacgcacccgctagtttatatatacctaaagaaacaaggcaactcatttccaaaaacaaaatctccttacggtttgccgggagggattcgaaatttcgaccttgggggtaacttttgacggcgcattcaggaaaactatagatttttcgatccgagggccaactgagcgccaggcgccgaaaagtcacttttttcgaagcagtttttgcagtttttgggattcaaaaattttttaaaggcttaaatgaaaaatcggcctcgataggattttaagttggacttttttggattttttttgtttcttgaccgaaccccaaggtcttgtcagtttttccgaaaaactggctaaaaattgcatacttttttgggccatttcagcgccggctgaataactcgccggggtttgaccggaggaggtcggtgtaagcggcttttttgtagagctcgacgagctctatccaaccatgtttttggatttctgaaattttcagaaattttcgagctaggccccctcgaaaattttccgtttttgaattttatgattttttacagatttttccggacaaaacggagaccactttcaagcaaccgtttttcatgctctatcgattggtgtcattttcagaaaaa

SEQ ID NO: 2608 - DNA, 1624 bp, Heterodera glycines
  unsure (1)..(1624): unsure at all n locations
tcattttttgttctaatttttatgattattttattttctgtgnactaaatagtcagttcttatagcaaatattaatttatatttgcgtagcttcaaataagcattctggcttcaatttcgaagggaattgaatttttttataataaattgatagagagcaaaaagcacgattgtataatattcaaaaaatttatctatgcatttgttgaacgtttctaaacccgatcgaattttttaaacctttatatgaaaacatttattgcaggaaatgacaaattccaacctgggtgagcacacatttcagataagcttcctatcattatttcttagaaacaactaataatctgttgaacagttatttcaaaataaattcgaatatattagcttattatgcatcttcagtgtgcattctaaaataaaatcattttttgttctaattttatgatttatttgttttctgttgactaaatagtcagttcttatagcaaatattaatttatatttgcgtagcttcaaatgagcattctgccttcaatttcgaagggaagtgaatttttttataataaattgatagagagcaaaaagcacgattgtataatattcaaaaaatttatctatgcatttgttgaatgttcctaaacccgatcaaattttttaaacctttatatgaaaacatttattgcaggaaatgacaaattccaacctgggtgagcacacatttcagataagcttcctatcattatttcttagaaacaactaataatctgttgaacagttatttcaaaataaattcgaatatattagcttattatgcatcttcagtgtgcattctaaaataaaatcattttttgttctaattttatgatttatttgttttctgttgactaaatagtcggttcttatagcaaatattaatttatatttgcgtagcttcaaatgagcattctgccttcaatttcgaagggaagtgaatttttttataataaattgatagagagcaaaaagcacgattgtataatattcaaaaaatttatctatgcatttgttgaacgtttctaaacccgatcaaattttttaaacctttatatgaaaacatttattgcaggaaatgacaaattccaacctgggtgagcacacatttcagataagcttcctatcattatttcttagaaacaactaataatctgttgaacagttatttcaaaataaattcgaatatattagcttattatgcatcttcagtgtgcattctaaaataaaatcattttttgttctaattttatgatttattttattttctgttgactaaatagtcggttcttatagcaaatattaatttatatttgcgtagcttcaaatgagcattctgccttcaatttcgaagggaagtgaatttttttataataaattgatagagagcaaaaagcacaattgtataatattcaaaaaatttatctatgcatttgttgaatgttcctaaacccgatcaaattttttaaacctttatatgaaaacatttattgcaggaactgacaaattccaacctgggtgagcacacatttcagataagcttcctatcattaatagtagaaacaactaataatctgatgaacagttatttcaa

SEQ ID NO: 2609 - DNA, 6895 bp, Heterodera glycines
  unsure (1)..(6895): unsure at all n locations
tcattttcggcactttanttggaaaactcccaatttttggcactttntgggaaaccatggttgtgtcaacattttttgtaaatttccaatagtaagtgggattttgccgcttttttcctattccaatttggcattttccaattttggcactacgatttttagccttttgtcagttaaattttcttaagcagtttatcagttatcttcttacggcactttctctgaattattttttggcattctgttcatcgtaatagatttttgacaacactctcacatgtttcaagttcggacaagtcgaattcgtttgttgcggtgccatttttggcattttcttcctccgccgcggcgtccaaaatgccggccgaatcgccgtgtaaaaattcttcatacgttcgtacaaaatacaggctgctttctgccggataggcatatttccttgaaatggtattaatattattttgaaaacttcacaaaaatttaaattttatgggaaatacaaaaattatttaaaatggaaaatgggattttacaattttgcataaaataaattgcaaaatattttaaataaatttcagaaaaagtaaaataaattttcaaatttttattaaattaaatattcaataaattcgaaggtttaataaattataagtttaaaaataaggtttaattaattattccttatttgtaaaaaattaattaattaaaaaattaattaaaaagtttgaagaaaagatttaattattccttatttcatgaagattttaaaaaaataataaataaattcaattatagaaaataatattcaatgtaccgtatccatattgtttcctaattacagtatgactcacaggtgttccatttcatcaattagcccattcaaatgggcgcgccgcgttgcgttggacagatcgccagggttgttgacaaacagttgcgcagttgtgtaaaatggcaacactttttcctcgcggtatttctcaatttcgagcagcggcgagtcgggcgggaacagctttttcagcgtcaaattgatctcgaatttgagcagggcctggcgaaatgatttttttttttaatttaaatttttttaaataaattgataaataaaattgaaaaaaaggagaataatcgaaccaaattaaatcagcagcaagaggctacatgaaacatcaaaaataaaattttgggaaaacgaaaaacgaaacgaattaaaattttcgcgaaaacaaaacgaaaatttttttttggtgaatgaaaatgaaaaaaaaatgaaaatttataccaaataatatttatagtgatgttagaccaggggtgcgtatcgaaaatttttcaaaatcagatcatcgagcccaaaaaatcaaattttggtgtcaaaaatcagaacattttgtaagattgcattaaaacagttatttttacaatttattcgatcaaaaatgtattaaatattatattattcgccaacaattaaatctttaaaaattttggtgaggaaattagcaaatcgtaaatttcaatgcactcagtagcaaaaaatcagatttttaacaattttttgcggcgcattttttcaaaaaactttaggtgaacgggcgggggaagtgggagtccgacggtgccgataggttaattcgattcgctaacagatttgtccaaaaaattgtttaaattttgctaaaaatcttcttttcatgataaaatagtgacattatgccataaatttcaaaaattttgagtttatttaaggaatcagaacaattctgataaaacagaacagatacgcaccctgatgtagacagttttttctgatccagatcaaaatttttaatcattgccttacaataggggctcccattttaacaatttttattttataaaaacaaacagcaatttttcggattttctgcttgagaatttgtgtaaaattggacacattcggatgtgatgatttgggtcaagtattaacagagcaaaacatatgatcagttttatcaatcaattgattgatcacttacattgagacagacaaccaaaaatgcggcccacacaatgcacaccaacagggagctgatcgcattggaaaccgaaaagaaaaattggcacaattaattaatgaaggtaaaaaaattccgattaattaaggataaaaaatgttggatattaaaaaaaaatttttttatatgaaattttcaaggaaagaataattgaaattttttggcaatttttcaaatttttttttttaaattagcttaatatttttaatttttctcttgaaattttcttgtgatcacgatgtttaagcattaatgaccatgatcatggattgatttttgatcggattaatcccgtgaatggaatgtccatttgtttttgttttgaatttggcacactgaccaggcaaatgtaaatgtctttaaatgcgttgaatttgcgttctaatgagtgccgaaatccaccgcttttcgtcggcttaacatcatcctctgacaaattgttgctatttgtggcatggattttgttgttgtcccgcttccgggcactgatcagttcccgacgtgcacaaatgacgagcactgaaaaacaattgaaaaatgctttagtgggagggtaaaattttgattttctagaggccggcaaaagtgggaatttttagtttaccaagaaaatttgaaaaaaaaatagaaaatttttaggttttcaaggaaaaagctttagggggagggttaaatttcgatttttaagaggcaataaattttagattttcatgagaaatagtaaaaatcaaatttttggagtgcaaatattttaaaattgcatttaaaattaaaaatggggacgggattaaatttcattttaaatttttaggttaggaaaaaattttaaagtttgtttttggtggtcaattttttactcatctctctcctaaaaaataagaaaattttttgattttcaatatttctggggaaaatatttaaaatattaaagtttaatgtataaataaataattttgaaaagataaaaaaaagttttcatttaaataaattttgtgatgataaaaaatgccaaaaatgacctgcagtgaacaaagtgatttggtagaagaaatccacgataatctgaaaaaataaacataaattagtgaacaaaaatttttaaaaatatccatttttgtttaaaacaaattattttgttgatattatttaattttaatcagagtgaattttagggaccatatttttggaagattccaaaaaatcaacccctaacgggatatacttatatttcggttttaatggatttttttacaaaatttcatcaaaatttgcccaaacattcctgaaaacccaaaaaatgatgaaaaatggttttaaaacattgatcagcactagagaatggcaaatcaacctttttattagtttttgcggggtatcaatttaaatgttgatatttaattaaatcaactaacattatgccatcaacgcaaatatcaacgtaatttttaaaatttgcgaaaatttgttaaaatttatatgagcggtttataattttagtgcgagagataacgcaaaaatgagagagtgctggatctcagtcccagtcatacaaaacatttttgatgaaggagggtagagaaaacaatttcaatagagagcgcaatgggaagggagttcatgtctcttcttcgctgattcttttggtaagagacgcagattcctcactatgttctctattctctctctgtcttaaatctcttcccataacactctctttttaattaatttttctttattcttctttaccaaaaatgcttttgtatgactggggctgaatataacaccctctcacttttgcgttatctctctccccatcttattttccgccaaaagtcatttttgaaaaattgctttaaattttaaaaaattttcgcaaattttaaaaatagcgttgatattacgttgatggcataatgttatgttgatattaaataaatatcaacgtcaatgttgatatttattaaaacaattttcgctaagagaaaaatgttgatttgcctttctctagttccataacagtgcaaccaaattcaaattcagtaaccatttatacaatacgccagaatttttttattatttttatttgtttacctttttctttcaatttgtgaccacacaaaaagggccacacatctacataccgtatttgctctaattatcccccattctccagttatcctccagtctaggaggggtttgaagaataatccctctatcttaatcccccagtctccaagtatcccccagtctacgaggaggttgaaaaataatcccccatgggggataattagagcaaatacggtatacaaacaaaaaacgaatcaatacaaaaaatgcatttacatttgcacattttctatattctttggtagttggattcactcaaaattatgttgttttaatgattcatcatacacaaactttgctttcagaagaaatttgtgttcatttacaaacttgcagcaaaaaacaaaccagcaaaaagatgaaacgcaacggaaattccatttgctcagaaaccaagccaccgcttttggaattgacgccaaagaatgcattaactttccgtggtattgtgtgggctgggccatttgtgttccgggatgtaacccaccgaaagcaataagtctgaattccgaggtacaaaaaaaaactcggaaatctgtgaactcccaggtctaaaatttctcggaaaacgcaatttggttacgttccctggcatgttcgttaaagaaattgacacatacaaaatttgccaaaaacaggcaaactcggccacgtcggttccgtctctttggacatcaaaaattgtgagatctgctccgtttacttcaaagtcaaatcaaatgccaaccacttctattcggttcgtccaaacaccggtgtgattggggcgtacgggcgcgtgaaggtggtcatccaattgcacgacgacagtctggcaaagttggacgagattgaggaaaacaagcacaaattcctgatcatggtttgcaattttcaattgctaattggtcgggtgattaattgcaaaacattggttggtagtactgccgattgggcccccccccctttttgtaaaaaaatttctgctaaaaagtcctgaaaacactttttatggagtttttagtgtcgctgatcacgaatctgacattcattttgaccaattatgaatcccggacccgaattcgaacaaaaagtagataattcaaaattttcggaattcacttttatgttcatgtctgtacataatgaccgttttttgatgttgtagtgatttgactaaatttagagatcgtgatcagctactctaaaaaccccccaaaaaaacgtgttttcacgacttttagaactgcagttgggttacgacttcaaatttcaaaaagattgccaaaatagccccccccccttataaaaaaaacccactaaatctcaacttatggttgccgcccaaagcaaaacccggctttttgttccgagaagaattccaatccaaacttctttcaatcgacccaaccacttttttatgcaaccgcgaaaactcctctgatcctgactgtttgtgttcaaagaaactaaaaaaaattatccgcgctttaaaatctcaaaaaaaaatttgggatttttttagtaattttccatgacagcattctctatttacacactaataacatgattaatgaattccatttgctctttaaggcagcgattgtttcggatgcgtccattggaacggagaaattttggaaaggcaaaaaagaggggatggatggcatttactcgagcaaaatgaagacggaggtgaaaggggcaatgattttggcatatttgctatcgggggctcaaaaagttcatttaatattgtttaaatatgcatcacccaccacccgacagcaaaagtgccataaatatacgcttttccccgggcacaggtgcacaaagtttgtcggtgggaaggagggaagggtgtgctgagccaacagaactcggaagaaaatgtgccgaacggaaagaactcagtgtctgtggagaaagtgccgaaccaaattttggagttgtgttcggagaaggaagcgccgaaccaattctcgaacttggaggaaaatgtgccgaacggaaaaaactcagtgtctgtggagaaagtgccgaaccaaattttggagttgtgttcggagaaggaagcgccgaaccaattctcgaacttggaggaaaatgtgccgaaccagcttttgttggagaagcaagtggtgccgaaccagcaggactcggaggaaaatgtgccgaaccagcaggactcggaggaaaatgtgccgaatccgcttttgttggagaaggaagtggtgccgaaccagcaggactcggaggaaaatgtgccgaatccgcttttgttggagaaggaagtggtgccgaaccaacagaactcggacttgaactcttgtgccatggaatccactcacgtttcgtctgccaatcacttttttggtgcgaatggaaatgagtgtcaatgtgccaattgtttttcaaaacattgcttttacagcacagtactgcgccgaaatggttgaaacacttctcgggaaaatgtcggacaaggacgcgttccatttgcgcaaggagatgaatgatgttttgacgaaatacgaggccgccaccatcgacgacaaatgagttgagagggattgattgattgtctgccagtgatttttatgggtttctgcgcttgaattttttcatttgaacgtcatttcgtcagtaaagcaaatatattttgagtttttttgaaaaattaaatattttggaaattgtcaatatttgtctatttaagcatttttggg

SEQ ID NO: 2610 - DNA, 2473 bp, Heterodera glycines
  unsure (1)..(2473): unsure at all n locations
aaaaaaagcgttcccaatctcgagtggaccacattatctcaaccgctcttctcatttattttattgtggtctttttcatttttgttcgttaagcttttacatattgctgtcgttgaatggacccatccttgtgtgaattctttgccgaaaacgaattgatcagggtgagggggattcatttgttttaaatctctcgttttaatttgtttttaatccctttttaattaaactcagtcagatagtgcccaatttcaatgaccgaaccgtccatttgttctgtggcgattttggcccatttgaggccggcgcgccggtgaccatcccattttggttggccatattgttgaagagacgccgtaaatgcacaattattgtaccattttttactgttttcatttatagcaacttaaaatgggagacaattggggcccggaccacccaaattgatgcagtttgatatcatttgatagccctaattcactccacgaaatttggccaaaaattcaaaaagccatgctttcctaatacatttggcattaacttttctttgagcctaaccgtgggaattatcaatttttaatgtttcatactaataggctactaatttcatgatttttaaatatttcaaaaatgcttccgaattaatgattttcgggtctctaattgtaagttgtaaaattattaaaatttgtttaacgtgtgctcccaatttttcataatttttgccatttcagccccccgattggctgagtggacgagctgaaacgtatgattgttgccgaggcggaacagagagcatttgcgcccattccagagtgctttttcgagctgtccaacctgttgatgctcaaagcgtgggaggatgtcgagcagtatgagcaggtttcaacattacttacagggaggggtccacttgtgtaactgtaccgattgagcggtaccccaaaagagtaatggtaaaattggaatttccaatttgtaaaatccattttagaatcgaccggaaaattttaaaaaaaaatttccccgaaagttttcatggagacataaaattaaatacttttccattttagttgaaaatacgtcagaaatgcgcacgtcgaccatcaaatttggccaggcgagtttttaaattctcagtttttttaaaccctgccgatatcctagaaaaaaacatgaatgatgttttgacgaaatacgaggccgccaccatcgacgacaaatgagttgagagggattgattgattgtctgccagtgatttttatgggtttctgcgcttgaattttccatttgatcgcaaattgtcactgcttttccgtttccgaccatttgttgcgttgtttattagagcccgggcgcccgccgggcttttgccgggccgcccggtaaaacggtctttttttgaccgggcccggcattttcaaaattccgggctctattatttattacccagaatgttgaaaattaagattgcattttggagaccacatttattgtcagattaagtgattgtgaaaacaaaggcaattttgaaagagatctctttaagctcattaaaagtggtattcgacgtcaactgacttccacgctccaacatgcagcaccttaataccaatgattaattattagaggctttaccagagttggtggttactttgagctggataattccatggatggaatttcgcgttttttccaccaaattgtagaaaacatcttccgcccttaattggagagtgattacatgaacatacagttcaaaagcaacaattgcttacaaatggtccccatatccgaaaaaacggtcatcattttggttgtttgggttcggaggccgaacaggcattttgtacaagcgacgacgacgccagacagcttgcatctaacataagacatttagcaaactaagaacatgataaaaaaatgaaaaattataccaattcaacggtttcggcatgctccacctctaaaaattccaccaactgggcaagggtcagcgagccttgattgatcttaaatgggtcgggtggtgagtcactgtcactgctgttttcggggggactgtgctgttgttgttgtttcattttaatttttgaacccgaaaaggtcctggttttgcccaaaattcccggtcccgtggcactctattctaaacattaaaaattggcactttgcacttgggtgttcccgaaaatagtggcattctgaaaaataaaatttcatttcccaaagctttaggttcgatttttgctaatttttattgggtttatgactatttttttagcttagtcgggattatgacgcgtcgggattatgacgcgtcgggatttagacacgtcgggattatgactcattttggcttagtcgggatttcgacngcatcgggattttgacagcgcgccntttaagtagtggcccgttttttcattaattcccaatctgcccctaatttcgggcccccccccccccccc

SEQ ID NO: 2611 - DNA, 3042 bp, Heterodera glycines
  unsure (1)..(3042): unsure at all n locations
attttaaatttaaaaatatatttatacaatttgcccccaggttaaattgttggaaattgtcggagcaatcttttagaaaaaatggtcagttttattaaactaaattctgcaattaccatagatggtgcttgaacagtattgttaggagatgaagcaatgttgggctggaaattaaagaacattttgaaaaaaaattcgataatattattctctgttaatttaattatttcaatatcattataaatatatattttttaaatggtcatttaccaaaattggtcttcgaatcgcattattggcattagatgaataaggctaaatcataaaaattaattacatttctaagcgtatttgtaatttaattattttttaattaacataaataatttcttaattcactgcaattaccacaaatgttcctcgaagtgttgcattgttggggttaattaaattaggctttaaataaattttgatttttttttatcagtttcattatgtaccataatttgccgccaatttcctctgtttacgcctgttgaagaaggctaaaatattgtcagtaattattattttaatttacaatggcaaaatttattaaaatattttcaattaaattattaattaccatattaggccattgaattgtgttgttggcaattttaggagcgggctaaaattaaaaaaaaataattaaaataaatactaaatctttttttttgacaatttgtaactaaatttaattttttttcgctatttaccagaattgttcctcgatttgcgttgttggcatttgaaaaagatggcttaaatttgaaaacaacataaatgggaatatatttagtggaaaaaaaactccttacagatggcacttcaaattgagccaagctgcttactgtaattgaaatttttgtattaaatttttaatttacaaaacattcacttgatttgtactcaatgtcgaacccagtgtgattgcgttgattagcatcatcaacactcaaaatgatcaccacttccgctccgatatccgcataaatagcggctggaactcctgcacaacaaagtcgcgcgcctaattatttaaatcatttttaattaataaaaaataataatttttaattattttaattttttaccggttgcaactttgtcctgttttgctttcacttccacatagctggagcatgtttcgcgattgcatggaaagtccaagcgtctaattgtgaccatgacacgcctatccgcggactcgggcttaattaatcatttgcgtaattacatttaatttaaataaattttttatggtaattaaaaacatgccaatattttccagtagcaattcgtgcttggcgtcaatgacactgtggaaatgtttcccgcaaattcgcctgccatcagagcgccagtgctcaagcagttcgggtttgctaaaattaagaatttaattaaaaaaccttttttaaataattaataacaataataataccattgccaggaatttcgtcacaaaaagcgccagagtagccctaaatgcgattttcaataaatgagtgattttttttaattttgacaaaaaaaaaataatttttaatattttgtggtattattttcgaaaaaatttaaattgtcgccaaagataaaatttgaaatttcatcaaatatattaggcatcataaaactactaattacccatttttcttaaaaattattttttccattaaaataaatcaccgcaggacaaaggcactgattgcaattgttgggattagtgtaaccgccatttgtgcaggccaaatcatttgggcaaacttctttaatttaattaattaattaattttatttttatatatttttttactcgaacaataatgcaggttaatcattttcgcgtccttgaaagaaaggcctccgcggtagcccattgtgtactggtaggacggatcgcgtgtagtgatggagaatctttcgatttttaggggtgatttttcttttttcagtcgatttttatgggtgtatttttcgttttttgaaatcccgaactaggggggtattttacaaaattttttcgccaaaaaattactattttttgccattttggcctccatttttcaaaaatatagtaaaatgggggtccggcggtgccgataggcgcagccgggaaaatttttgagtattttaacgcaattttgttaagaaaatcgcttaaaatttcaaaaaaatgtactgaaaatttttacttttttgggtttcgggggggggggctttagcccccntcaagcctcatgaacaaggggtgcgccaggaccaatttttcgtacgaaggctctggggcccagtcgacccccaccgtaatcaacgtagaaacattttttatacgattttaaaagaattttttttgtggcgtaccaactgcactagtaccacattttttgttgttgcaatggtttttaactaaatttagattattttgataaatttaggcacaaaagtaagaattttgaaaatttggaattttcaacttcttgttcgaattcgggtccgggattcgaaaatggtcaaaatgaatgtcagattcgtgatcagcgaccctaaaaaccccataaaacttgttttcacgactttttagaatcgaaaaaaatttttccaaaaacgggggggggggggaccatcggcagtattacagtgaaatgttttggcatttggcatccattcgacagtccccttcggcactgttgtctctctcatttttgcatttccctccccattttggcatttgtctctctcatttttggcatttccctccccattttggcatttgtctctctcatttttgcatttccctccccattttggcatttgtctctctcatttttgcatttccctccccattttggcatttgcacatctatggctttgtctcttttaagccgttgttgtctgagtttattttatttacagcatttattaaaattcaaatgtgctttagtgactaaaccttatgcgctttcctttttttcgcttgggttcaattcccccactggg

SEQ ID NO: 2612 - DNA, 6377 bp, Heterodera glycines
ccccccccccccccccctgcgtacgcccttggaatgaattgattagtaccaattattaagaaatgtaaaaaattggctgcaataaataattaatgaaattttttgtgtttttaaattataaaatttttgaaatttgtgtatattttttttttgtgttttattagatcaatactcttttaattttatttatgaacaattgcagacaaattattttgcttttttaaaatattaccaaaatttaattaaatcatattttagtaataataataataataataataataataataataataataataataatattttactggttgaaatcccttgcaaatgctttgtttgagtaatgcatcacagaaccgaggtccttaaataaatcaaaaaattattttttgtataattattttatttacataaggctggccaagattgtctgaagtgtccggcgatcgtttgtaaaagtttgattcggttcccttaaataaataattttaaatatttaaaattatatttattttaaaaaattttaccgacaaaatgttgttgtaattgattgtcacataattttcttggtcagttctggactgttcatgccaaactcccaatgcgtgcattgtttcatgcacagtaatgcccaactaaattttatttatttttagcattaaaaattcatttaaattttggcattatgccaattgggcttaccgtttcgcaaccaaaaccaattgagacaatttgtgaaccgccctgtcgtccgaccattgaccaacagcccgacaaacgagaatattccatgtagtctcttctgccaaccaaatcattggcatctcggtaataagcgaagcggatgcaagttaggcttctgaaaattaataaaagcgaatttgtccatatgtccgatttcaaattttttaaaattcgtaaatgttcaaaaaaaactctaattaataaatgcaattattttcctccattttcaccacaatttgttcatttttttaatttttaaatcaaaaatttgtcagttgaattgaaaagttaaattaaagttctttgattaagtatattcctaagatttgatttgtggtaaaaaaaaataatttaaataaatttattgtaaatttcaatgataaaaaaaattattacgaaatatgtcgatgtgcagcaaaaactgattgagccaacacttaagttaaaaaaaaaattaagattcataataataattaattgaactaattaattaccgtcattttgcccaccggcaattgtaaatggaattgttgtttctgtccaaaatgtgtttgggtccgggttcaattggcgtgggcgcatgcgtctcatcagtgtttgtgacgcttctaaattcaaaatttcgtaattttaaaatttctttggcacaccgttttccatttcgcgcaaaatttgttgggcttgtggccggttcaacagaatgtcgccctcaaacagttgatgcgcaatgtctctgttcacgctcaactccgtgccatcatttgcgccaattttgttttgaattctcagccgttggagcaattttgttggattctcaaaaaaaaaaaaaattaaattaacacataatttaataattaatatttaagattaaaattcacctctgaagcactcgtaacgtgccctttgtggttgagcccagtaatttgaatccgatcaagcaaccgtcgcagattgtttgatatgtctcagcgcagcgatgtccatcggggactaaattatggttaattaggcgtaattaataatttaaatggtcaattaaatattaaaaataaaaagcatagctctttacaacttcacctcatcatccagcaaaattgagtttttaagcgttattggagccgaatgcaaattgtaaaaaagcagagaaaatagtaaacaaattaaattttgcatcatttctttaaaatctatttaaaaatatattaattaatttaaaataacagtttttatcactgaaaatggttcagtttcgctcaatttatgtgatttcaaatatactttttaggtcataatgtctcgtcaatgtataaaaaaacgaactccacaaactccattcccgcagtgaccttggtggtaatgtgattttacacgtttttgcggtgcttttgaaatgaaaaattcaattctaccgaatgaaaacgataaataattttaattaatcttttcggattaatacttatcaattttttgtcaataaaaaaattttcgtttaatgattaataaaaatttttgaagaaaaatggttagatattaaaatttatctatttaatttattgccgtgtcaattcggtccccgttttccttaaaatttattatagctgtgaattcttaaatcgctaattggtcatgcttaatttaacaaaagaaaattaaatgaagaaataatgaccttgacgtaaattgttttttttttaaagtttaaaatcgttggttattaagaaaaacattttttattggtagaaaagaatcaaatataaacaattgtttaaattaatttaaacaaaaataattaaatattatgttatagaatatggcgtgtaactaactatttatatgcaattgttttaattaaaaaaaattcatttttttcataaaataatccaattagacatttttataattcctcagaattaattttccgtgaaatcttctgacttttatttaattacacatggtcatgcttagtaataattttttatgctaattaaatattttccatttcatctgttcaaattgttttttttacagaaattcatctgacttttgtgttggacaaatttagaaacaaaaccaaaaacaacagaaaaattaattttgatcagatttttaattggatcacaaatttagattttgtaatacgcacaataaaatgcatcacatgtacgaaaacaaaggtgcttgcagaagaaattggaagcgcttaaattgtttgagtagctttttaagcggaaatacgatttttacttactccattttttctaggcttaaatctaatgccgattttcgacactcagataattttagcgctcataatgggttgtataaaggtgcttgtagaaggaattggaagcgcttaaattgtttaagtagctttttaagcggaaatacgatttttacttactccattttttctttggcgccagtcatcttgcgcctgacgctaaaattatttatcatccaattaataagctcggtatgatttaaagcaattggcattctcttatggcaaaaaaattatatggctgctaaaaacctcaaaaaaagccaagttttctagccatttcggcgctgcaaacgccatatcttataatataattttttgaaattgtgcagacttataataaaaattcttattcttctttttatttaaatttaattcctttttccatttgtatatttttgggcgatttgcgcccaataattttccagtttttgctcaattctctttctgttttccaatgatgttttcctttttccttaagcttttctttaattgcatcaaatttttgaatgatttctgttttttgttgatcatttgggtcatttcccatttctccacccatttgatcaactgctgctgatctttcattatgttcatttgggtcattttgttccattttataactttatcttctctttcatttttgttccatcctttgccaaatatttcttcaaaatttttgagaatttttttgaatggattgctcaataaagaagaatttttaattaatatattttttaaatttgttcataaaaccagattgattttattacatattagctaaaattgaagtaaataaatgtccaattaattataaaaaaaaagtaaatgcaaaaattatgacatttcgcatttttcatgctaaaatctatgtaaaacttataaatatgtattagaaaatgcaaaaaagataatgggatttcataaataattgtcgaaactgatttggaaacatcggcttgaatttagttttgctttaatacaacttcatattaaaattttagcaaaaaataaaaggtatcaattacatttatatttaattaaacaattcaaaccacaaaaataaatattgtttgtttaatttgacacttattttgtgatttttgactaccatttaggtatgatttattttatctagaaataaatgtaaataaacagattataattcaaaaaatttacattttttaaattatatgcgtctttctaccaatttatatttctaaatttttctttttatggattaaaaaataaaatttatttttattcaaaaaatattcttttcaatttttaaaatgttttttattttttaaatttcttattcaaattttcattttattatttttttttttttgccctttccaatccatttatcaatttttatttctccttttttcatttaaaaattttgtttaacaacaaacaaaaacacagcattatcattattagggttcgaagttgtatgcactaaaaaatgccaaatatgcgcataaaatatgcactaaacccccccccccccccccaaatatgccctaaaaacacgaaaaaagccaaatatgcactaaaatattccttaaaaattgcctaaaatagtttttaactctcaaaaaatgccaaataattgtgtaaacatttagaattgactttaaaaacaccaaaacaatggcgaagtagtgttttagacaatttaaaaaaaaattaatttcaaaaaatttatgtatgcaattttgaacgattttgaatttaaaatttttagtatatgctaaaataaaattacattttttacaaaaacaaattttttcattgttacaaaaggttcaaaatttttcgatttttaaagatgtattttttaatttgccaaaaagtcgtatccttagaaaaaatatgcaaaatcatacaacttcgaactctaattatcactaaatatttttcctttttatcatattatcatatatttttttatatttctttttgaatgacccacttccccgaacccaacggggtaggggaagtgggatattcgcctccatctttgtgccgttggcttccaaaatcctcttcaattctttcaatgccggatcctcttcttcttccgctccacaactcgaactcggctcttccaactgttgctccagttcaacgtcattctgttcgtctacagtttccgtcttcacgctgaccttctcttcccatttccgcttggcattttcttccggctcattctgcttcggttcgtctacagtttccgtcttcacgctgaccttctcttcccatttccgcttggcattttcttccggctcattctgcttcggttcgtctacagtttccgtcttcactttgaccgtctcttcccgtttccgcttggcattttcttccggctcattctgcttcggttcgtctacagtttccgtcttcactctgaccgtctcttcccgtttccgcttggcattttcttccggctcattctgcttcggttcgtctacagtttccgtcttcactctgaccgtctcttccgtttccgcttggcattcttcttccgttcttctgccgtggctgcagccagagggagatgggcatcggcgtggttgacgggcagttcacaagacatgattttattatttatgcgatgcgatgggaagtcgcaatttatacgcgaattttaggagttttttttgatcgcaattactctcacccccgggggctcttcgctcattttttcatgcgctaaaagaccagttgcttttgcacacagaccgaggttttttgtcagaaaaagccccggccgtcgtccatccatctcgttttatgaacacataagtttttctccataataagctgaaccagtcacactttactttttgctaaaaataaattcgaggaaattaaaacatctaaattaaaacatcttcaaacacatttgccacccgacagatgtcattgcaatgttaatatacgcgcctatttagtcatgcgaagtcgaattttcgttttcggcattcaaaaactttttggcatattcgagtgtgtgattttcaactgactgattggttgatttgcataattttattcaaagcttaatgcaaaattttaatggcatgccaaaggttcaatttgtcatggattccgattttagtctttttgatcgagtaaaaaagtaatttaatcataattggtaaagaattgttttttgtatgcaatttggaagaataaaaattgctttatcataattcttaatggacttttagttttatttcgattagacaaataaataaaatgacacttaaattgttgtcatgaacatttcttgtttcccgcttttatattacataattttgatcaatgctaatga

SEQ ID NO: 2613 - DNA, 5771 bp, Heterodera glycines
gatcagttcgactctttcaagctctgcccgaatgtcggaaagctattcaaaaataaatgaaaaaaaataattattattttatatgaggggcgacgccatgactttttggaggataattaattggttgtttggatttgtttgaaaagatttaaattatcataaaatgagagaatcgatctttaaaaaaatgaaaaaggctcaaaaaagttttttaacgaaaaatatttattttcaattttttatatctaatcaaattaattaactaattaatctattatttattaattaccatcttttgccactcattttgttgttgttgttgttgttgttgttgttgttgttgttgttgttgttgttgttgttgttgctgttcttcaattatttgtgttttcgcaatatttatccaaaacaaaagcgtttctctgtccgttctctgcgcattgttttcctttgaaataaaaataaatttaaatttaactaattatataaatgcttaaaaaatttttgttatttgcagagaccggatttatatatttttattttattttttctatagcatttctagcaaataaaaaaagattttggacttttggctgataaatattttggtgtttttggagtttttagcaaatattttgggggattttttttacaaaaatagctttctggcatctaaatttttggcaaaaagtccaagaatgttcgaaattttttttttttgcttttttaaggcaaagtttggattttatcgaagaaaatttcgaaaaataaatcaatcttagagaattaaaaaaagaatgacgctaaaaagcattgaaatgattttgattagcattgtactaatgcaatggataaaaaataccactttctgatcaaattggtcgtggaaaggcgcctccaaagcactgatcagtttcccggacaaacgcaaatagaaaaactgcaaaatcccgacacgcttttctaattttgtaagagtttcaaatgcagaaattcgttgtccaaatgtatgcttcatcaaatccaaataaaccttgaaatgagtcgcggtggaagcatttttattgtcacttcaaaaaaaagaattatgaatatacggcattattgtgtgccatttatagtgtgagtttttaagaatttctaaacactttaatctattaaatttagaaagaaaaaaaattgacgcttaatttaaccaaaatttcagaaaaaaacgcaatgttttagcaatttttggctaatttctgctaattttttcgtatattttggccattgtttcgagcttttagtacccattttacaattgaaaaataattgtgaaaatacagccttattgtgtgccattttagtgggttttaagaatttctaaacattttaatttataaaatttcaaaaccagaaaatttgacgcttaatttaactaatttaagaagaaaaaaaactcaatgttttagcaattttaggtaatttatgcttatttgggcattgctttagcgcccattttgaaaaatgaatgtaattaatttaattaattagcgtttttaattctcgctaattgcctgctgaagattgttttgccaaacaaaaactcggtctgcgcctgaatttcactgatttttgtggcaaaattttcattttgttttgcttttgccaacagcaattgcaaacgttcaaatgccgtttccgcgtccgttacgttcaaacttttccatagctttttaaaatgtttttttgctatttgatcgctcattttggcaccctttttgatctgagccattggtttattgaaagcttgtggcgataagcacaatgcaaataaactctgatcaaaaacatagcgcacaaaatcgactaaaaattcaaattcgaaaagaaaagggtaaagtaagcctgatccccccattttccgaaaaattttttttaattttcaaaagccatgaaaaatagagcaggacaaaacgtcgccggccgaaacgtcgccgggacataatcgccgctaaaaaaattttaattttaggaatgaaagatcaaaaattttagttacgtagctgaatttgtgaaaaaaaattctagaaaatttcaaaaaaaaaatttattaacaaaattctaggaaaattttttttacaagtttcttttttcggaaattcagcaaatttagtttttataaatgtaggctttcaaaaaagctaaaataattttaaattttcttgaaattttgaaaaattttaatattttttttgcggcgatgttatgttcggcgacgttttgtccagcgatgtttctgcggcaaggatacggtaacgtttttgggtgtagcccatgaaaacatatccctgggcttttcgggatcgctgattatgtacccagcatccatttcgaccaattcggaaccccagacccaaactcgaacaaatggtcgaaaattcaaatttttaaattactaatttttggttcaaacaatggggggggggcagccttaccataaccgaaaaagtcacaaaaagtgcactttgtctttgctcctccgtcccaattgtgcctttctccgctgctttttctgctgtcgatgcttttccgatcggctcaatgcggtaccgctcccgttgattagttgtattgaattgtttctctgttggcgccgccaaaaatgaatgcacaacggcattggctggccgaattccaatggcattgccaatgggtggcacattctgcgaaacaatgacactttgaagcgaaattccaatggcattgccaatgggtggcatattctgcggaacaattgcactttgaatggcattttgctggccaactgctggcatgtttcgcttgccattttccaatgcgttccgcttgttttggtcctctttggacgatttttgccgttttaatggcttaagtttttgtgcctttatttgctttgtttgtttttgccttttcttatatttcggcggttcagtcgcttcaattaccgtaacttcttccccttccgccgttactgtatgatcatttttcacattcatttgttcaccgcttgcgctgggctgattaaagaatgtcggcaccaaagtcaggtcgtccattattgtggtcagtgatgacgacttcggctccgtgttgtcgtcattttcatcatttttccaatcgctcactgacaaattggcatatattgtttagctgctaatgttatgctcgacgattgggctctattgcagttcacacgaccatgaaaaaagacacgaccataaaataatttggcaaatttaatggaataactattcgatagctctaagagtcctctattagtgtacaaaatttaaaaaatttctgtgttgtttcaaaaaaattatgcctgtaaacttcaaaaacgggtttgaaacttttttgaccataacttttttgaaacgcaacaaaatttttgaaatttggtagtagtctaatagaggacttttagagctgtcgaatgatttaccaagtattttaattatgacacttctagaaaaagttaaggtcaattaaaattaccaaatcattttatggtcgtggtgaactgcaatagagtctgacaagtgaccctcaccgatgggtgggttttgcggcagtggtggcacattttcgggcattggtaaagttgggtttggtaccatcacaaattgttgctgcaaaccgttgaacattaaattatagtcaatttggcctctgttcgctctcatggcattcatttggtcaaaattggcccgattttctcttccatttccctccgtcgacatttcatctacacatttctcgccgccgaccattgaggccaccattctatcgatggaaaactgatcattttcctctgatcgactgaatagtaggctttcatccaatatccaaatgtcatcccaaactgcttcttcccctgtttggaagttaaacggactgtcgctcataattggcattgcttcacaatttgtcggcattttgtctgtttcttcaagagacattttgtcattgcgcttcattccaaatgccattataagaaatggaaacaaaaagaaaaccactgacattgccaatcagtaataaataattcaaaaaaataatttaattgaatattacaaaaaataatatatattattttattaaaaacgtcgtaaaaaaattattgttagcactgacaaaatcattttagctttgtgcaatataaattagttacatacgtcaaatgctcatcacatacataaattgattttattccaaattatccgaaaattattaataaattaaaaaaaaaagatcaacccctccgactcgtccttctgcagctgatgcttccgaaatttttaattagcataaaaggcaaaaataaaaaaaggaaaataaatttacataagaggggacacgaacttgtgaaagcaaaaatgaacatcgagaacacaagctccgcgccgcctaagcacaaagcaatgcaaatgattatttaattattgggataaaaaaagtttgatacgtcataactcggcactcacgttcatttggcaagaaaataaaaatcatttttcttatgaacccatggctgttctcttgccacccaccaagtttaattcggaaaccagcacggacttcatcattattattttcttaatactagggttcgagccccgtccccggtgatgggacagttttagccgaggaaatttgtttgaaattttcaagaaattctgtctaaaaataacgaattattagattggataaaaaaacccaaatgaatggataaatttttcatagtttgttcccccattgtttttgtcgattttttaataaagaaaaatttaaacaaaaaaggataaaaaattgtaaataaagcagtgtgcggatctgtccttcagaaatagaagggtccaaatctgataaaatgaaaatttcctgatttgtcagatttgccttgatttggagatatcgagcaaaatttgttctgatttcttaaataaatttataattttttaaactttattgcagaatgtcactacatattttatcaagaaaatataaggtttgcgcaaaagttggtcatttgttgacaaaaaaactgttaacaaatcgcgataaatgtcgaaattctgatttagaaaaattttcgatccgcaccctggaataaaataaagtaaaacggttaataaaaaataattattaaaatagaaatttgttaataaaaaatttttacagtcgatagcaatctcatagattttttttagttctctactcgcgaagaatataaatcataaaaaatttaaagaataataaattgtcattcaaatatttattaaacagccaatttcataatttgttaaataatcgagcacaaagaaatttaatcatcttcaaaattgggaaaatgttgtttctcatctcgttctcatcaattcggcttttgcgactttggtggaggctaatacgctggttggagtggcggttgggcgccatagcttggcggctctggtggctcgtacgctggcggcggtggagggggaggcggcggtggtggcggcggcggggctccgtagcttggtggctctggtggctcatacgctggaggcggtggtggaggcgggggcggagggggaggcggcggtggtggcggcggtggggctccgtagcttggtggctctggtggctcatacgctggaggcggtggtggaggcggtggtggaggcgggggcggagggggaggcggcggtggtggcggcgatgaggctccgtagcttggtggttctggtggctcatacgct

SEQ ID NO: 2614 - DNA, 2114 bp, Heterodera glycines
aggtggacggaggcggtggcggaggcggtggcggtggcggaggcggtggcggaggcggtggtggcggaggcggcggcgcaacttttccggcactttgcacaacaggtgccccaacaaaaagtagggaacagaggaccaatggagtcaatgaaaacaaattcattttgactaaaaccaggaaaaaatttttaaattcaattaaaataaaatgtaatttaattatttttatggaattcatattttattgaattgataaaaaattttttatttaattgactaattaaattaaataaattaattgaattaatattttaaagaatgaattatttgaattgatgcctttcttcgttgttaatccgccttaaatagtcgtttcattaagccaatctttgacacattatacaaaattaaaagtcataaagctgtagaccgtcggtttgtccccgcaaatgcgatgattaagccattttttaagcaatcaaattacaaattgctgctgacatgagagcataaaaactccattttaattagtcattttttatttcattaaattgtcatttccttcattttaaataaaaaggttaaatttaaaatgttagcaataaatgactaatctctgactccgaacagttaattgaatcagcaggtgggtgtgtgaatgaatgcaaaatgttacaccattaatattatgaacatttacaaaatgtataatttattttatcattttattaaaaaaggattagtattatgaataaatttttcaaaaaaaaaaattatttcttttatcttttattcccacgaaatgtgccaattttggattaattttcaaagaatttgagtgttttcaggtttgacaattttaaaattttgaaagaaattttaaaaaagaataagccaatttacagaaatctccctttcgcctgagtgtttttttaattggaataatttgtttttttacccaattaatttttcactttaaaaatttttacattcgacaattttgagcaaattagacttgtcgccatttcccatcacaattattttatttccctaattaaaaaaataagccaaaaaacaattaaaactaatgcgaattatcaatggattaataagtataataaaaagagagaattattgtagcgtacggtaatgaaataatcaatccaagatgctgctgctgaaattattttgattgtccattcataatcattgccccgctggcggcacgcatcagcgcggatgacgaagcggcacgcattgtgccgaacgcgttcggtgccgcgttgacacggattttggagcggacacgcatcagggagttttccggctcgtccgcgcgctcctccgactcgcccagatgggattggatttggcgaaacttttgtgtgttcatcgccgacacttcctcctgcaaatgaagggggtaattaaatttaaaaaaaaatgccaaattattagcagaaattcaatggttcatttgtgcaaaaggctataaccctctaatacatgtgaaaatgtaaattttcttgttgacaaattcttgaaaaatatggttaattagggttgtggtaggtttttcttaaaaattcacacaaaaaaaatttaacaaaattttgtgtacgtatatcaaaaatcccaccgctaccgtgctctaaaaattcggatgatgccatttcccatccgtcgtgccttccccccgaaaattacaaattaagaaattttaaaaaaaaagtcttagggaattttgccaaagaaaatttcaaaaaaaaaaatgaaaaatttttcagccatttttcaaaattatgatgaattattaagtattttttaataaatttccaaaaaatagttgaaaatttgtcaattttttacttgatgctttcttaaaaaaactttctaagatttaaaaaaaactcaaggggcggctgacagggtggatgcacttaattagcatatttcaatttaaaacaattacaattttgtaaaaatcgaattaaatttaaataaattttaattttatttcagctttaccgcctcctcaatttgcttcttgtgcactttgatctttgactgcaatttttcgatcaacgattgtattttggccgtgccctttttct

SEQ ID NO: 2615 - DNA, 2839 bp, Heterodera glycines
  unsure (1)..(2839): unsure at all n locations
cctcttcccccctttttggccaaatcctctccctcttccctctaaggttggccaagttctctttccccccccctttttgccctaatccctcctccttttttggccaaatcctctccctcttcccccctttttggccaagttctctttctctcccctccctttttggccaaatccctcccccttttttggccaaatccctcccccttttttggccaaatcctctccctcttcccccctttttggccaagttctctttccccacaggcgaaaacaaaaaatgtttaaaattatttaattttttgcaatttcagagtttttgtggcgaaatccccgcgggggagggcatggagtacaagcaggatgagaagatggcgccacaggtgtgccaattgaaaaaagaaattattaattttataaatatttatttttaagtgcttgcaaatgttgtcggaacaagccggactaatgggtactgtaacacagtttaacagaaaatcttttttgttacggtagcaagttactaatttctttcctttctttacaggacgtgactacaaagatcacagatgtcagcatgagatgatgacacatcgtcaaatgatggtccaagaattcctcatgtcgccagaaattgtgatgggctgtgcccaacaaattgacaagtactgctcgccacagggcgacatcgaatcgaacggcaaatcggcgcattgtttgatggcacattcgcaggagaaggacgaagaaaaggtggggaccatttatccgatcagatcagcattgattcagattcaattaagaatattgtacattttttcaaaaatgtttttaaattttgctatcactgatttaggatttccattgtttttggtacatctcacaataataattaaactttaacacgaacggtcatgggaagtgttgaattcttaggcacatgatttacaaaataaaaaactacattttggcaaaaatatattactattttaatatgcgcagttgaaattcttcactgcctttgtggaccagcagctgaatgacgcgtgcggccaagaagtagtgaccgtcgacaattggcacaaaagtgccaacaaattgcggggacaggacgacaaagtggcggccgacccaggaccacaggtaaagccgtccatacggcctcaaagctctgactttgccattaaatttacaaattttatagggcgacattgagccggagggcaaaacggtgcacagtttgatggctcatgaacaggaggaggacgtgaaaaaggtggggccgattggctgatcaggacagatttatccataagtctgagcattgttttgacattttgtcggctttcaacttttttgttatcattaccggagtttaacaccccataattttggccaaccatatgaattctgattataaataatataaaattaattatttttgaaaaacctggaatagaagcatgctttcaactggattaaggacaaccttataaatggaaactttttttttggataaatggttaaatttcactaaaaatcctcaaaaaatgtgatataaacgtatttctaaaaaagaattaattcatacctttttataaaattatatcaatagcctgtaaaataaattaggtagaaaaatattgaaattaaaagaaaaaaacgtaaaaataatcggtggaaagtgggttgacaaattatggcgcgcagggaatcgaacacagaccaaaggctgtgacaaaacaaacaaccaacaaaatgcgccatcccaccgctgcactgatcgtcatagaaataaaagaaaagaaataaatttcctcattgatagccgtgttgggacatttcctaaatccgtcatcataaagaagataaataattatagcctaataattaagttctttgtccatgaaacgaattcttcaaaattaatgccgtaaataactttaaacaaagaataatattaaaataaatgaaaaaaagacaaattttttctgttcatttgtcaaatttagtattgcaaagaagaatttcacagaaattttatttttaattaattactttcagggaataaaaattcaatgattgggattttccaaatatccctgtaaacaattattttcatgaaatgaagaggccatttaaaatttataaaaattctgttatgagccattaaataattttccaaaaaattaactatttttgatttaatgaagatggagagaatttggcactttcaacttttttaaaacaacagtaacattgactaaattatcagatgtatgtttaaattttgcttactattttttgggatgatttaaatactgaattaaataatattcaagcccagtaataaatgtttacagcttccagatttcaaattccttgctatcaccaggaaacggatttatatgtttttgaccttttgtccactacaatacttaatgctacaaaattttaataatttatcaaattgacacatttcccggaagccattattatcattaaaagggctgggattttttacacatattttagattgagcacatattttggcattttttggttcttaaaacctgttttgaaagttttttgcacgattttaaccctaattattaataggggaaaaaatgtttaaatgtgtaattttattatttttattttgttagaaaataataaaaaaatttccattttattttttcagtggtgggacaatgagcagaacaaatatgtgcagccgaacctgaagtaccagccgtttgacttncagtgtctgaatgaatccattggcatgcttatgtaaaaacaatttacttacgaattttcaaaagggcacatttttgga

SEQ ID NO: 2616 - DNA, 2676 bp, Heterodera glycines
  unsure (1)..(2676): unsure at all n locations
aaatgcgtcagtagaaatgcgtcagtgatgtttatgtcataaacaagtccttgcgtttcggggcacagaccatgaatcngtatccattcgcccaaatcagaaccccagacccgaattcgaacaaaacntcgaaagtccaaatttgcgaatttagcatttttggttcaaaacggcatacatgatctattattgaaagactgatggcttttagtttgcttccgtgtatttaaaccaattttgaagaaaaactctaatttcgaaattttgacttttcgattttttgttcgagttcgggtccggcgttcggaatgcagaacgatgttcttatagaagtttatttctatattacaatacaaatgccatacaactttattttaaagtatttttatcactgacgcattttccactgaccgattttccggtcacgctcaaaaatagcatttctacgttaaaattttttgatttggtgaaggtttttagtgcatataaaagcatatttcgggggttttcgagaatgaatgcatatttttccgtttttgctttttaagagcatattcagcattttttggaaattatcgcaagaaaaatacaaaaaaaaagtgaaaacacatcactaaggatcgatttttgggaatttaaaaaacattccttaaaagcaaaaaatcttgagctttttgaaaaacttttggaaatgagttttgtttatataaaaaaatataattttgttttgtcatataacaaaaatttaataaatttcaaattgcatatataaatttagaaaatcaaaattttttcaattatctaaaaacgctacttagccattgttttgatatttttaaagtaaatttttatttttacacaattttggcattttttagggtcagaagccatcttgggtaatttttaaggcatattttagtgcatatttgggcatttttcgggttttagggcatatttgggggattttagtgcattttatgcgcatatttggctttttttagtgcatacaacttataaccctagtcgaaaagtagaattgtggtcataacgaattgcaaaaatatggtttccaaattgagggtataatttcttaaaatttcataaaattcgctaaatgtaaaataacaatttcaaaaatggtgaaatgtggtattaaatagagaccggaaatttcaaatttgcggatcccgctgcgggactggaactcaaaattttttgcgggacgggatcccgcgggattaatcccgcaaatcttctaatagagatttttggaaaaatgcaaaaatatgtacataatgccaaaacatggacataaatcacgaattatagaaaacctggaaaatatacactttgccctatgaggcttgatcgcctccaaaagtgatcgatgggtaattagcgatttatcgtaaaaataaaatttagaaatgctcatttaagccagaaaattcgaatttaaatttgtttattttattatttttttaataatcgctttccctccgtctcccaatttctcggatcttccaagaagcacttcagaatccgtcgtcctccgtctccaccatgttaaaccattgaatgccctccaaattctcggccaaatcgatgtatttgaactccacgtagctgtactgtctggtgtccatcgggttcatcaggttgatgtacaggccacgcagttccgcccaattatcctttaatgatgctatgattattgccaaattggcacttcttcgtcatgtctctggctcatattttttcggcattaaaaactgccaatggttgtggccttactccccaaaataggcagtaaaattagaaaataggctaaaaagttttaagtttttattgcgcatttaaggaattttatgcaaaaggtcaaaatcttaaagtttttaggctcgaaaaacctggaaaacactaaaaactcggaaagtagcttaacaacagcgtacaaaaaatattttttcatacattcagaccaaagagtattctaaaaaaatgaaaaatttttaatgatatgaggagccctttatggcattttgcaaattggcattttgtttggtgcccagaaaacgcactttgaattgcttgtggctaaggtcgcgcaattggatctgaatttccttggtagctttggcgcctttgcaactgaaaaatgaaaaaattaaaaagttacccaatttcttttgaaaacatatgattacagtagactaaacaattactgtaaaactgcgctaccatacacaaactcttaactcccccccccctccctccctctccggtgtcatgacaactcgtacaaaaggcaactcatacaatgttgtacaaaggcaattcgtacaatggcatagacgcttgcttgggcctatgcttattgttagctttattttgtaaaaaatttttattgtacgaattgcgtttgtacgaattcccaagtgaccccctttccacgtatggttctcatttacagcagcaacatgtgacaccaccaacttgtgctccacgatcagggtcaagttctggtacatttcgggcaccgggtcgtggctgaacagtccgctgcactggcgctggaacagcacggcggccaacgagaacgaggcgtagtggtaccggcccgactccatcagtgacggacgccctcctcgctggtggacgagtcgatgttcatct

SEQ ID NO: 2617 - DNA, 4371 bp, Heterodera glycines
  unsure (1)..(4371): unsure at all n locations
aaatgcaaatatttaataatgtgaaattaattaaattaaaatttttgaaaaattcaaaatcgaacccncgccgttgtgattgcctcattgcacgaagtgaagaatgaaccggctggccatatgtgctgcagtcttatagtggcctatagagtttaaattaattattaccgttaatttttgtattatttcaaaaaagtgtccatattttccataagattttggtccttaaatatattttatccaattaattttatatgacttttaaataaaatatttatttattttaacactattaattagtttttaaaattcgaaggggctgaaaaagaagaaaatatgtcatcaaatggaaacccccaagaccgtaaaaaaataaacataaaataaatcaaatttacaaataaaaattctttttgtttataaattttaaattaaaaaaacaaaaagacttttttgaagccaaataaatgattgaaaaattttgacttgttaaaatattgttatgaatactataccctgggaatttcatttaaatcggaaagcgaattcagaggcctaaagaagttggaaatagaattaaacaaaaaggtaaaaaacggaattccgaggccaaaaaattcaaaaagtcacaaatccgcggcgtaaaaaattccggaagtccaattttaagccccaaaaaatttcgggaaatcgaattctttcagaaactctaatttgagacaaagaaaaattcagaaatcttccccatcccgaagccccgatattatcatttttgcaatccctcgcccccctcccccccccccgtttttatgcctcaatttgctgatccttcggatttgctagcgttccactcgacccttcctcatcacacaccacgcagccgtcgatcagcaccagcaatgagtctttaaacaggttggtgaagaattttgaaatttttttttttacccggattattctcagcgatccatttcttcgggctcttattttcataaaatttgaccatggcacagtgtttcgcgaattcgtaaaacgggtcaccgcaagcggggccctaaaatttacaaaaatatatttttaaacgatttttatctttattgtttaaataataattattattttaaacattcttaatgggaccgagaatctgaaggaaaacgcgggaccgagaaaaagtgaatgaaaatttcttttattgtttttgcaatgtggaaagtttgtggtatttggtatcagattttggcaattttatcaaaaacaatttataagaatacccaaatacttatttaaaaaatggatttgcattccaaaaatgtgccctttttgaaaaattcgtaagtaaattactatatacgttatattgacaaggagtttcgtttcaaaaactaatttgagcttaacggctaatgggacgggtctgaaagtagtggaagggtcttacaactttttgaggagaatccgggaaaactatagaaaaaaattctcgacgcccaactgagtcccggggaccgatttctcactttttcttgcagtttagggcccgtaactttttttctaaaactcggatcaaaaaattcccgctgtgagggccctaagttgaaatgttggctaaaaattaaaaaaaattccaggcctctatctctaaccccctgggctgggtgcttctagaacttttcagtaccaaatttgtccagttcagtccccgttgaataactcattaggctttgacctgagcgcaggggtgccagcggcactattgtagagcttcgaaagctcgatttttccaaattttaaaatttcgaaaattttcaaaatttttcgagctaggcctaaaaaacggttttcgggtttttgaattttaggattttttaacgaattttcccagaaaaacgaagaccacttccaaaacatagtttttcgagctctatcgactggtatttttttcggaaaaatttcgattttttcccggaaatagaaaaaatttttggcctcagcgggacatttgagtcccgggcccataactcgtcaggggttggttttatcgaaaaaactccttagggcaaaattgtagagctttttaaatgctatcgaatggtgtactacatgttcgaaaattttcaaaatttttcgagctaggccccctagaaattttcaaaaattttttttgggttgaaaaaggggctcaaaaatatttttctgggctattttgaggtgctgagcacgaatatgatgtttgttttacgtttcagaatttttggaattttttaaaaattctttattttttggcaattttttggcccttgggattttgggctaattttggaaaactcataactaacctcaggtttggtatgtttaagtgagtttaagctctaaaaatagagaaaaataaggagaattttatgtgatttatttgggatttctatcttcaaaagaaaaaaagttattccagaatttctggaaattttcgaattttcagaaaaaatttcataactcggttctgaaaagtcattttggaaaaataaaatattccaaaaatccgcattttttttctctattttataaattttatttcacatttttatcgcatttttaaaaaaagatacaaaaataaaagtgatttttggattcgggaccaaaggggggtgaccaggatttttgagtggaaaaatttttccatcaaaaaccatccaaaaacatgtctttaggggttatttgggccgctgatcacgaatacgtgatcagattttagtttggacatcgttaagacctcagaatccctgtgtgattggggattctgagtcatcttctggggggggggagttcggatccggtcggtgtacattatttttctgttcattttttgggtatttaatattgttttattaatgattttaattaatttaaaatattttgttaagttaataaataaaaaattaaatttaaattaatttttttttgatgaataaattttataagtttaaattaatttttttttaaattaaatttgttaaaaaatttttcatttttatttaatgaatttactaatcactgttgtacctcttctaataagtcaaaaagattggggattctgaggggtggggcggcaggttcggatccgggccgtgtttattattttttgatttattttttagttttttcgatgttattaattaatttaattttatttttgttttttaattaatttaaaatattttgttgagttaataaataaaaaattatatttaaattattttttttttgatgaggttcggacccggacggtgtacattatttttctatgcatttttgggttattttcactgtttttaattaatttgaagattcgttttaatttatttaaatttatttttttttaaattaaaaaaattattttttgtttttattaataacaaaataattttaattaaatttaatttttcttttgatgaatagatttatttttaagcaaaattagatttaaaaatttggatgcataataattcctttcaaaataaagtaaaataaattattccgtttattaattaaaaaataaacttttacattttttattatttagttttttttaaatttttaaataaacctaattctataaaattatatttaaaattttgaaattatttttgtacatctcataaaaagttagacttttgtacctcttttaatcactgttgtacctcttttaatcaccgttgtaccttttttaatcacttttgtacctcttcatcaaatttgtacctcttttaatcaccgttgtagctttttaatcacttttgtacctcttcatcaaatttgtacctcttttaatcacagttgtacctcttctgatcactgttgtacctcttttaatcacttttgtacctctcttaatcacttttgtacctcttttagtcacttttgtacctcttttaagcacttttttacctcttcatcaaatttgtacctcttttaatcaccgttgtacctattctgatcactgttgtacctcttttaatcaccgttgtaccttttttaatcacttttgtacctcttcatcaaatttgtacctcttttaatcacagttgtacctcttctgatcactgttgtacctcttctaatcacttttctatcactttttcactgtcgtacctcttctaatcactgttgtacctcttttaatcaccgttgtaccttttttaatcacttttgtacctcttcatcaaatttgtacctcttttaatcaccgttgtagcttttttaatcacttttgtacctcttttaatcacagttgtacctcttctgatcactgttgtacctcttttaatcaccgttgtacctcttctaatcacttttgtacctcttttaatcact

SEQ ID NO: 2618 - DNA, 2695 bp, Heterodera glycines
ctcttctaatcactgttgcacctcttctaatcattgttgtacctctgctaatcactgttgcacctcttaaatcactgttgcacctcttctaatcgctgttgtacctcttctatttactgttgtacctcttttgatcactgttgtacctctcctaatcacagttgtacctctgctaatcactgttgcacctcttaaatcactgttttacctcttaaatcactgttttacctcttctaatcactgttgcacctcttctaatcactgttgtacctctgctaatcactgttgcacctcttaaatcactgttttacctcttctaatcactgttgcacctcttctaatcactgttgcacctcttctaatcgctgttgtacctcttctatttactgttgtacctcttttgatcactgttgtacctctcctaatcacagttgtacctctgctaatcactgttgcacctcttaaatcactgttttacctcttctaatcactgttgcacctcttctaatcactgttgtacctcttctgatcactgttgtacctctcctaatcacagttgtacctctgctaatcactgttgcacctcttaaatcactgttttacctcttctaatcactgttgcacctcttctaatcactgttgtacctcttctaatcactgttgtacctcttctaatcactgttgtacctcttctaatcactgttgcacctcttctaatcactgttgtacctattctaatctctgtaaggccaacaaaatttgaaaaacgggcgcgaagcgccgactgaggccgcgagcggcttaacaagctaaaaacgggcgcgaagcgcccgtttgagttcaatggatttaaaaaacgggcgcgatgcgcccgtctgaaccaacaaaatttaaataacgggcgcgaagcgcccgtatgagttcaacaaatttaaaaaacgggcgcgaagcgcccgtcttgagccaagatgtggactaaaaacccctaataattttttaaaaattcaaaaaaatctctccaaccaattcgatcaatttgaatcgcttcacagcctaggtagcgaagctcaagaagcgcgaagcgctttcccaagcgccaccctcgcatgcacgcacccgctagttactatatatgttatattgacaaggagtttcgttgctaaaaccattttctcccggccgaaggccgggagcgccctgaaagtggtggaagggtcttacaactttttgaggagcatccgggaaaaatataggttttccggtccaagggccaactgagtaccagggactgatttctcattttttcgtgcgtttgacggcccctaactttttctgtaaaactcgaatcaaaaactttccgctggtaggaacctaagttgaagtgttgtctaaaagtcaaaaaaaattccaggcctctacctatagtaggaagggctgcagaaaataggagaaattcagtatcaactttgtccacttcagtcccaggtgaataccgcgtcagcgtttgatctgagcgagggggctccagcggacttattgtagagctttgaaagctcgattttttaaattttaaaatttcgaaaattttcaaaatttttcgagttaggcctaaaaaacggttttcgggtttttgaattttaggattttttaacgatttttcccagagaaacggagaccacttccaaaacatagtttttcgagctctatcgactggtatttttttcggaaaaattttgattttttcctggaaatagaaaaaaattttggcctgagcgggacatttgagtcctgggcccataactcgtcaggagttgatcttatccaaaaattgccttagagcaaaattgtagagctttttaagctctatcgaacggtgtactacatgatgtaaaattttcaaaaattttcgagctaggcccccttgaaattttcggaaatgttttttcggacgaaaatgggggtgaaaaatatttttctggggtaaaataaggtgctgagtacgaatataatgtctattttaagtttcagaatttttggaattttttaaaaattttttattttttggcaattttttggcccttgggattttgggttaaattttgaaaattcattgctcagtgaaggtttggtcaatttaagggaattaaagctctaaaaatagagaaaaatcaggagaattttatgggatttaattgaaatttatatcttcaaatgaaaaaaagttattcaagaatttctggaaaaatccgaattttcagaaaaaaattcctaactaccttctgaaaagtcattttgtaaaaataatatacaacaaaaatccgcaatttatcaatattacacataaatattattttatctttttaacgctatattgaaaaaagttatagaaataaaattgatttagggaatcgaggacaaaggggtgagtataggaattgtgagagaacaattttattaatcaataataatacaataacaattatttagggatcattcggaccagagatctagtatgagagatcacatttttaaggtgtcaaaattagatcgtcaagaaaagaagcgtgattgtagtttttgagacatattatcggggggggggtcgacaggttagattctcgcacaggaataaaagatcatatgatacaattatatgactataaagatcaacacgattataaagaaaatatgacat

SEQ ID NO: 2619 - DNA, 2614 bp, Heterodera glycines
  unsure (1)..(2614): unsure at all n locations
atacgaaaaaaattctagaaaaattcaaaaaaaaatttctatcaaggaaattttaaaaaattttcaagttttttgggttttttccggaaattcagcaaatttagtttttattaacacttagattttccaaaagctaaaatacttttgttttcttgaaatttaaaaaaatttttaattttttttttgcggcgacgttttggggtgtacccggaagcaggtccataactaatcgtaagactatattttagataagaatttggtctcgctaagaattgacttaaaatttttcaaaaatataccctaaacttgactttttcaataatttgtcaaaaattattgttttacataattttttaaggcctaaaccacctatttttttgcagtttttagtcctaaagagagcgctacccaaagctaatttgtaagtagcaattgaaagaaaaccatttcaacaataatattcccccttttttacaatttcaacaaaagacaatcttttattacaagtaacacattttattttcaaaaagttgaatttcaaaaatatttaagaaattaggaaacttttcgagaaatggtttttgtatttgcgtcccctttttaggagcttttatgtgcagaaaatttggacgaacttttgagcagtgagaagcaaaagccgaccaacgaggacgacgacgagtcggccccgccgtggcgcttcgggccggcccaaatgtggtacgaccgttttggggtgccggcgaacccgtcgaatttcgactacggactgaagaggcggggcacggtttgccccccccacgccccattcattggtttgccgttttcattgttaaggcgctgtcgaaacgttcaacggacgacggcactatgccattgccaagcgaaggtaaccgaaccattgccagctcgctgctcaaattccatggcctttttcagatgaccgcaactttttgccagtgcatttcttacattgggaggacgacataatcattgaccctgaacaggcgcgggaaaaggtacagaaaatggggggggggaaggaaatcccacgaacatccgctcaatttgttcagctggtgaaggaactctcttcggttaaactgccgcgttgcggatggattccgacgccgtacacgcgcagttacaaagcatttatcgcggcatgtacgatttgacacagaaattcactggcaactaatagtcatataagaaaaataataattactaggtcgttgcataaaaaagggcgctttttcaaaatgactttttttaagacttgattaacgtttgttatgtcttttttgtgtgtaattcttttatctgaatgttctcgtcatgtttttgccaaaaattttgattttgtccttttatatctaaagttacagtccaaaaaattgggtaaggtcaacaaaatttggctaccattttacaccaacgtccataacttgagttaaaattgtcaaaacgacttaaaacttggtcagattatgaaatttgatgagcttaacaagaaaaagcctgaaagaaatttttctgaaaaagaaaaaacaaaattttttggccatgtttattttggccaagtttccaaatctattggccaaaccgaaagtcaaaaacaaaatccaaaataattccatcggggttttgaggctttttatgcccttaaataatataaaaaattacagaatcgcacaagtttccaaaattgtgttatgggcgattattcgaatttctgaaaacgaaggccaaggagaaaacacttgtctttggacaaaggatttttcttatattttttgaacacatgcaaaattattccagcatagtttatccgtaggaaatccttgttttaaatccttttttaaaattttaaacaacttccctaaagccttttttggccatttttcaaaaagtgggaaaatttgggattttttggccataacttttttaaaaattgtttgagtgcattaaaattgacgccattcaattcatctcgttattctgcatcagatgatattaaatttattagaatttgttacacttttaataaagttacactcaattttctggttatggccaagtccctaattttggcaccaaatttcattggcccatggctgacaggagaacaacttataggacatgctacgtcacccgtcttattccctggaccctatagacttaatttatggctaaattatttctctcaaaaattccttatagggtaggctctttaaagaatatggcaaggtcgtggatccagtgaaaattacctaggttcaaagaatggcacagaattttacaaaaagggcattgttaaactcccatctcggcggcaaaaggttgtagacagtcagggcaattactttgttaagtagctttttgatcggctttgttatgattgttatttttcattttttgttcataaatttttttccttcaaaaagcgcccttttttatgcaacgacctagtaattagacataaatgttttaaaaataccggaaaatgtcagacaattgcacccaatgggcaccgaccatttggacggccaagaagacgatgcacaacagcaaatcgatgcctaggtaaagcatggcggnctggaaaatgaaa

SEQ ID NO: 2620 - DNA, 1685 bp, Heterodera glycines
aaaagcgcccttttttatgcaacgacctagtaatttaggtttaactaaaaacggaaaagtccaatttgactttctattttttagatttgacttgtaacgaaacaatgccccctttggacgacggggacaccaaaacggtacgacccaaacattaaaatatttccgcttttacagaatgcattttttcttaacgaaaactcaaaattattgtcctgtgtcgagactatttgaatacgattaaacttaaaattagcaggacagtgttatgcaaatatttaaaacgcaaaagtgctatataaaagtggtcgcttttcaaaatcttccgagccccaacccgaattcgaaccaaatttatagaatgtttttattctcatttgaatggacgacgtccaactcctttttggtccttcgttttttgtctttaaatttatgtaggaatgcagacagtgagaagtcaaacagttcctatacttaacacaaaaaaacgaatcggggtaaaaacgaattggccaaaaaaaaataaaatcatttttaccctttatattatccctttttttattcaggatttgaataggacgcgtaatggcaaagcaatgaccggcaggtcatcttcggggactattgtgccaaagccttcgcctgaatttggtacgaccggctcattaaatcacatgacgaccgtccgcgacgtggtcacccgacattttaggaacagcaaagtttgcccattttccatttttaaattggttttggcttgtttttagctgaatgcttcggccgatttatctttcgtggactgttcgaaattgggcggaattttgtcttcaattggtggccgtttcgatgtcatttcgcacggcttacaaaaccaacagcagcgccacgtactgatcaccaaccaaggcaatgcattttaaaacacgcactaaaaacatgacgtcattttaaatattgtacttaattttcatgtaataaaaaaccggaatcagatggcaaacattttcagattgtaatggtttagcgcattcttccgccgatttccaccaccgttcaatggcaccgcccgcccattcgtcggctgaggaggcgtggcgtcacccgcacctttcgccctcctcgacgtcgtcgtccacatcgactccaccttcctccaccgcaccttctggcaatttcgtcgtcaccaaacacaaccatttggacatcagcaccaaaagtggccattatcctccctccgcttccaattcactgctgtccaatttaactccgtcctcctcctcttcgtctcttctccactccatcaacaagtcaaacaacaccaccgctaattactttgtgaagaccgtgccgattgacggaggaacaacatctgcggcgttcattccaccgccgctttctaccggcgcaacaattgaacaacaacagcagcagcaaatcgtacaacccgggtcacaaaatgcatttttccaacagcaacagtcacaatgggccatttatccgccagttgaacattccgtccaacaacagcgacaacacttggtaatacttgccaatgccatttggcttcttagttaatattaaacaaaccaatgaaaattatacaattagcacttttattgcttaaatttcagtaactaacaataagagcagacttcgttgtgatttaattttataattaattccgttgt

SEQ ID NO: 2621 - DNA, 1338 bp, Heterodera glycines
aaaagcagcataataatgacgagcacagaatccccgcaccaacaacagttccttcggttgccattgttttgcaacaacaaccgccttcggcaccaatcagcccacaaaagcagcaacaacaacagcacacgagcccaaggccgggaatattgcgtaagtaagacaacgcaatttgtgcaaatgtaatttcaaaaggtggcaatgcgtcggcagtgcgtcgtctcactgtcgatcgcgaccgtcccgcgtcagtttcgggttcgttcataaacaattcggaggaatcccctcggaaacgtcggaagcagcactttgacaacagtcagcttcttggtgacaaagtgacggtaattgcaaattgaaacaatttatggggctcactgaaaatttaatgatttttctaattaaaacatttctcttatgttacattaattgtaagtcgtatataattttaggtcgagatgagacccaatgaccgtcttggacagtcggcttctgctgggcctttgctggcgggctgttggaggaattcgagcagttcagtgacaaccgaaggcggtgttgcaacgcaacagtcagaatatataatttttcaatgcttttccgtgccaactttctgtctttacttaggggaacctttacggccgacccattggcacgtgttggcgcggcaatcagtgggaaaaaagccgtcagcggtgttccaattgagggaaaacagcagccgaagaagcgcggccgaccgaaaacgaattgtcaaacgcaacaattgccgttggtgtcggcaaatgcgacgacaaaaagtgtgcaacagaagcagaaaaacaaccaacgaactgaacaacgagcggtggacatcgccaaaaatcaaccaaaacatcacaaattggcattagggaaccatttgacgttgacaacactcaacgaaagtgcaaaaacgtcaaagtcaaaacagatcatcactgtccaagtcgagcacatcacagaggtatttgaagtgagattggaaaggcacaccaaagcaaaaaaaaaacatttaagacggagcaaaagaagcgcaaataccaaaagaggacaccgaacattgacccattgaccggagcgaggaaagtgcgaaaaaagggcagtggacgaaagtcaaagaaagaattggctgcgaaagcggcaaatggcgggggagtttttggcactgacgggcgatgggtgctgacggaggcacaaccagccaaaagcgatgccaattccatcccaaatcataagatggaggaatttgataacagccatcagccgagccaaaatgaagcacccgaactgatgtctgaaacggctgcggaaagg

SEQ ID NO: 2622 - DNA, 1292 bp, Heterodera glycines
cgttttgcgcccgcttttacggcgttgcgagcgcggactgaatagtacggacaattgccatttgggcgagtcatacgaagaggttttagtgaattggcacttgcgaatgcatttaattttacattctctacttttcagatatgcaattttttgcgctcatccaatcggcaaccagtgatggacagtagtgaaagtgcggttcgtgcacccagaaatcggtcttacaatccgcaacatttgacggtaccgaaacatttggacgaacggtgcgtcgaccgattgagtgccgacattttctgctcgcttttcaacagttacgacgaggtatgctgtcaaaacactattaatgaatttgccatttttccattcgtcgcccattttcagtttaaaaagaccacaaattcgatgcgtttgctgcccgtcgcctgcgcttatttcgacgcctcccaacgccttctctcctctcttcgcacttcacttcgaggcttttcactttatcacgctctgcaaaagtcagatcagccaactatcaaagagaaaaatatggtaaaacacaaacaaatgacaattttatcaaaattatttgcattattatacaatatataattataatatttataaaatcgataaaaatgaccaattacaggatgaaattttggtggaggagagcgaccgttggttctttggagacggtttggtgggcattgaggaggccgaaacggaatgggacgacgacgccgagggcgagagggaagagcggctgagccgtgccttttttgccaaattggacaaagaataccaaaacatcgtcagacgacagtgttgggacgacgatgaacaaaacgaggcgaagggggacaattttcaaccaaaaatggcgcaccaattactcctccaacttgacgttgcccaaacattggatttagtgttgcacaatgttgagaatgacaggtccggctgcagaaacccttaccacgcattggttattctcacattttgtttaagcagtccaatttcgatgcatcgatttcattccgaccattcccagcggagttacgcattgccatccgaaccctctgatacgacggactcattcagaggtcacaacgaaactctatcactcggtgactaccaaattgacaagaggaacttgccagacgatttgagtgaaattttgtggacaaaacggaagattgacagaacattaaacggaggaaaaaaacgaaaaagaagcgagacggaagtggacgaagataagaaagaagaggaagaagaaaaggagcaaaaaaaga

SEQ ID NO: 2623 - DNA, 2878 bp, Heterodera glycines
cgtccgagtatgtgcaatttggtggatacaacatttatcgggggttgccctatcagcgtggagcgggagttggcgcagtgttcagaagtcttatgagatacttgctgccgattggaaagcaaattggctccgcaattggacgtcagggaatggaaagcggaaatcgagtactcaccaatgtgctagagggaaaagacctcaaagagtctctcgttagtgagagtaaggcaggactaaagaatcttctcgaaaaagcagccaacaacataaacactcagaagggtcaaggttttgattttaagcgatacaaaaaagactcggctcccaaaattggaaaaataaggcgaaaaaatataaataaacttcaatcgtcagtcgggccaccaatggttgtaaagaccaaaaataaacgtctgcgtgttgactcactaggaacttactaaaaatgacttgcccacaaaaaatcagcgacagcagtcctctagcaattaacagtggcctaaacattttctcagttccaccgaccaatgtgtccgctgttcgctcattctttcgtcaggtgcttccactcgcaacaataacgcaagaatcgccttatctatttcgtctttacagtgacaatttgtggactgatttgtctcgggtttatctttatctcgaagtgtccattgaaaaaccaggagcaaacgataaatgggttgcgatagaggacggggatactcatgtctctgccattcaagggattggtcaaacatttgtccagcaactaaaagttacggttggcaacacggaagtatacgatagcggaaacctatacccattcaaggcctatatcaccaatgagttaagctttccaataaatgtcaagaaaaattttcttggttcaacagggtattatcacaccgtaaatcaagatgattcatcagacgatgggtataaagagcgttgtaaaatttttaagggtggtaaaaatgcgcaattcctctcccgtctcgactttgatttgggaaaccaagagctttatctcttaaataatttggacttgctcttcacaatttacaaggccaaagatgtctttcttttgcaaacattaaaagcaaatgattccaccaaatatcgtttgacagttcacgatgtcaagatttatgccaaaatggttgaggttcaaccctcactaaacatgagcctttacaaaacccttgaaaaacaacccgccacatacgcagtacgcaagaccgaaatcaagtcgtcattcatcagtgttggtcgatacgaatttgagtacaatgtattcagtgcaaccattcctcgacgtgtgacaatagcgttggttggaaattcagcatttcatggtgactacaaactgagtcccttcatgtttgagccgtttgatttgcgtgagatttcggtacatgctggtggcgtagtttacccagctgttccttataaactaaatttttcaaatgatcactttgtcagcgcctttgttgacatgtatgaggcactcggaatggctaactcggaacgttcatttgacatttcaatgacccagttcaaaaaagggtggaccttttttgtcattccattgacttccacgcttgacgacagctgtggatttgagctgttgagaaacggtacgacaaacgtacgagcaacattcaattcaccaattccgcttggtggtgtagagatgattgtcttgggtgaattcgaccaaatgattatggttgattataaccggcacattgtgaccgactcaaagcttggataaaatataaataaataaaaatattattatgtaatgttaaaatgaataacaccaacacaacaaaacctgacatacaaattttgaattccccagaagagcctaatgaaactcttttgcatgtactgcttttttctcattatcttcttgcatttcctgtgtttttgcttttttggttcgttttaattcggtggcttaaaagtcacggtcacctctcgcccagcgaggccgagacagtaatggaagagatgaaaaatatccctcgacaaccaccaatatttttcgcaacaaaatgatgcaaaattagagaaaactgacaatgaaatctctcttcagtatgacaaaatcgaaaaagactcaagaggatttgctcttgaattggtggcgtgaagacccgacaattgtaagcttgtttttttttcaatttagcattttttaaatttcatcacattttttcagattcgtttctttttggacaccgtcgaatcgaagccgcgcttcttcagcgcgccgaacgcgaggccgaaattttgcgccaatacgcagagaatcagcaatgaaaagggaggaccaatcagttatcattttcgtatgtttttttttcatttatgcaatttaaattatgattaaaaaaaatttaacgtttagcaaagtacagaactgggggggggggggaactcgcatagcccttgtccgattgacttcaaatttcacagtctgtcaatccacccatccctaagctgaacggcgaaagaatttcgcctcaggcaccatttcaagcagtactgtcccgacgccccgccccctcgcgcacaccgagactcgcgcaccaaaactcgctcaccccttgtacgattgacttcaaatttaacaggcaatcattccaccactccttaagccgaacggcggggtgagggggtccgcgccgtcggagagagggggtccgcggctatggtgagagggggaccgcgccgacgaatggtggggaggggtccgcggcagtggagagagggggtccttggaagagagggggtccgcgccgactgacgacggaatggtggggaggggtccgtggcagtagagagaggggtccgcgccgacggacggcggaat

SEQ ID NO: 2624 - DNA, 3831 bp, Heterodera glycines
  unsure (1)..(3831): unsure at all n locations
cctcccgttccttcggtcgccgtctggcttccgcgccttccatccgccttctcgggttccgtcccgcgcgccgncgctcccgcgcctttcncccccncggcccnnnatctcgcgcaacccccttcccacacccccaaatcccgaccccacaccatcccgcgcacctaccaccatcccgaacccacatctcccgacgcatccccccaccccattcccgtcagagacgcagacacaaccacctaataggcacggacccgcccgctcatcctctctgcgctcagcggagaaaatcaatcgataattcaagtggtcttaccatgtagtcccatttcttatagtgattagaagaagaaaacgtcataacaaacttctggctcgggaaaactcgcatgggaggcatttatccttgatcagaaggcaggaaatttattaaaaaacaagtacaaataattaaattaaggcttcagatatgtgactgagaaaaaaagaatcgatggaagttctctaagagggactgtcgtgcacgcgtgattagattacttcgattccttaaactctgattattttccaatataattagctcaaacatttatcagctcgaattgttgaatatttaaaatattagcattaaattcagttgtggaaagtaatgattttttttcgattggcttattattttaattcatctttcatattcaggaaaagaatcccgactactttccatataaaaggcgtaagatgaatgttatcgaaaaacctaaatcccggactattaaaaaaactaccacataggaaaaaatggaattctaattttttgattcctcttttttaatgatcacttcgacggagagaaaccccgattctttaactttatagtgcaaatctctattaatatgaataatggtatattttttaaatgctagcaaaaataattaatttaaaaagtcgctgaatactgtttcatttggatgtttttgtatgacgcctttacccaaagaatcccgacaattttccattataatacatataacagtatatagtgatggaaaaaagaaggctctagtacagtttatgcgtccaatggttttttatgcgtccaataaaactaattgaatttcttgagaattttaaccactaaatttcaccttaactcctaaattgtcagctgacatttttctctccattcgtcggcattgagaggtgttagctgagaaacttgagcaaagcgatagcaaatactcttcccccattgaattatcgcgtttattttgtagatcctcaagaccggcaagtccatacgcaaggcattgaggccacttggggtgctctcaaaacgtctcttcggcatttacgtggctccaatgaggaaatgttgccgacatatttgtttcaatatatgttcagacgatatcatggaaacacaaaaatatttcaaaatattttggaggaaatgagacgcaattatcccgtgtaattcaaaaagaaggatttgacgaaatttgattgtgaaataattcaattagttttattggacgcataaaaaaccattggacgcataaactgtactagagcccaattccgaagccaagttgtgaaggcgcaagtgaatcgaacaccgaaagccaacaatcggcggagatgaagctgaaaaaaagggaaaaaagcattgagtgagtcattggcttagggacagatttaagaattgaacgaaaacattccaacgggggacggattctcttttttgggagtttgaatttggaaaacgaaacagggtgacatgacttaattaatccgtttgacagtgcctcttggcacagtgtgcaatttgggatatatttttattttggcaaatgctgggccgaccggtgacgcctaagagataaattgtaccgtacccgacccgatgatttttcggccgacacgaaatttttttggacccgcggcaaccctgcaatatacctatcggtattcctgaaaaggggtttggtactgagatgggatcttacagtatgtatatgaaggaaaacgtcggcgttcaacggcatcccaaaaacaatccttttattttccaaaaacaaatttgttatgaatttggcattttttaaagctctaaagattaaaaaacaaaaaaaaaagaagttttacgagtccaataaaaaggagcaatttttatgagcacgtcaataattccataattcaaattgatcgatcactttctccacaattcattcattctttcacttcttctgctgatcacttgggccgggagttgtgtcgagaagtctttaaaaaacggactttgtactaaaaatcagacactcaaaaatctttgaaatgtcctcgattttcgcatttcgaaccaaaaaatgaattagggtaacaaaagcgagtttgtccaaaaagagttgggtgttgtcccactttgactacaaaagggatgtgtacagtatgcaaaaaggaaaagcattgagtgagtcattggcttagggacagatttaagaaatgaaggaaaatatttcaacgggaagattctcttttttggggaatttgatttggaaaatgaaacaggatgacgtgacttatttgcttaattcgtttgacacgagatattaaactttttggtaggcaatgttgctatcaaataataccaaaaatctgaatagcgccgaaaaacagcgtaagacaacgtttttcataagtaaaagtgccatttgttgcgaataggaactgtcggaaacactaaattacccttattagggggcttaacaaagattattatgttgatcattccaacaaaaaaaagagaacaatttttatgatcataggtcaaaatagcatcaaaataattcaattagatcaaattgatcaccgcaacaaaaagaacaattttctgactcaaattcattatccaacggcgcaatttcaaattgatcgatcccttctcaacaattcattcattcacttttgctgctgatcacttgggccgggaatttcgtcgagaagcctaaaaatcgaacaaataaatttaatttttgaaaaagcattcgctgaccctttgcagatgtaatcatccttattaatttcaatgtgaaggttacactgattataaattcgcaaatcaatcgcttccttctcccattttgtccatttgctttcgtctcgcacaattggacaacggacgaacagaaaacgatggctattgttaatctttttcagcgtcaattgttctcgagttaattcgttggtcagcacaaatggcacaatagaagcagcaaaagacgaaggaaaccaaacggaaatgatgaaattggcaggagatgaagccgaggcaaaagcctgaaatattgaaaaattgagaaagaaaatgatcaatgaaatattaaatcaattagtaagcaccgctttgaatgcttcaatattcggcgccaaatgccagctaccgaagttcaaccagcatttgaacacctttggcacatcgtcaggacgaggagtgaaaagccatttggccaccgcttgtccttccgatgccgcggcactgtcatcgcatgggaattcggtgaagaactcattagaataggaattgacaacgcgaagcgacggacaatcattgagaattgaggggacgaattgacgcaaacggtggaaaaatctggcggacaatcgcaagccatgaatgttttttccgaacattggccaaatgttgtgaaaaatgaaatccgaaatgcgatcattcgccgttcggatggccaaattaatggggcatttggcgaaaagttggcgaaaacggttgataaaagtgatggcattttggtcgatgaaactgaaaagaaa

SEQ ID NO: 2625 - DNA, 1359 bp, Heterodera glycines
  unsure (1)..(1359): unsure at all n locations
aaagtatanttgtcaaaaaatttaaatcccaaatttatgaaaaaaccacgttnttggcaaaaaaatgtgactctcatttttttagtcctttttatataatcactgaacttagacatctccgttcatttttcaatataattaagccaatgacttatttgctctgatgctaatgaatcccgaaatattttccactataaaagcataagaaataattaggtcgaaaacccaaaattccgactttcttaaaaaatcaacatataagcaaaaaatgggattctcgttttttaaactcctcttttatgattacttcgatttcgtaaactccgattatttaaaaaatattcttacctgaaatattgatcagctcgaattgccgaatatttataaaatgttagtaataaactcaattgacaaaattggtgcttttctttttcaaaacctaagaatgaccctaaataattttaaaaaatatacaatcctaagaaatgaaaaattttctcaaaaagtctacaaaatctagttctttgtttgactggttttaagaatagtagtatatctcaatactactttggctttattttgttacttttttgaatagattttgtcatagtgcctattttccatttcttttcacttatttgttaggctcaccacggacgaaaatggcatatattattatgatttgagcatccgaggatgaaaattcagaattggcatgcaatgcatgataattatagagattcgtcgcaattatgaaaattccgacgaattgcggaggttcgaatccgttgggctacataaatatttttatttattttgtacaaaaattagaaaaagacgtttttgaaaattattttgaaggtttttccaaccaaattagacaaacttggtttcattcgaaagctcttggaatgaagaagctttttctaagcaaatgctaattgtaagcagttcgatgagtttgaaaaaattgtttgaaattttgttttttgtttaatttttcgctaaccactttttttgctcataaaaacccttagattttgttcgtaattttcttcttgaagcggttttacaagcagaaaaaagttaaacaagatgaagtaaattcgtttttctctattagcagagataaagaaatagtaagcccaaatgagagatgtttttttctctgcactctctatttattagtaactcatttttcggacggtgtgtctatctctttcccttttctccatctatgtcattttctttctcttcccccttttctcaatctctttctgtcagtctaattgctaaaaataagaaaagatgaaaaaaagaagatgtctctttctgcaaaatgtgacacttcggtatgct

SEQ ID NO: 2626 - DNA, 5299 bp, Heterodera glycines
  unsure (1)..(5299): unsure at all n locations
tgacataatggaaaaattgcgaaatcgaaggcatttcaaaagattantggaatccatcaaaaatgggtgaagcagcgacctttttgcttttcacaccttttttttttgctgtgcaaaacttctggggaacggaggagtccggtggtgttgaagagttcaccgggaaaatttttgtggaaaatcaaaactataaaaaattatttcgacagaaccacgcaaaaaaaaaaattttttttttatatttttgatgaaaattttatatataagctcatcttttttacttttactggcaaaaagccgacttcaaagggcgcctttgaaaaaaggacccttaaaattttcaaaggaacggaaagcgaaaaaaggacaggacgtgttcagtaaaaaaaataaagttggattgaacccttctgtattaaatgattaattgctcgagaccgagattcaattaaagtctaatggctgtgatatcatatcccttttatagaaacttaataggctcccaaaaaaaagctaaattttttacattaaaatacagcaattgcttgtgcactgcccacactttaatacggtatgtgttactgtcggtgcactggcgcgcttcactgttgaacacaaccatagttgaccgtttggtgtacgttttgaaattatatttgtcattttcatcattcattggccagtttttgtccgaatttgtcggtcctgttttgccatcaaccatctgttggtgttgctgattttcaactgttttttcctcacagtacacttggatactgtaaaagtgctcactgttactgtccatttctggactgatggtcagatagaaatggttcccgaacaaaactcgatgattcaacaggttgttttcaatttcactgttatatgatgttggctgaaaataaaaataatttaagaattcataatttttaaataatattatttctttttcttttgctattattttctatgaaaaatctgttaagaaattgttaaaggaaaattgttttttttttatgaaaaatttcatttccttctaggcacccatttcaaggctttcttcactcaaatttcccaaagattttgttaatttttccgatgagaaaaattgttaaaaagtggtcaaattccatacaaaatttttctgaaaattatagatttttacgggtatctgtaccgtttttccagtacggtcagtatcagtaccggttaaagtgaaagttgccggtaccgctttactctaatatagactatttcaatgttctattttattttgttcattacatttaaaaatataactattaatgctaacccatgaaacccaatgttggtcttctttcagttttaaccaaatgtgaatgttgtacgcaacacattgctgtgtgtcattaaactctaatttggcaacttcatcaaagacatgccgccaattattcttggccgttggaagttgaattccttttgagcaaccattttctgtgtaaattagtccccttttgccagtacagtaggccagcatatggtaggtgtgtgcatcgtcttcaaccaggcttgggataattttcaccgttaattcattttttcttatttttgagttggccatttgtgtacaattcttggcaattagcagcataataattttaataatcaaaaattttgcttccattccttttaaaataaattaaatttctttttttttaataataaaattagaaagattattgtataataaaaattgaaagaatcatttttaattgaaaaattcttttaggctgacaaatcttccctggataaatcaatgaagctgattacataagccatcatcattaattggatttatttgtttacattaggttgtaataatcttgaattttatatttttttataagcatgtaaaaacgagccttaaaaaatcttttaggctgaaaaatcttcattggataaattaatgaaactgatcacacaatccatcattaattggaattatttgtttacaattatgttgtataatgtttggtttattttataaaaaattttcttataaaaaccagccggctcgcccgttggtggctgcgcaggtgaacagccggggctagacgttcgggaacaggcgcatcgctacggcatagacagttgcttgcggttaaaatatgcaaataaaaagacatcctagaagcatcaaaccaagctaaaaatactatttaaaggtttggtttttatctatatcccatatttacatatatattttttgcatttttatacacccttaacgatggaaaaaaagttgggacttttatttacatatttcggtgttttatacatattttacatatttggtacatattttggacttttttcttacatatgtacattttttaaaaataatttgggtattttttatggtaattttggaaattctcaaaaaaatgcaaaatttcggcaatttttcatttttttattacataatttgacaatttttaaaaatttatagaaatttcttatgaaaaaaattttttttttgaaaatgtacctctaaaaataccaaaaattaattaaaaataaataaaattttatttacatattttggacttttttgtacatatttttgaatccctagtaatttgtaaaaaaaatttcctaagaaatacaaattgccaacatagcacagaaatggaaactaggaaacgtaaaacaaacactanaaatattccactgacactttttttcacggttcaaaatgtagaaaaaatcgaatggcacctgtcccatttcgctacattgaaatttttcccgcgcgtagaagttgtgaaatttttacgctgacttattttaattgaattcttttatgttctcaaaacttttattgctacttgaaaaatctactttagcaaataattgaattatttgaaaaaaaatttctataattagccggggtatgcactcgttgattttgatatatttgctcattagcttaatcgaccccactctaaaggaagccgacgacgagcgtgacccttgagccatcaaattaagacttgtgggcaccgcgtaatgaaagggtcaattacataatcgaattaacagccgatggacggacgaatggacgacgacacgcagttaatttttgagataaattttgatgcaatccgattttgtcatctaaatttaaagcgaaaaatttattctcaaatttttactttaaaatttttaaaatttcaattaaatatttaaatgttcgctataaagtgaatgaaaatttaattttagtcaaactatttaactaaaaatgatttggtataaaatgcaaaatggaataattttcatttaaataatatttttaatttttcatctaaaataagcaattataaaaatgtttctattgccgtttctgttttgtttctgctcattgtcagcccattttgtgtttactcatgcgcaaaaacgaggggaatggtcattaaaagaacaaaaggtaattaattaatttattcatctcattaattatttcattacgccaaatcagaaattttggcaccattttcaactgaaaaaagagaagcatttgttgccgacaaaatcgctaattaatgacggcgaccaacaattaacagcacaaaatgggagcaatgtggagaagaaggctgcaccaatattttcgcctgaagatgcttattggtgggaaaatatataagctattgtgtctagaaatcataaaattctatcaacatttcttctttatgtcgtattttataatatatttcgcaattttaaatgctaaattaatttaaacatttttgattattttaattaaaattttttattcaaaaaataataattaagtgaatcatttaacattgatattcatccggacgattatccatctgcgcggagaaatgagtcagttgttgagcgtatttgtggacaaaaggtgtgcaataaattttaatagcaaattcacaaaaatagtatatattcacaaattcaaaaacaaaatttaatatttcaaatattctaagtgaaaaattattgataataatgcgatttattgaaaacagaaattaaaccagaagaaactgataaattttaaatttctccaatgcaatttccagtaattgtttatctttgtgtcaaatatatactaattagaaaaagtacagtaaattttactatatctaccgtaggttatggacccataccgttggatggaggacccggaccggccagaaacaaaacaatttgtcgcggagatgaatgatttgtcacgtccatttctggaaaaggcattcttccgtgcacaattccgcaacaagttggtgatggtgcaaattgccaaagcgatgaaattttgatcaaaaattggccaaaaaaaattgtgggggtggttaggcttttccattatgacaggatgaagcagctgttcgaccaaaaggcgtacggatgcatcaccaaacatggcgactattattattatgcgtacagtgagggcactcaaaaacaaaggcaatttttattaaaaagaaatcattaatcggttcttaatatttgagaaaatttttaacatatattaaattaatcatttattggggttttcttggccccaaatacattaaaggagaaatgaatgttttctaataatcatggattgtgatggtcagatattgagatgagagttaaacaaattatataccaaaaaattcagtgccatttatcgccagcggacattgtcgggtgaaaaggaattgtttttggaccccaaccaattctcgccggacggaacagcggcaattgtgcaaagcgcgttcacccgggatggccaaattatggcgtacaccgtggccgaaaagggcagcgatttgagcacaatacgggcaagaaaattaaaaaaaattatgcaattttagtattaaaatcgaacggtagttatttttgatgagagaacacaaatcgaaaatttataaaatccttgtctgatttggtacatctcttttaattggagaaagctttttgtctttaaaaacattgacttatgataaataaaaaattctaatagaaaagttaataatttcgaatttaaatttgttttacaaaaataatataaaatatcaaaaataatatttaaatttataaatattttcttcataatttagttccgtggtgtaaaaggcaatgacttgccggacaaaattcgaaatgtgaagcaaagttcgctggcatggatgcccaataacaaaggcattttctactcggtaaatacaaattataataataaaaattaaattttcgtattattatattattt

SEQ ID NO: 2627 - DNA, 2727 bp, Heterodera glycines
aaaaaaggaaataaaatacaaattttggaattaattactgtaatgtcccatttttcaatttattaatttatgtcggcaattaaaacaaaaaaagagatcgcacatacaaaatgttaattaattaattttaaattagcttaataagaaataaaacaaataggggaaaatgcctttcacgaattaaaattggtagaaatacgattcgtttatggccaattcatttttacaccgattattttttatgtgttatatgtataggaactgtctgactacgcgctgtatgcactccaacataaatataaaaacaaaaaaaaagaaatggccaagaacgaatagggttcattaaaacagaataaattgatattttttcatcaaaaaaaagttctggttctgtgtcgcgtgatggtcgctttttgttcgtgtacgtctacgacaaggacagtgccaataccgtgtactatttggatttgaaagcaattgacaacaaaattcaacgaaagccggcactgtcgttgcttatccatgatacgcgggcatttttcattgtaagcatattaaaaaaattaattcttgtacaatatcggttgaaacaatttttagtctcacctaaatctttatattgaaatatttttggcaaattgcccaattttatcatttaaattttctttcgcctattttgataaattaaaaattttaattaatttcaaagtaattaatcgttatttttaatatttgtttattggtcttttcgaaaattattatttttttttttgcaggactttaatctttgatttatgtccgtatattattggtttttctttttctgctattttaaatttatttttttttttggcgggggacaaaatctttgtagaacacaaaattataatttaaaatttttatgttgcaaagatttatgcataataaatattttatttatttttttaaccttaatttttggaaattaaattttttgtctacaaaaccatttgtacagtcctttaattatttttttacctcgcaaaaattctatgtacattaattatttttgattaagattcttgactacgaccatgaatcagaatcggcattgggtaaacaaaaaaataaatgaataaaattcttttttcgaaaaatttatttttattcgatgtagtattgactgatcacaccgcgcccaatcgaaaactgatcagaattggtatgtcaaccgcaattttgggctgtgcccactgggacacagtgatcgcggaagatcccgagaggacattggactcggtggtgccggttgctggcgacaaattgcttgttgtgtacattgaggatgtgaaggtggcaaaattttggccaatttgagccctttaaagggggggggggataaatttaaaatatatatcccttttttaaatttaaatatattcatttaaatttgtacaaaattccactaaatatatcacattaatatgcactattattattatttttttcttcgattaatagataattaattatagaacaatttagacatatctttatgttcatcattatgcgactggaaaactaatttacaggtactgaaaacaaaaaagccgtacatttcaaattggttagtcatcgttaggatttcgggattaaaattattattattttttttacttggatactgatcatgaattaaaaaggtcttcttttattatcacgagggtgcggattttttgtaaatgaattaaatttaatattaaaaaaaagatttttcataatttttgatgaatttaaatttaattttaagaattccattgggcattggcactgtcagccaatgctatggcgatcgagatgatgtggaggcatttttcagcttcaactcatttttggagccacccacttttttccgtgctgatttttcactcgtcgagaaaacatcaatgcttcaattggaacaggcaaaaccaaaaaaaacagctatttaaattaatttaaatattttatttttggttcaaattcggttacatgttactctgtgcaaaaacagaatgaaatggcttttatataaaatttcaaaatggcggatggtgccacaatagtcaaatttgttaaaaagatacgacacagtgacgaatggcgtggcgtcaatttgaccggcgttacagtaagccaggagtttttccacagtcgcgacggtacaaaggtattaaattgtcatttaaataattcgtctgattttgagtttaccatgatttcgaacatctaaataggtaaaaaatccaaaataaaaagtgacctagaaatttcgtcataatagccaaaaacaggcaaaaatagtcattataaaaagtcatcttaggcgaatcatgcttttttcgtgccaaactaaaaacggcgcgctaattattttaatttttggttcaaattcacacatttttaaaggtgccggttttcattataagtcggaatgatacaaaacgcgatggttcaaacccggcacttctttacggttatggtggcttcaagtcagtttatcttgggatttcaatttcccatcatggaaataaattattaaattaagcattccgttgttacccagttattcttcacaccgcaatattttcgtaaaagtaataaaagaaattatttattatttcaaaaatagtcgttcgagtagcgttttatttttggaatcttaatgtgaaaatatttcatcatttaattggtttataattatttttt

SEQ ID NO: 2628 - DNA, 7654 bp, Heterodera glycines
attgacaaacaaaaaagttattggccaaaaaacctcaaaacactgactttttctggccattttggcgccgcacgctatatcttttgtcaaacagaatttatttttttaatattttcaggctaataaagaacacttaggcctatttaatggtatcaaaattattttatttggttggacaagaaaaaagttataacactttaaagttcgcggcgccaaaatggcccgcgccaaagtgaccccgacccaaatataactgcttagagccgctatcttcctaaaaaaaaattcatagaaatttttattaattaaagtttttaagaaaattcagtttctaaaagagtctatctcggttagactacgttttttggtcgattattcaaaatgcaagaacattcttggtttctatagcaatacatgaaatgtaagttgaaaaaaggaaattgcagcctttaaaaagagaagcattttcccttaattttccttgacttttgtcgccgctgtaaaccctataattagcaacaacaaaaaaaatatcggccataaattttaaggttagccatccaaggtggctccaacggtgggcttttagttgccgcatgctcacaacagaggccagaactttttggtgccgtgatcaaccaagttgggtaatatattcaaaaatacaattaatttcccatttaaaataaataacaataattttaaattcattttattgctaattttaattttattcaaacataaaaatgattatttgttaatgatagttaatatgattcatttgttagggtgatggacatgctccgattccacaagtttactgtgggcagttattggatgaacgaatacggtgacccggagaagccggaggaatttgaatacatttacaagtaattgttatttatgaaaaataataaaaaataatttacatttttaaagatattcaccattgcacaacatacgattgtctcgtggcactcaatggcccgcaacactgcttatgtgttttattaaaaaacttaaatttttctttaaaaaatataaatgattaattagggcatgtaattttataggcacgaaaaaattaaaaaaaggcattgaaaaagtaaaaaacatgcacataagttttataaaattggggtaaaatttcacaaaatttcgtcaatttcgttaaacttaagctagagatcccgtgaatcgctaaataaggtgtcacaaatcctttttgaagaaaaaaaaataccaaataaagctaaattcattaattttgaagaaaataataaaaaaaatcaaatttttttgaacttatttttggcataaattgaaaacatgcaaaaataatttttttgaaaaattttcttgtcaaaatggtcgcctctttaaaatttttctggtcaaatggcttagatgttgttctatatacattcatgcatttagaaaaaaaaaattattaaataaatttacattaactaattggaaatttactatttaattttttgctttttaatgcatttgctattaaaaatataattttattattaattattttaatttctaaaggactgccgaccatgatgaccgggtggtgccaagtcatacgctaaaatatgccgcacaactctatcattacttgaagaagccggaggtgaaattaacccaacgaaagccggtgattgtccgcgttgaaaccgacgcgggccatggggcgggcaaacccagggacaaagtggtgagaaaaattggaaaattaattaaaaaataaattagttaattaattggaataatagattgatgaactgaccgatattatgagttttctgcagagagttattcagctaaaatggtacgacgattaatttcaaatgcggtactttaattgtttttaatttattttgtgcgaataaaaattgattttaaaatcgtcgaattgtatttttgacccaattcattctaaaaaatgataaataattaaattagtttaaaaaatattacttaattggaaacataacaattaataatcgttgggtagagataaaaaaatgccaaaaatgaggcatacgatgccaaagttgacatcataagagtgccagcacagatacggtaatcaactgtggtgtactgtaaaatctgggccaaaaaattgacaaggaaaggagcgcgaaaaccaattggcaaaacgaatcgaaggctaacagccaattacacactttgtgatcctttctttaatatagaaatgaattaaatttaaaattttaaagactcacattttggtaaaagtatccaaaattaacgaaaaattgaacaaaacggagaccagtgccaatattcctggcaaaatacttttaagcaataaatcaacaaattcttcctggtatttagcagtagagagagctaatcaatgagatgccaattaaaataaaaaattcatgtttttattcattgtaaaaaaattgatgaaataaaaatttgaaataaaaaggttttgcattaatgtcacacaactttttactttccttttctccgaatgagaattgcaatttcccacaattttaaggcgcgatatttgttatacttaaaaaattttatgaaagaaaaagctttacattagatttcagatagtttatttgttcaaatattcctaaattttacgatgtcacagaaatacggggggaaatggagaaagaaagaatcacagcgaaaaattaatcagatttttgctgaaggcctgacaaaacatctttgtgttggttggccaaaacgacaagaatgtacccaaagtctcggccttcctgcacattgagacgcaaagagttgacgaatttctgatcatattcagtcagtactgcatcaccttggtttctgtaaaaaaaatgatttgataatgctttaaaactgctcgagagacggtaccaagaccgagacttggcctcaaaacacactcgagaccatgactcaacaagacgagaaccagaaacccgagactgttctcgaggcgagaataaagatcataattgcatttttttatattgttaattatttcccaactaaactttaaaattaaaaaattttgtgtgtttcgataaaacttttcttagcaagtaattttaaattataaatttatatttttcagggaacggaaatgacttttttccaattccgatttctgtcaattaatcatcaaatagttcttaagaagtttgcttatattattactttttaaataagaagcaaaaacaaatattaagctaattaccgttgcgtatttcgctccaactctgtgcggtcttcatgataaatgctaattaacttaaacgaataaatatcaattatttggaaaaacattaaaaatataacaaagataataattcaaatattataagaaaattggtataacattttttccttgattgaacgtgttgattaagggtaaagacaaattctttaacataatctgaaaagttgataaaaggttgctatatattaaattatttcaattttttattattattttaaccaattttgttatttttattgcgtccttctttatcgtgctatcattggtcaacaaacgtaattttgcaagtaaaagcataaaatcactacaagcattaactaaaaatattattatatttttttatataaatttatactattactattattataccgtatattggccgtatttggtctatcaatccatgaataaaagttttttccatttgattttcggtgttggtaatttttttgacaattttgtccagctcaacaacaagcgacggaagtgtttcaataaaaaatttattaaaccctttgtcaataattgctttttgattttcaatcttaaaattaatttttataaaatttatttaaataaatttaaaaaatatattttttattatttatttttttaaacatatttgtacttctttcttcatttgctgttctttattttcgttctccacaccactgctttcttccatcacctttgatggcaattcgtcgcccttttcatttgtcttttctggcgaatcatttcctttggcaccagcggcggactcggaaaaatttgttgcaaaaaataaaatcaaaattaaattggtaaacattttttccttttagccttaattaaacaattttttgaataaaaaaatgacttaattgattgaaattgacctttttatatgcagatttcacatgcaaccgaatgattggaaatgacgcgttgctgccatcaagacggaaattgtcatattttccatttttcctgcgaattttgttaataaatgttatattaattatgataattacaaaaaataagccaaattgccggttactggcattcggaggatggggagatcacaacggcggaggatgtggggatcacaacggcggagcagaacataacgacggcggaggatgtggggatcacaacactaaaatcacccaactccataccgaagaaaaaaatattttttcgatgccataatcgaaatattaaaaatgaatatttttctgggcttctcgaattaaggagggaggtgttgaatagggattaaatttgacttatgccagatattcgttttttatttcttattttgtgtcaactcgctccttccttcgcgcataaagtggatcattaattatttttgtatttccaatttacatcctccgacctaattgataaacgtatcttttctttgtgaatttgtcctttttcaaatttgtgcttgcctttcttttaaatacttatttaaattacatcggaggaaaagtcaagtcgaacattaaattattatccctactgcgcagctttgcaattttggcctcccagttaaaaagatttacatgtgcgactcataaacagatgctaagcctataaagctgaagtgaaacctttctttttctatgaacagagacaaagaaatagtacgtcaaaatgaaaagtctattttcatcaacattttctatttgttagttcaactttaaattttttaaaactactacttttacaaattcactcaatgtccctcatcaatatccgaggtccgtgtcttggtgtgttgcggtaaagaaattgccagcaaaaggttgtccaagttgttctttatcggcaaagtcggtgacattgaatccaaaacgaacgactaaaatggaaaacaatttaattaaattatttttagcattaaattttgaaataattttttaccagcggtggcgtttaagtattttcctgccttttgttcataagccaagaaagtgtagcggtgtgtttctataaaaatcgggtaatgattagggcatcgtcttcattaaaacaagccagttgggggtgggtatatctgaaaatatctgtatatgacttttactcatatccaccaaaatgaccgcgttacttaaaaaaataatcaaaataaaaaattttgcttatagctttgctcatctacaaccaaattcgtaatccttgatatcagggatgttgatccttttgtgtttagagttcgtatttttcgtattttcattttttactgagtttcgcgttcgggtttcgtattttggcacgaaacacgaaatttttaagcactgataagaatgggggtcttgtctggtgagagaaaagattttttgaaaaaattttcaaaaaatctacttaagtttaaaaaatttagggatatcgaataaaattaatgtttaaaatctttattattcttgagcaatattataaaaaaattttttgtcaaaaatctccatttggttgttttttaaataacgccctttttgatcatttttgagtaacaaccaaccgcaaaatatccgccagtcgcctgatctccccacaacatatcgtttcccggcacattggccacaagccaaaatgcaccattgtgcttaaatttaaaaaaagattaaataattgtgttaaataaatattatcactcacgattccgcgtcgaccattagaagcgtgtaatttatttccttttgagctggccatatcacttttggcggcttcatcgtttggttttggaacaataaatttcccaattcaaccttcacatcctttgggtattcaacgtataaaaatttcggtggtggcaatggcaaaatgtccggcacgagttttgaagttttaaatttctccgccactgttttatttttgccacctccgttcgttgggccattttgctgtcctccatcgtgttgatgctcttcactgccgtggtgatgccctccaccgccgtgatgaaattgtgagaaaatgaactttatgtgttcaccccatccttcgccgtgaatgaaaccaatttgtatattgtacgcaaaaaagagcagagtgaaaaccgcaagggcatttgttggaaaaattgccatttttatataaattgacaaaatttattcaaaattattattctaaacaggcccaagcaaagccataattaatttaattaatattagataaactgcactattaagagatgttgaataatttatgtttttttttctgaaaagacctttttatatggaaaatttgatttaaagagtttgaccaaatatttatttagcattcaaattgttagattgtttgaattttttgtctgctttgcgccatatttcataataattttaaaacatttggttcataaaaattgccagcttcaaaccttaacattcaacacaccagttaaacaaacagtagcatttttcgaaatttaaatgaaaagagaaattatgggaatgcgaattttgtcttttgtagtgtcaaaatatcattaaaaattaataaacagaactttggttcataaattttggaaaattcgaaaaaaatttaattaaatttcaaatccaaaaatcaaaaaatacctgaagttttgaaaaataaatttttaggggctggcgggatgcattaaaaggggctgatggactcaaaattctttgcggaacgggatcccgcctgattagtcaccgaagcgccatcacgtagagcgatccctccgaatcccgtacgccaaccatcccctggccgtccaccctccgctatcataattgagattgatcgagtgcgactaattgatcgatgccacaagggctgccgttgagcctgaccatgaatttgggtgccgatttttagtagacgagagtagagattgaaacgtccgcagattgtcagataggctcatacataatctgctgaaaatctcgaaagcccttcatgtatgataagaaaacgaacacaaagtcactctacgccccccatttccattggaatggtctaagagaaattgagcaaaacaaaatcgacacaatgccatggaacattctttttatttgcaaaattattaacaactatcgcaccaaatttcatgaaaataccaaactgatatttgatattaatgaaaaaagtaaggataacataattattcactgacaaatcctttctaaaaataacattttccgatgctctaatgacccttttccatcctaccagcacaaacaattacttaattaattacatcaattaataaattaggcaattacttataataggacatttgctcgattttctgtgcttttctttccttcgcgcactaatcaaatggtccatcatttttgtcggctaaatgaaagcgaacaaaattcccaaaagccaatgccttcc

SEQ ID NO: 2629 - DNA, 1428 bp, Heterodera glycines
accctcgggaatggcagcaaccgcgagacttaaaagggagcattaaagggaaaagggaagagcatgacaacctgaccccgattgtgaacatttcgagcatgtccctgcgaaagaaaaatcaaattaattaaataaatagataccatttaatttgtttggaattgggtcattccaattttcacctgccctgaatcagtccgagaaggaaaatcagtccgatgacgccgaatgagtacagtgacaactgttttcccaattggtccatgcctaaacgggaaaatcacagtgcaaattgttcacaattgctcctcaactgttctgcagcggcgtcttgggcgactcttccgattgcatcatcataaatacttcgccaaattttgaatttggcccagtcccaatcacaattccctgtcaaaatgccatttagattctctcttccaaccaaaccgactgacttttccccagccggcacagaccaaagtgcccataaatgcgatgttgtccatgtgttcaatgctgccgcctccgtttccatttactgtcccattatttgtcgaaaatttggccgcattttcgggcaaagctgcggccaccttttgtctcgcctcattttcacccgtaaacgacgactcgtccaattgtaattggacggacttaaaaaaattttttttttttttaaatttagaaaatagtctaaaaagtgcctcgatgacacgaacatcggccgggactcgatctcccgcgttcaaaagtaccaagtccccaggcacaagttctcgggcataaaaagtgacgcttcgaccatcgcgaatgcttaaaaaagaaaattgctaaaatttatttttagaatcggaccaatgcgccgtcggtggcaccaatcggttgagcttttccaaagtcttttctgaccgatattcttgaacaaagccaacggtgaccaccgaaaaaggaaaattggagcaaattggaaaagaaaatgggaacaatgagaacggcgacagcaatggacaaagcatcatcgaattgtttcaccagaacagaaacaatggcagaggcgagcagcagacaaatgagcggatttttgaactgtaaaacgacgacagataaattggaaaagggcgaggaaaaacaacggaatgccaaaagtggcacctgctcaaggtacttgccgaacagggacaccttctcgttcagctcgaactcgttgaacccgctgaagcccagccgacgggacgcctcggcggacgaaagaccatttgtgggatcagtacgaagtcgagaaacgcattcctaaagggcaactcaaaagccaaattattaaaataatgcatttcaaatacatttaatttaatgaattatgagtataagtagatggttgcccacatttattggagaaatttttttgttttcataaggcatgaaaccatg

SEQ ID NO: 2630 - DNA, 2291 bp, Heterodera glycines
agggtatggaatttttaaaaaatttcctgtataataataatccaaaatatttagccttttgacacacctcagcaccgcgcgagggatgcctcttggatgtccatcgcggggatcatcgtcgtgccgttgcttcccgctgcaccgcgcgccttcgagttctgcccaaccaacaaatgtgcaccctcaccaagaccagtccgaaaaagcgaacgcaaaaacccagtcccaccggtgaacccaaaaaatgcacagcaacgattgttgattttggtgttgttgacagtactatctttttgatgctaaacaaaatttaataattaaagaaaaataaaacaaaattttggaataaaggataaaggtgatgaataatattgtcgatttgactgtatctccaattaccgaaattgattggcaaggaatcggttttgacgcttcgttcactttttttccgtctttctcgctgtcgccgtttttcgacttaatgtttaaatctttaaatggaattttatattatctatgtatatatcttctagaatttggtgccaagaattatgcttaaactacattcccgtattacttaattaatgtgcacaaatgtttaattttgcgacatacataccaatacaataatcaaaggaatgataaaatttagccaccgctaaaggccgaaggccgccaacgcaccgccaccacatcaaaatcaaacataatgccaatcagacgcaattttaatttatggttcgttcggtcgctccctccgagaatggctaaccccgccttccctcctcaccttttccttttccgcctcttctgtctccgattgtttgttgtgcggttcagtcacttcagcaacaacgctttgttgcttctgtttctgcttccttttctttgcaccgctctttctgttattattattttccgttgttccttcgtccattttctgttcttttcttttcggcttttcgttttgtctgtaatttatgccacttttaatatccattttcattatatatttttgttatttttctcatttggaatttaaaggaatgaattaatatgtaaaagcagaaatgattgtcattcattcgtttgctaccaattaatcttttctctctccagccgttgtcacattttttctctccacatcccaggaatttattcaatgtcgttttttatcattcaaatggaaagagaggaaattaaatgtaaaaaatgcacggttttatgaaagcccaatgaattttgctgttcgcttcttattcgtcgtttctttgcgcttgcatttttcatcaattacctaccgaaaaaggactgaaattcataaattttaaatgtatttgccatttcttcaaaaaataaacagaaaccgactgaaaatattattaaaagcattcaaaaggaaatgaataataatgttttgttttgcagaaactacacaaatataaacgaataataattcctcttggggggaggtgcaaaatcaaaattatctgctgatgatgatcaaaatgagctgataagagccgtttgtgtgcgaaactttagcagtacttgtgttcttataatggaggggaaagtccgttgaacagtgaaaataacgtcaaaacaggccacccaaagaacgaataatttattcgggacgacaatttcgttgtcgctaatttcgaggcgagcatttacatcccattaagccatgaggcaattaaatgctaaggcacaagaacgaaacacacaaaggatttaatgggacaaaccgacaaatttaatttcaagggatttttgtggaataattggtttaaaatggaaatacattcctttttcaactgctttgggttctttgaaatgataattttgttgaggaacctaattaattaaaagtgtatttaaccaaaagaattttttaatctcggagtttaaatgcaaagtcgctggtgagtcggcaaatccatttaaaattctccaacgaatcggcaaatccaatcattgctcatctgtcggtatttttgtcgacctttttaaaactgaaattgcatttttccaaatttattttaattattatcacaaatgtttatttggaaattgtttaaatgttgcgtgaaagacattggaaaggatgggcaaaacagagaatggcgaaaaaataaatggcaatgaaacaaatcaaatgaacgatgaaaacaattgaatccatgcgttgtcagcaaaaatgagccacgaatcattggcacaaaacccgacaaaaaaaaataattgatcgtttttggatataaaatgccattgatccgcaaatt

SEQ ID NO: 2631 - DNA, 4660 bp, Heterodera glycines
  unsure (1)..(4660): unsure at all n locations
tgcaggtnnctgatcgtnnttttggatataaaantgccannttgatccgcaaactcttgcaataaatcattcgaatacaaagcgaaaagggggagaaattatttgtggaatattgcatcttttcaatagaaatctggggacaatgatttggccaatttcaagaataaatgtgaaagttgcaattggaaaatttgccggtttaattttatggaaatgaatggtaaattaatgaatgaatggatctacttatttgatgtaagagaattgagcattttttttaagattttgtgggtttattgtcgatttattttcccattaaaagaatttgaaagacttagggattttttgtgtgagaaaatcaccgtaaaatgttttcccatttcactgacaaaaaatgagatgaatgaatgaaaatgtctttttggtcattaattttaatttagaataaaaagacattttaaataataaatttaattaaataactaaatacgtgtaacaaacaactgggacagtgtgcaaaagttgggattaattgaatttgaggggggggggggggggaaatgccaaacgacgaacgaacgaatggccaatggaacgggcggaggggaagagaccacacgattgaagaggatgaacttctctgtcgagtggaagagaatgaatgaaaggaaagtggcaaagagttgggcaaactgaaaaaaacaaacgggcgattaattaattaggtaattaaattataaaataaaataaattttgtaatttgatctgtttactgatttttggcagtgaatgaatggcggggagagaaaagttgacgagaaaaggcaggccaaaagcaacgaaagaacggagggacagcctaagaattatttttgcattttttcatttcccaatttgtgtgcttgctttttctcaccattcttccgatggtcctgcaaatgccgtcgccctcacttcttgaaaaggccgtaatcggatgaagaacatccgcagttgttaaagagaccgccgccggagttgccgctggaggaaggaaagccgccgaaagggccctaagggagtaattaaaagaattacctaataaagcgaaggagggtaattaattaaatgagggtaaataattaattaaattcaattcgcacaacgcaaacattggcattaataaaattaaaaaatattaaatgaatcaattgtttagtttttgttttaatcaaaaaaacacctgtcctaatgacgaaggtccgcccgagtgcaatccgtccaatcctccgcccattttcacgccaacgctgccgccgaaaaggccgccaccgcccaccgatgagcaggagagaccggcaccgatgccaccgacgccgcgcgtggacctgcagggaaaaaggcattcaaatggggccaaactttgtttggcatttcacttttggaaaatattttttctagtacatgaaattatgccgttgaaaataaccaaatggaaattgtacgcaccaatttgatgatccgccatgaccagcaattgccagcccactgatcactccaccgccgatggaaccgctgcaagagccgccgttggaggaaccgttgccggaattggacgaatcagaggaggaggacgaagcggactgagtggagaaagaggaaatgaaacagagaattggggggggggggataaatggaagtttagagtctcattttaatgtgccaagtcaatggaagaaaaaaagtaaaacggaaaaactggcactttcgtgccctattcgggtaaataaaaaatacccagcagagagagcagtggagagaaagggccattcatttggctttattccaagttctgcccacctgctgtaaatcggtgagggcaaggccagtccggggtgactgtggtgggccagagacaaccattgctttgttgttgttggtgtttggcgatatgtccgctttttgtgtttcaaattttgtccaatcggtgccgattggaatggttaagtgaagctgtgatgattagttagctttcttcacgcaataattcgtcgtaatttcgctcctttttgtcgtcacttttgggcgaacgacgaaacgaatggctgaggagggcgaaaaatgggaaaatgtcctgaaattggcgaacatttgctgatggttttgtgaacgaatgaatgattattggaggcgagtgagtgattattgttgttacgagaaaaaaaaaattataagacgaaaaggggcgaaaaacaataaataaaataaacggcggcggcgtctgatgggcgagaacaatgcgcgaacaaacggtgggaaagcgagcgaagggattgtcgcttttgctcactggaaggcgggcgcttgctcgcctgatggagggcgtttgctagcctgatggtgggtgctttgccaacctgatggcgggcgtttgctcgcctgatggcgggcgtttgctcgagtgatggcgcgtgccaactcgcttgaaggtggttggcaacggaaggatggtttctgtctgtatccttaattaggagagttattttcccgtataatagttttgttgacaataaacggatagcttcaagatttttttgcgggagtgtgttttcggaatgagttgaaatgaaaacaggtaaatttggatattgggtcccagatcatgagaggctcattcaattgaaatcacctgcttggtagagctttggtttttggcggccgattgccaagctttgttctgttttggcactgtgactaaatgccgagcctgaaaaggttttggcgtttggttatcagaagccgagcatagttaagttttggcgcggcggtgaatgtcgagcctggctaagttttatattgtacaattgacaaccgtacttgtctgggttttggtttttgacggccgagtgccaagcgttgttctattttggcactgtgacccaatgccgagcctgaaacggttttgaatttggctatcagaagccgtgcaaaaccgagttttggcgcggctgttcaattccaagcctggctggtattagcttttaattattcataactgacagtgactttacgatgctgtgacaataaccgtcttttgatcttaaaaaaataattgggtcgtgatagtataaatcaataaactatcttaaaaataagaaatgaattaaatgggcaaaacactatcaaaggtttatttcaatcttaaatcccagcaagttatgtgggaatcttgaaggttttactagaaaaattaacccaaaaataaaacttaaagatgttcatgagtttcatgataattttacaaatgctagtataattttgaacaaaaggtacgacaataaaaaatgaaaataataataccaaaatttaaaaatggggatattgtacggatcacataagaaaagggaaagtttcagcccccagcctcatgggcatttgcccatcaccagacccccagccccatcagcccccaacccaatggcatttcccatcacgagtcccccagccccatgggatctgcccatcaccagaccaccagcaccatcatcccccaacccaatggcatttcccatcaccagtcccccaaccccatgggatttgcccatcaccagtcccccagccccatgggatctgcccatcaccagaccaccagcaccatcatcccccaacccaatgggcacttgcccatcaccagacccatagccccatcagcccccagccccatgggcacatgcccatcaccagacccctagccccatcagctcccagcccaatgggcacatgcccatcaccagacccctagcccccagcccaatgtgcacatgcccatcaccagacccccagccccatgggatctgcccatcaccagaccaccagcaccatcatcccccaacccaatgggcacttgcccatcaccagacccatagccccatcagcccccagccccatgggcacttacccatcaccaggcccctagccccatcagcccccagcaattggcacttacccatcaccagacacctagcaccatcggctcccaacctcatgggcattttaataaatgttcagtggaaggttttattctgttttaaagtctgacatcataaggcaaattaataatacgataattgggttcaaaattatgtttggttaaaggactttttttaatttgttatgtgcattaagcaatattttcattttttcccgctacattttttatttttctattcatttttcttggaaatgaataagtactaataattatagtaattaatccaatatcgtcaagtattattccatcaccaggaagcatcataaatacattaaaaagagtgttggctgtgatttgttgagcggacttaacggaatacttattggtccattgagacaattacaataaaagtcgacagaaattttttccattttccaccctcgttttggcttgctaattcgtgcatcatttaacattttatttaagataagctcaaaatttgcataattgtcctcatcttctacaactctaaaatgaaagcttgtcgcatgttcttttatcccaaagttttcgttttctcttacaccgcttccaatcggatcataaaaactacctaaatagtgacattattttattgtaattagcgaaaaaatgtatttataaagttattttgcacataagatcacttga

SEQ ID NO: 2632 - DNA, 2646 bp, Heterodera glycines
  unsure (1)..(2646): unsure at all n locations
cccatcaccaggcccctagcccgcagcccccatgggcacatttcccatcaccagaccccccagccccatgggatctgcccatcaccagaccaccagcaccatcatcccccaacccaatgggcacttgcccatcaccagacccatagccccatcagcccccagccccatgggcacttacccatcaccagacccctagccccatcagcccccagcaatgggcacttacccatcaccagacccctagcaccatcggctcccaacctcatgggcattttaataaatgttcggtggaaggttttattctgttttaaagtctgacatcataaggcaaattaataatacgataattgggttcaaaattatgtttggttaaaggacttttttttcatttgttatgtgcattaagcaatattttcattttttcccgctacattttttatttttctattcatttttcttggaaatgaataagtactaataattatagtaattaatccaatatcgtcaagtattattccatcaccaggaagcatcataaatacattaaaaagagtgttggctgtgattttgttgagcggacttaacgggatacttattggtccattgagacaattacaataaaagtcgacagaaattttttccattttccaccctcgttttggcttgctaattcgtgcatcatttaacattttatttaagataagctcaaaatttgcataattgtcctcatcttctacaactctaaaatgaaagcttgtcgcatgttcttttatcccaaatttttcgttttctcttacacagcttccaatcggatcataaaaactaccaaatagtgacattattttattgtaattagcgaaaaaaaatatatttataagtttatttgcacataagatcacttgagaggatatgcaaaagtggtcacgatcacagaaattctttcgtccataaggtttacgtcgccaaatgattgctgacgatgcataaattcgtttagcacaacatccgaagttacttggtgtagtggtctcactggtatcataacaggatcagacaaagcagcacaatataaattcagcgaaattctttccgtcttccatccttgtgcaggttctttttcctttgcctcgtgtattagtttatcgataattattctaaaattattttccgcatcttcatttggtgggcatttgaaataaaaactagttacgtgctcccttataccaaacttggctcgctcgttgacatggctctcaatcttttcgagacactttcccttgtcaggggttgccttgaaaaagtggcgggtgtttctcgcacgccgaacttcttttggcgtattttggaacgacattcttaaagtatttttaattgataaattctagccttaaatagatgatgattgatacaattcatgccttaaataaaggatgatttactttttacaaggcggaggaataaaagcaaaagtttattcaataatatccaaaaggcaacacattaaagttttcatcaacaatccctttcctctgcacgggcccatattctttctttacatcccttgagagtatcctgctatcccttgtcggcccaatcttttccggataacgaaacacttttttcactccttcctgatagcccaacaccatctccttgaattcttcataccgcatcttgttggacctattcaacgtgaatccccgaattttggtcttttcccaaatctccccatctttcttccttctgagcttcagggcgtactgcttcggaccagctgacacatattccaaaatctcgctatcggaatattctcgagtcatctcccttaaaaccaatttaaagagtttcaaaaatttttattttaccccaaaaatttcccctccttcaacggacaccgccccttccgatgagcaaaggccagagaatctaaatataaaattttacggaaattttttataatataacacctgtatcacaatacagtggtttacatccctcctccctgtagacctgctccatatactcgtacaactttatccttgcagcgctcgtagtccacaaagataaaactatattcgacaccttatgctcctttatgaactcctcctttttacgatatacaacacgctctactccttcacatatttgtattggcgtcgaaacatcaagcgtattgtcttgtgacaatgcgacccaccgttccatgctgttaaaaatctcactcgtcgaaagcgtgttgcgcatcgaaaacttcccccacaagctgttcaaccccttaattttcattgctgataaattaatatttgcgtatttagtaccaattttgctatcatacgaaggcctgggttaaagacaattttgtcatgatcaaggcagatatcgtatttcgccttgtacatatcggtgaatgctctcttttcctcttcacttttcacctccgccggccaccccgacgcctccacctttatttttaagaacatccgcacatatcctttgaacaattgattgtcaaattgctcaaagtgatacgctcgatagaatcccacaattctatatcctagctctaaagncttccgcagttcaatcgaagtgaaacgtccccaaaatgctctctgctctgngcgatggntacattttttcacatcc

SEQ ID NO: 2633 - DNA, 1248 bp, Heterodera glycines
aatatgatgaatggttaaatgatatttgcggtcgaataattatggcctgctggaatctgacctttgcggctaacgaatacgaaatgttcaccctaaaaagctcccaaaatatttccaaaatgctaatcaaaatatatcccaaaaactgctcaaatacgcgaatttccaaagtcttattctgtacatttttaatttcaaaaacaccgtaggaagcgacagaaaattttttgaaattaaagtctgtttgctgaaaattttttccataagtttttttgtcaaaaaatatatttttttttaaaatctcctacataagtgttaaaactaccaaaacccagtcttatagccaaagtcaaaaatttgtttttatattttaaaacgtcgcattgatttgaataagtaaaaagcttttgagcttttcataagataaatattagcaaaaaaaagagagaacataagaatccttcactaatactaattaaaaatattttgtttctatctgttcttagctcttttttaagtccaccagatacgtaggaaacttctcatcaccaggataccgcactgtttttaaatcgtctgttattccatgtatttctggtttgaggaagccaagcgcactgcctacccacgtttcgttccaagcctaaaatttcatttttaggtccacattgatatggaactccaccatagaagctttaaaccaagctagaggaatctcgcacttgtttagcgttttaaaaaaagtaataatataaaaataaattgaatttcttactgaatttattcctcttatgttcgcttttaagagttcaaaatgttctatcacgacaaatgctgtatgctttcttggttattatgaagaccaaatgtaatgcatgtgatctgatcgtgaggttggtacagaaggtaagcaaaaacacatgctaaattccggatcaggattagtgaatttaaccggtaaatgtttttttattcctgattctgattctaaaattttacaggactctgacctggaacattctcaaaaatgaaaaaaatattatgctaacataacaaaaatgaccccgtcgaaaaactattaaaatgacacaaagattttagataaaattattttacgcaatcaaacttttcattcccataaatcacaacggtcaatagcccttctcatgaccataaaaaatttctaacaacacttaataacacatttaatgattcttatatttaaaaatgttttttatgtccaatgat

SEQ ID NO: 2634 - DNA, 1504 bp, Heterodera glycines
  unsure (1)..(1504): unsure at all n locations
ataaaaaccctatcttttattgattatttaaataaaaaatatagttttacgtttaaacggatgcgcaaattatattaatattttctcatattcaaaaaattttatgtggtataacttttgaaatttaattcttttggtttttgttcatgaaatttggttgaaaatatgacaaaatatttttaaaactgttcaacaaaagtatttatttggtcgagaaagtgcattttatgggacaaacattggatttccatttccatttttcaaaaaattgtttttaattatttttgcacttcacttcgccatttgtcgctttctcaatccaagcacaatcaattggagcaaattgacctggaaatttattttttatagacaaaaatgaagataaatgctgagtgagtggaatgtcataatctgtccattttctcaattttcgttaaaactttaattttcctcaaaaacgaaaaaattttacccctaataattataaagttttaatcagctttgagccattagctatatttagtagagaatccttgaaaaattttgcttaacttattccaacaaaaattaaaatttccctggcgattggactatcaattcctttttgcatgtttcataaattttgacaaaaaaaaaatctcaaattttcataaatcatgaacgagcatacgaaatatgcaaaggaatccccaaaagtaccaaaataattaaataaaattttttattatgatttttgggggaataaaaaagttctaaagcgtgaatacgtccttaaatgcaaaaaaacaacacataattcggcatagaatgttttgaaaaattgatttttaattcctcttgaaatggaccttgttctaaaaaaataaaagaaggtttgaaaatgttggcaattttaattgcaaaaaatataattaatttttaaaaaataatactataattatcacctgtgaggccttctgttcgtgtaggatctgtaggataacaagtcgtttggcttgagacgcccacttgaacccaaatattgttgttgtttttcattaatccactcccactgtcaccctaaaagtaaaaattattttaattttttaaaaatttattacagtttcgattatgctcggcccaggctgaacacaaatgatttggtcatgctcattatcattagaagaattatcatcatcatcagcaattgaaagtctttttgctaaatcaaggatttcaattttaattttttgttttttcaatttgaaattaattacatttgattgatgcactttgacaattctctgatgcactgattttcatttgaccgtacatcaattgtttgcttgggcctggcttactgtcgttcgaacaatatggtgaagtacggccccaaccagcaacaacaaaggttgactgatcattggtgcctgaaaatataagcaaaatatttttaatttttaaaaagtatttaaaatttatntggcaaccatattccattaaacaaatgggacgagcatttgct

SEQ ID NO: 2635 - DNA, 1974 bp, Heterodera glycines
  unsure (1)..(1974): unsure at all n locations
gaaaatataagcaaaattttttttattttttaaaaaagttatttaaaatttatttggcaaccatatttccataaaccaaatgggacgagcatttgctgtgaatgcaagtgggttcttcaactaaaattttattgtattaaattacattttatattgtgtatataaagaattcataaagaaaatgaaaaatctattaaaaaactaaaaaaccaacttttgcggactgaactatcaaaaaattaaaaaatgttttttaaattataaaagtttttcccattagattttcctgagttaagccgaatagaaaccagaaaaattcatataaatattttccttaaaattaatcgtgtcctaaaacactttataatgtttatctgctttctcatgattaatttgaaaaaatgcttaaaaaccccaaaataataattgacaaacgaatttttttattcccataattacaattttctggtttttacagaacttaaaattcctaaacatccaggaaattgtcttgtttctttaaggaattaaattagaagacgaattaataaagcaagcataaaaaacgaattcaaaattcgtctttttttatcattttaatccgcttttcctcactattagcgatttatttgaatttttacttcaattatagccatgtcatatggattcggttgcactctctgcgcttttataatgacgtttttatctgctttagcatcattaatttgattgcgttgcgcgtcggtgccctttgggtgcaatttaacggccgcaacgcccgtgagttgttgctgttgtttcaaatttgcggaaccatacgcaatgacaatttgatctaaaaaaatcagcaaaaaacagcaaccacttttatatatattaatgatatcattacatattcacgaaatatttattattcattctttagtctacaaatttttcaataatttgtactaacaaaggcaagtaaataaccgaccataatgagttatttgttttttaatttttggaagagaaactttgcacactttaagtggtacaaaaaatgtaaagaaagaaagcatattttaattaaaattaagcccttaataattcactcactttctgcaacattgtgctcggtacaatgcaatgcggtcaaaatatgtcggggaccgataattgttccgctgcaatacgactcttaaaaaatatgaaaatgttataaataaaaaaaagattaattataattggcctgtttagaacacctttaattatcaaattaatttatttaaataattttcaattaattaaatgattacttccaaaaatcagtcggacgatccatggaagtgccttgtcatcaccaacttcttgccctttatacacctttttaaaattttaattattttttaatttggaactttccttctcttttatacatgatttgtgccgattgccatttttgacacattggccaattgaggttcgaagtcggaaatgccgcattccgaaaagttcgaactttgttggcatgacacaatcaaaagtttgctgttgatggaataaaaagcaagcaaaaccattggcaaagaaagatttgccaacatttttcagctttttattagacttatttctatttgctaaattatttatttttatttttccataaatttttaaaatataaattaaataaaattcttaataattttaaaaacataaacgtatatttataatgaaatttcaattgaagaagaaacaattttgacacctcaaaattcttttgtatgaaatgattaattaatttttctaatcattcataccattcattaatgcaacaacaacgaaaacaaataggcaattagcatttaattaatgcattttattgctcatgcctttttttctttctttatttttagtattgtaattantggatttttgtgtgcaatttataaatttanaaaacccaaaaactttattaattacttntaaaaaaat

SEQ ID NO: 2636 - DNA, 3666 bp, Heterodera glycines
  unsure (1)..(3666): unsure at all n locations
gaaatgtgaagaatggcggaggagattataaaaataaaataaattttaaatcaaaaatatttcggctcgacccagagactcgagacatgaccaaaaaacagagattttctcgattcggatgcaaagaaacccgactttatcgattcgagaccgagacttttctcacaaattcgtattgtgtaattaaaaccaaaaaaaaaaattgtggttatggtcaaggtaattttttgcttagggttattgaacagattttaattcctaaaattctcacaaaatttttgacactgcgaaaaatcgattttgaatgaggcatttgttaagaaaattaggaaacttttaccactccctcgctgatgttactaaaaaaccctcaaaacaggcactaaaatggaaaaatattctcaaattttttttatattgcgtataagcaaattatctgcacttagctagaatatccatcatataataaaataatttgtaagtaatatgttttgtgtctttccacggtcagttcattccattgctcttgtgcttttgcttcgtcgccgttcactcctttttgtctcaatacatattttttaataagctccagggtgtcgatgacagggtaaaagaaatcggagcatcctggcttggagtctaacccgtagggcgcccagcttagcggccctacgttccacgcgatggcggtgttaacaccctaaaaatacgtaaaagatcccaaacaacctgacaatttacggttgaaaatccaaaaggtgccgctcccggcaaagttattatgccttctccttgtctttgaacctaaaacagatttttttggattagattaccataaaatcttaccgttcgagtgcaacaatattattttgacgtaaaatttccgggctgatcattatggctttttctcgcagatattaaactcctgcacaaatactgatgctgccaggttcttgaagcgggtaaaatctgcagccggaatcgaatacctaggttacccattctatctcgttgattctttacaaagtcagacaaaccaaatagttaaagcgttacagtccgattttggtagcagcagactaatgctgaacagctccgcgttttcggtgtgtggtggaaagaaagcgccggcacgtcttagatatatgtaaaaagaagtcacaccttcaatcggtgcgtccattcctcctgaggcagcatccattggttgaaaggtcaacagagctcccattgctggtttcaattcggaatctgccggttttggggctaattcttgtgcgtactcgaagacccatccaggctgagcaattccctgccaaaaaacgctaaacccgaatttgatttttcctttaatctcttaaacctctcgtattcgtcgattgttcggttattgggccagcagtttacttcctttacatacttagaaaccgtcttaacggagtccgtcataggtaccagtttataaaaaccatttaacggcattttttccaatgaaacggaactagagaaattttttttgaatgtaccattattcatggtaccgaataggaagctgctcccgcggcgataatttacattccggaagttgataattttgaggaatacgaaacttaaataggcctacatatctcccaaaaatattcagggagataatgttgttcaagaagtcgtcaatttttgacgaaaggtcgtcagccgtgggtaccaaagtttttgatccctcgattgcttcgtaggtagtcattatttttttagcgaggatttattagcaataaatatttattattttaattttaatatgtgaaaaaacctatgaaaatttttttaaataccacaaaaatctacatttaccatttccaataaacaagttatatcctgcataaacgataaaaagcagtgtttaaacccgttctccataatcattctctcatcatctgcctacttaattacgctaaaggttaatgtctctttgtcgtcgacaacgaattagttgacagtttaagtgaaatcctcttttttacattttcccgatccatcatgtatctttctttacccgtttgtgaattaggctaatgatgatgttaatcgtttttagcttcatacaaagattagggaaatccgctttttaaacctccatatttcgggcttttttaatccatattttatgtttatgctttttcgaactttttttttggcctatgatttgattttgtaatgctttttcactagaaattattgggcataaaaaggtgtcattcgactctatcgtagagaggagccatatggttatattttgaaaagcaaaggtgcagtttacctaaatgtaacaaattctaaaagaaaaagtattttctctgataattttcgatgttttttaccaccgtttggatttaattaattaaataattattttggcctttcccatttttgcagttatttgcctcagtgtcacaagtattggcctgcctgcatccctttgattctttcatcttttcaccgattttgagatggtttgaacagtgcgttgttggacagttttttggccaaattcactctgaccttttaaaaatgttgataaatttcttagaaatgatccaattcagggtgaggtacttttcggttttgtgacccccccccctgagttttctaataaaaagccttaacaaaaaaattttcgaaaaagggggatatcatacgtactattaccaaaaaccatttttgttcgagttcgggtttttcgggttcggcgttcataatttcgccaaacaaaagcaatattcgtggtcagcgccacaaataacccaagaaaagactttttattaaaaatttcaggggggtcacaaaaccggaaagttgatggcagatggtcttttttgccatgttcactctgaacttgaatctattaaaaatgatacacattttgcgaattcttcaaattattttcttagatttaaatctctaaaccagaaatttctgctaaaaaagtttaaatatgttaaaaagctaaactgtaaaaataaatggtaaaaactgggcataaaatgtcaaaaattttgaaaaagctattttcccaaaatgattaaattgagctttaaattttcatgatttttgatcacagcaaaaatatgtgctagaaaaccccaaaaaatgttttttatgagttaaaattcactataattcgaaaattgggcgaagaaaatgtgttttatagcaaactttgagcaaccaataatagaaaaaagtagggcaaataatttcaacttttagatcctggtaacgggcgttgccgattcttaccaatggtaattactgattatttactatcacactgggatctgtctactgtgatcggtcatccctcacccattgttctgttccccacttaggcgctgcttcctccctcctgatcagcgcatttagtgatcacagtcaaacaaatagcattcatcgcaccgtttggtcggcacaaggcatttccagggcaacaattttgtaggtccggcatttaattcctctgtgtgcacttaattttgngaatttgaacatcggaaatgagatgcatttcatcatgttgagtgctagtgcttattacaccataaaataaaatttaaaattttatatttaattcagaaaatcaaatttggaaataatatatttataattaac

SEQ ID NO: 2637 - DNA, 2480 bp, Heterodera glycines
gaattattctgatttttttaattattcccgctcacaatgtgtcgtaatgggtgagtatttcttccggtgacaatttgccacaatgtgaatcaaatgcttggcttctgcgtcggcatggccaaagtccaacggcatcacccagtcgcgcatttcctcctaaaaacaaaatgccaattacgccatcagaaataatacttttaattagagaaacttcggtaatattctgcaggcatttcgccccggacaattgcggccgagaaattgctcctatgcttaaaaatggtttaaaatattcttttcaattttaaatatgatacataaatagatgagaggtgctggtgattaatcaaaacttttatttttttttaatgagataaagctcttttagggattttgagatggaaaatctaattttgacacattcgaaaccaaacccatattcgaacaaaaagtctaaaactcattttcccaaatttcacctctatcaacaaaatggatttaatatgtgcgaattaaacaaacgccagagattattggcacaaaaaattggcaaaaatgtgaccaaaaacaagcctaaaaaatcactttaattttgtaccttttttcgtccttttcacttccgtcacttgttgacacgctggagaagtgttgtttttgctgttcttcttggtggtgctggtgattgtcatggttatgaatgtactgtttgtttgttacggtggtgatactgtcgatctctttggcaatttcaatgctcgtggactgagatacctaaaaatgctggcaaaattttcatgtcatattacgaattcaaaattggtgacaccggtggaaagtatactgtagctgagttggtgaaataaaaaaattaaagttggtatacagtagtagtaattttatttataaattgaagaaatcacattttaattggtgtagttgaaaattttacggcatttttttctttgatgaaataaatttagcatgaaaatttcatgaaattttgttgcggttcaaaaaaatatagcccaaactatgagaacggacgggctatgagatacggaagatagggctgtgcgagaagtgatttttactgggaaccgagaaacgagaccgagaaatgaccccgggaaacgatacgagaaccgagacccaaaaaacccgagaaatttctcgactcgggaatcgagaaccgagaaatctaaatgaaattgattcaaatgtatttttttaaaatcaaaaacacattaaaaagggggctaggtcaaacggaatttttgcgtaggagtctcaacattaaagttaccgcattttttgcttttaaaaacgctttttcgcgcatttttccaaaaatttttggggaacatgagggtccggtggtgccggtaggcgctgccggaaaatttttttgtaattttttagtgagatgataacagattttcaccaaaaaggccaatttttgcatggcaaattttaggtaaactttttttcctcttttcccccttagccggcgacctcccgcccgaaacggtcatccttaacagtgtaaaaactcaaaaatctgctctcgtgagtagacgacgacacaaacacaattgccccttggatatatcgcgggggggggggggggggggttttaaagatttttgtgacagtaacggcatttgtcacctcttttcgccaccataccacgcacagtcaaacggagcagccgaaaagtttgttgatttcttcaaaagacagttgaagaaatgcagtggggataaaaattggttgaaacaatcacttttgtcttatcgctccatcccaattgcagttttaaacaatcgatcaccagcagaactgtttctcggccgaccactccggaccaaactttctcttatgaaaccggaacggccgagtccattcttccgaggcccgtatcaataacgcatggcacaacagtttgataagaagcatggagcaaaaagggtagagtttaacatcggcgacaaggtgcaatttgtgaattaccgtgatggaaaaacattatggttatttggggaagttgtcaccaaaaaagggttaatttttggcattcgttccccacaaattgcaaacagaattgtcactcgccatgcaaacgccatgcgactcacacaagcattgggcactgatcaaacatggccaaattttgatgaagagcccaagaagaacaaatcacccgttcgagcaccacaaattcagcgaaatgtcacaccaacaccaccagccgaaagaacccatgatcaatttgaacagaacgaagaacaagaacagaaccaacagcaaacaccagtgcttcggcgatcagaaagagttccaaaacgtgtccgtttcctgagtccaagcatgacgggacaacggcacaatattcgccagtgatcagacttttaagagagggaggtgttgtgtgggcaatcatggacctattatttatttatatttttatgcattcatttttc

SEQ ID NO: 2638 - DNA, 1113 bp, Heterodera glycines
gcagcaaattgtttgactcgttaattaataattatcttttagtgtaacgcttgagaagttcatttatattcttgcccttgcaactggactcattggaatattggaactctgcacctgagtccacaaattacgcgtagttttggatgtttttggttgctttgtgtaaatcgtttgttgtttgattggttccgtcgggtgcttttagtaatagctcttttcgggatttgaattaagttcgatttatctgaggggtatattatttatactaggttgtgagaatttgtctctgcaatctgcatcataaatcatcagagatttatatatagggcaattaattaaaggtaaattgaaggagtctgtctctgccgtggtgctgatagttaccgccgggggaaaaattaagaatttttaccatatttttagcatattttcattaaaaaattctttattttgcggttttttttcaaaaaaccacaaaaggcctcaaaatttctcaaaaaaccacaaaaagcctcaaagcctcattttgaaaatttagcctcattgacctatcaaaaaacccaaaatgaggctaaagcctcagatatggcagccctggctatagtgaaggtgctgatgtccagcccagaatacgaggaagggaacgagtgagaacgaggattggatttgggggaaaaaggaataagccaaaatccgggccctggataaaatggcctccccaaattggtaatcccttgggcgcccactagatcgaatacgcgtgcggggatgggcgataaggagtaaaatataagataaatattggccaatcacataaaataataattccgccgcgctttgctctcggctctcgctcgccgattaactgcccactcaactgactccttatcgagagaatgctcccgattaaatagttggacttatggaacggaaaatggaatggaatagagcggagatatgtgcttgggaaagagattaaacggatgtgattaattgcgctttacactatgacagaattttttcaacacccgaataacataaaactctcgaatattctcaatgaatcgagttaaacatttgttcctcagattttccttcgttgagagacaattt

SEQ ID NO: 2639 - DNA, 2033 bp, Heterodera glycines
  unsure (1)..(2033): unsure at all n locations
caatgtgaatttttgnttgtaaactgtctaaaatttcncnaagcactcatatgaaagatttctagaaaatgtctagttgagcacactacgtggagctcaagtagagttcatcactaaaatataagatattcacgcaagtgaacacgacatttgcccgaggggaatgtgaaaagtgctggataaagtgtcaattttatgtcgaaagcctagtgcatataactcagcgcctactccatggattgcagcgcttttactcttttctgaaagcgcttcaaagcagctttcgaatggtgtgtctgatttgtttggatctcgaattatcgcagagatatactcaaataagtcagcaatgtttattttttgaattaccaggtggtattctgacaaaataattttttcaatgtgaatttttgtttgtaaactgtctaaaatttcccaaggcactcatattgaagattttctagaaaatgtctagttgagcacactacgtggagctcaagtagagttcatcactaaaatataagatattcacgcaagtgaacacgacatttgcccgaggggaatgtgaaaagtgctggataaagtgtcaattttatgtcgaaagtctagtgcatataactcagcgcctactccatggattgcagcgcttttactcttttctgaaagcgcttcaaagcagctttcgaatggtgtgtctgatttgtttggatctcgaattatcgcagagatatactcaaataagtcagcaatgtttattttttgaattaccaggtggtattctgacaaaataattttttcaatgtgaatttttgtttgtaaactgtctaaaatttcccaaggcactcatattgaagattttctagaaaatgtctagttgagcacactacgtggagctcaagtagagttcatcactaaaatataagatattcacgcaagtgaacacgacatttgcccgaggggaatgtgaaaagtgctggataaagtgtcaattttatgtcgaaagtctagtgcatataactcagcgcctactccatggattgcagcgcttttactcttttctgaaagcgcttcaaagcagctttcgaatggtgtgtctgatttgtttggatctcgaattatcgcagagatatactcaaataagtcagcaatgtttattttttgaattaccaggtggtattctgacaaaataattttttcaatatgaatttttgtttgtaaactgtctaaaatttcccaaatgcactcatattgaagattttctagaaaatgtctagttgagcacactacgtggagctcaagtagagttcatcactaaaatataagatattcacgcaagtgaacacgacatttgcccgaggggaatgtgaaaagtgctggataaagtgtcaattttatgtcgaaagtctagtgcatataactcagcgcctactccatggattgcagcgcttttactcttttctgaaagcgcttcaaagcagctttcgaatggtgtgtctgatttgtttggatctcgaattatcgcagagatatactcaaataagtcagcaatgtttattttttgaattaccaggtggtattctgacaaaataattttttcaatatgaatttttgtttgtaaactgtctaaaatttcccaaatgcactcatattaaagattttctagaaaatgtctagttgagcacactacgtggagatcaagtagagttcatcactaaaatataaaatattcacgcaagtgaacacgacatttgcccgaggggaatgtgaaaagtgctggataaagtgtaaattttatgtcgaaagtctagtgcatataactcagcgcctactccatggattgcagcgcttttactcttttctgaaagcgcttcaaagcagctttcgaatggtgtgtctgatttgtttggatctcgaattatcgcagagatatactncaataagtcagcaatgtttattttttgaattaccangntggtattctgancannatattnntttcatgtgaattttttgtttgtaactgtctaaaattt

SEQ ID NO: 2640 - DNA, 1202 bp, Heterodera glycines
  unsure (1)..(1202): unsure at all n locations
agcgcctactccatggattgcagcgcttttactcttttctgaaagcgcttcaaagcagctttcgaatggtgtgtctgatttgtntggatctcgaattatcgcagagatatactcaaataagtcagcaatgtttattttttgaattaccaggtggtattctgacaaaataattttttcaatatgaatttttgtttgtaaactgtctaaaatttcccaaggcactcatattaaagattttctagaaaatgtctagttgagcacactacgtggagatcaagtagagttcatcactaaaatataaaatattcacgcaagtgaacacgacatttgcccgaggggaatgtgaaaagtgctggataaagtgtaaattttatgtcgaaagtctagtgcatataactcagcgcctactccatggattgcagcgcttttactcttttctgaaagcgcttcaaagcagctttcgaatggtgtgtctgatttgtttggatctcgaattatcgcagagatatactcaaataagtcagcaatgtttattttttgaattaccaggtggtattctgacaaaataattttttcaatgtgaatttttgtttgtaaactgtctaaaatttcccaaggcactcatattgaagattttctagaaaatgtctagttgagcacactacgtggagctcaagtagagttcatcactaaaatataagatattcacgcaagtgaacacgacatttgcccgaggggaatgtgaaaagtgctggataaagtgtcaattttatgtcgaaagtctagtgcatataactcagcgcctactccatggattgcagcgcttttactcttttctgaaagcgcttcaaagcagctttcgaatggtgtgtctgatttgtttggatctcgaattatcgcagagatatactcaaataagtcagcaatgtttattttttgaattaccaggtggtattctgacaaaataattttttcaatgtgaatttttgtttgtaaactgtctaaaatttcccaaggcactcatattgaagattttctagaaaatgtctagttgagcacactacgtggagctcaagtagagttcatcactaaaatataaaatattcacgcaagtgaacacgacatttgcccgaggggaatgtgaaaagtgctagataaagtgtcaattttatgtcgaaagtctagtgcatataactcagcgc

SEQ ID NO: 2641 - DNA, 2353 bp, Heterodera glycines
  unsure (1)..(2353): unsure at all n locations
ggcgtntgggctcncatctgaccccaaatcaaaaaattctttttcttcatcactttgatctcctcttttgatcagtgcttttaacccttttgtaatctcaactttagttggacgattttgctgttcatctcgcaggtggagataacgtgccaattcctggttataatgaacattcttcgccgtcacattttccctccttctttttgttctctccaaggtacgttgcgcaaagcccaaattgatattccccgaatcattgtttgttaaaccatgataaatttcatcggggacgagaataaattttgatgccataataaatggttagttgtcagattttaagcctgaatttatagcggtgcgcgccaaatcaatcaaaattggagtgagcaacgccgcgaacactcctccaagtccgctaccggtttgaactaaaagcttgcgtgctcctttctctgtctttctgcgagcaagagtccggacaaagcttgcatacggtaacaaacgctttctttgacgtgtcgtcatcttgaaacgcgaacaaagaatgttcaaacaaatttcaacaagtgttagcaattgatctgctgttgcgcgttttaaaattcgttttttgttcttgcacgattttgtttttgccaatgaacgaataaaatcaatatttttatgaacaatatttccaatttcacaagacaccatttttgggaatgaaaatgatcttttctccatcttcttcgtcctccttaaatatcccacttcgaagcctcagcaatgggtttgaggcagcatgcatatcgatcagaaggtatccatagggtttattggtcgcaatacggtatgccgagagaaaataatccagtttcccgggaaagagttgaactccaatattccgaacagcaagtgctgagttgggggcccgcattagtaccaaatattgagcgttttgtcttgccactttaatccgtctttcaaacaaattttgggtgacaaaaacaacggcaaagttctgatggtgcgatttttttgtgaataatgcacttaaataggcctcatcaatcgatagcaaaaggtcgtcaaggattataagcagtggtttaggtaagcgtttaattaactcttccggagggactcccgaatacacactaataccacatttttggagggtaggcacaatgctggacatttcaccgaatgcgtaaagaatggaagcgggcttagggtcaataagttctgaggactcggcaataaacttgactagaaagctgctttttccactccccgatggaccagaaataagcataccgaagggcatttttagctttaattctttatctgtgtaaaattggtttccaatcatgataaatgtttaagggctaaatcaaataatcacatgcttttaaatactttattatttacgggtgatcgacgcaattgctgtcatttcctcatcttccatatccttctttactttcttctttggctttcttttctgtgaaacgtccatgttagtcgtggcagccgacacgctctcgagaaattcatcgagaatttcatggtctgtctgctccttctcctttttggttgtagtttgttgttgttgttcactacttattcccattgttgcggccgaaacagctgaaaaaaatcccgaggcatcagccttgttcggttgttcttttggaacggctgtttgacccaaatcaagccccgtcgtagcagctgaaagagaagcagcgaattcggaagcatcggaatttaattgttctttttggcttggcttcggtggtttgtcctgttctacttccatcccatggttgctgccgagatgggagaaaagaagttggaggcatcaactggctgttgtctcggcttaggcttgggttttagatattcagcggtcatccccatagttgcggccgaaatgggtgaaaagaaatctgaggcgtctgccctctgttgtcttagtttaggcttctcgttttttgttcaatgtccattcccatcgtcgccgctgaaattgcaccaaaaaattctttgccgtcgccttgtcgcgtttggtgactcgcaatgtctaatcccgtcgttgctgccgacacagagttgaagaattgatgggaaacacgttgttccgcgtcttgatgactttcctgctttcttttcgggagctgaggcggtggaggaggtggaggcaaatggtacaccggagtcggggtctgggtgcacgcattggagcgaaaaccgtggtcaacgttgaaaacccgtcctttgtttcgaatctgttgagtaataattgtgataaaacaaaacacagaaacaaaccttgaaaaatgtgtaaccaggcaaatcgtagatcaca

SEQ ID NO: 2642 - DNA, 2009 bp, Heterodera glycines
  unsure (1)..(2009): unsure at all n locations
cagtttaggcttctcgtttttttgttcaatgtccattcccatggtcgccgctgaaactgcaccaaaaaattctttgccgtcgccttgtcgcgtttggtgccgcgcaatgtctaatcccgtcgttgctgccgacacagagtcgaagaattgatgggcaacacgttgttccgcgtcttggtgactttcctgctttcttttcgggagctgaggcggtggtggaggtggaggcaaatggtacacgggagtcggggtctgggtgcacgcattggagcggaaaccgtggtcaacgttgaaaacccgtcctttgtttcgaatctgttgagtaataattgtgataaaacaaaacacagaaacaaaccttgaaaaatgtgtaaccaggcaaatcgtagatcacatcaaatggcacaaaacgtgggctaattttgaagcgtgtgcaccaaatggtaacgccttccttggaaacgcaccattccgtctcacattcggttgccttacattctcgacatttgccaagaatatcgaattgaaccgttcgtggtatcgcaattcgttcactgctaaccgtaatgccgttgttggtttgatttatctcaaccaccggcaaaatgttgtccatgagcgactttttgtcgtggaggttgatactcatattttttttgaaaatctgatcaaaatgaaactaaatttgtttgtccccatttatataccggaccgttcatccttttttagctttatataatttgcataattttttgagatggcccctttttcttatcagcgtaataaatattgtgagtaggtcgagacgcgaacggagaagagcaaacatatgccgtcatcgacgacgagaatgcccttctcattcatttctttttacattttttttttctgcaaattcttccaatggctcgccaatcgacaattttaccaatctacaaacgacaatcgcgaagacagcagcaacattttcatttcgacaatgtaaaaaaaattttttgaattcaaaaaataattttatttatttcaggttttggtgtttgatggaggaagccgccgacagttccaacttagctggttctgcatcgcactgatcgtcatactttttgttgcctggttcatttggtaagtgaataatttttaatttacaaaatttctatagttaaattttaagaaagcgccgacggagacaatccaaatggtgcatgaaatggatgatgagattgatcaaaaattatcccaatttggttttttctatttaataatattttaatccatttctctcagggcaaataaagtttttttttttatatatgatgagttttttaatttatttgctcggaaaatttcaaaatttaaatgtgatttttttcaaaaatcatcctttaatctttttttccttttttttttaaattctccattctctcttcattattcctcattcttttggggcgctgctcatttggcctccaccccctgcaaaaaaaaaaagattgatgaaatgcattttatgcccacaatcctctcgcccccttcccataccacttcggcgctcgcctcttcggtgcgacgctcgggagggtccttcgagacctggacaaaagaaaaacaaacaaaatatttcccttcccatcctcccccccctctctacctcctccacaccgacgcgctcaacgcgcagcccgaagcgctggggcgactctcgcccagtgcgacgcttcaaaaaaaatgttaaaaatgggggcagaagggaaaaggcaaacattacctcgcgcaccacgctgaacacctggagaggacgcggcgcattgtcctcagtggcaccatccggacgacgaggacgacgacgacgaatgccggcgccacgggccggcatgttcaaaaacatggcccaaaaaatacacaccttaacacataaaaataattttaaaatgaatgaaaatgaanaatattaaattaaaataaaattaaatttacctgggcgaggaaaatgaagaggaaaagatgaacac

SEQ ID NO: 2643 - DNA, 7802 bp, Heterodera glycines
tggttcggttttatacttttttgggagctggtgtcttcctttttgaattttccaatataatctgtatattttttcatcataattaaaatgaatataaacattttttcgttaattcttatgttcagataattttttagtttttatattatctttttaaaaataattaagtcatttatttaatgaatagaaattaaaaagattttactaattatattattttaagcggagaactgttttaacaagtaaaaataaaaattttaattttcattcaaagatcttaaattttccgggagagtgttactacaaaataaagtatgacataaccataaaataaatttaacgaaaaatctttggctaaactatttaagaattttcaatttttttttattaggaatttgtgcatacatatgttattaattatagtcaggttagttaaataatatttccaaaaacattattaaaaaaattaattaataataattttacagaaaagaaaattattttaattgggtgagcattatttttttagaagaattataaattatgttaattattttgtattgattattcctctctcttttcattaactaaaagtctaatatgtttttatagaaaaaaaaagatttacctttgctcttttatttatatatattaaaaaaatgaaagtcgttaaataatacattatattcttataaaggataatagctttatatgagaaataaaaatatatgagcaatttagttaaattattgtatttctgatagtataatataaataatttgtatacgtttaattttttaatttcagcatttgtcgaccattaaattaattttaaaatatttgttacctaattatttagtccctaatttgagttattttttcaatgtttaaaattatttgttgatttatattcattaattgagaaaattaattcttttgtgatttattctcatggtgaatctcgtcctaaaatttaatgaattgagttttaaccttaaattaatatatttttttttttaatatgtatagattcattaaataatttaattctatgattctatataatattaatatggttttttaatcccattaaatttttaaaaaaataactatttatttcttatataatgaaattgtatttattttttgcttttaatttttgcttttattatgtttcctcattcgcgcaatgacttgctgaatttgattcgctttcggagattcattctaaattttgtttgtttcattattattatttaaccaaggccccaaggggcactgtgaaagcgccggggccgctttcaacactacccacctggatttattggttaaacaataatcaaataaaattttgttcactttgatggtccgtttgtgagtcggcattccagatggagtttcgttgtgcaccgcctccatgttgaagtcggtgcggaaattgtgcatctcctcgtttattgattatactttaagtttatggaatgctaaataaggatataaaaaaaatatttgtattttaaatactcattaatatattctctgccaatttgaattttatggcccgtttaattggatacaataaaaaataaaggaattttatatataattttaataaataatttttaatcaatgattggttgatagtttcacgaaaaattatttatttaaaatatcttttaatttgtgtctatcatgtcatttatgtaaaaagaccttttagtctttatcatattataatttgggtctatcacagtgatttccgtaaaatattttcgcttttccaataaaatttttaacgatccctcaccttcttgataaaatcgcggcctttatccagaaattacttaattaatattttttataaattatttaaattcattttttgttgtatttgatagataaatgaacttttgactcaaatgcatttcttttgacaatttatacacaaaaatttatatttatgaaaaaagtaccttaattattttggtcttttaattaacattttaataatttttttatttttcctggctcttacttttacaaaaaaattcaaaataaatttaagaacataaactatataatcttttgtgaaattttgacatattcctttcatatttacttttttttactatgagtaatataatagaataattcatctaattgctgataaattgacgaaatatgcaaaatcctgctgtacagacttgatgtctcattaataaaagtagcggctatgacttattaatttattgttttggaattaaattttatgatataatattattatacaaacttttcgattgaatatatattctttgttattagtgaaaagaagtgtctgtcaaaaatatcagtcagttgtttgccaacattataagtgaatataagtttaataattttaatagttattcatttatacaaattttttacattgcaatacgtctataaataaacaaaaattattatattttaatattgtttgccgttgttgctataatcatgatgttcgctacataaattagggacaaaaacgctatgattgtgataaatatttttgcaattgtctaaataaatttaactgttttttcatatttttggtagataggtttaaagaaaaatgaaagattcatcatttattggattatttcatgaatcatgatataatataattaagttgtatttacttttatttataagtattctattaaaagtgcacttttcattttgtatgttaatttactagcacagaaccgacagttcacgcacccgctattaaaatatatatattaacattttacgtattttactttagaagcaaaaatttaaaaatgaaattaaaattacaatctttaatttaaataaaagaaaataaatgatataatacataaagatttagtaataataaaaatatatgtatactcataaaaagaatatttttaaattttctaatttcatattttcaaatataaatttcttcattatcataaatttgattataattaaataaaaaatttattttcataagtcaataggatttaaatagaagatataaacaaaaaattataaaaataaaataaatacatgaagaaataaaattggtcgaattcacccatttgaagacggaaatgggagtttggtcgtgaattgaaaaaagaaaagttaatgagaaaaaaatattccaattaaaaaaaaataattaaaaaaagaaaaacaaaacaaagcaataaaaaggtaatttataaaataaaagcaaaaatgttaaataaaattcatcgcaacaaaaatataaaaaaaaaccgaagcagcaaaaattatcactatttttcaaataaattttcaaactttcaaatctgtctataaaaggaatagatttttcacttatttgttttatttcattaatcaattctaaattgaaattacacattattttttaattaaagtttattttatttttgtttatatgagaattattttagtataaactataaataggctcaaaatatcattctttactatttattggataattttttcgaaaattattaaaataatgatataacttaatataaattagtgaactcaataataacttatatattaatttaaaaattaaaataaaagtaaaattatcattattttttaaaacattttttaaaacaaatgaaaaatttatgttgttctatgcccatgaatgaattatatgttaatgattaactttatatctacattttacttttccacggtttcttttataccacagcttattatttaataatattttaataattttttacttttttgattaaattaaaatttattagcattcttttatctttagcaatttctcctataccctttaatatattcctgataaatatttattatttaagtaaatttttcattcaaaattctgcaagttcatttttttctattttaattctcaaactcgtaaactcgcaatattatctatgtagttgaatttgtgctaataaataattatttaacaatatttttggttatagttttattagtaataattttcatttgatttgtttttatacgaaaaaatgtttattaaattcaaaatttatgctttataaatttcaatttcattttaatcaagtttatatttatattattataaataaatataacttctttaaattatttttgttatatttgttgtcatgtaaaaaagaaaatataaatattattttttactaaattatattttagtagcaattcaaacaaaggagtagttaagtttgattacatttttttacaatttaagaaaaattacttaaaccttttttttgtgtaatttttaaacattttattttcttttttttttaactgattgccaattataatacgtttcattttttaataattaattgtattaattctatatttttctaattttacttttaattcctttcattaatttaattatttcagaacaaagaaatatgcattgaattgcattaataaatgatttcacaatgataatttaacatttgtttttaaaaatcaaaaatcagaaaagagagcatgattttttacaatttcaaaatatacaaaaaattaaatactttttatttatttaaaaagctattcataaaaattctgcaagttatctgaatgctatttctttgcaagcactacataccattgtgaaattaactatttaagcaattcaaagcatatttctttgttctaaaataattaaattaatgaaaggaattccaaaagtaatatttaactaaaaattaaatgtactgatcaatatttaaaaaaatgctgtattttaaaattataaaaatataagtttactaaataataaaaaaaataaagaataaaatttatttattcaaattaggaatacggaagacaagattcatttaaaataaaaaaggctaattttgcgttcgcaaattatcgactaattaataattatataatgaaatcaaaaaaacattaaaataaaatctaagtgaagaattttaatcacaataatactaaaaaatacaattacataataataaaaattttttaataattataccataagttcatttaaattgtgatcctttattaaataattggtcttgtctttatatttatttactttaatttaataaattttaatatcggtgattgttaaaaatgctataaaaacaacacatatataaattccttggtcagtaaaggaaatggagttaatttatttattttttctataattttttagattatttttaaagcgatatatattatggtattccatgaataaaattaaacataaaaatttaaaaaagataaattttttcatggatttcaaatacactatttaatctaaatttattttattaatttagtaaattaatttttagtgaataattattttaaaattatttttaaatttaactacattaatatgcagttaattaggtacaattattcataattttagttaattttaatgaatattcaattatattgcttattttaataatataattaaatataaaaggttgattaaatttcgtttataaattgtgaattaatatttttagaataaattaaatttgttttaagtgaatcttttttaatgtcatattctcatgatccatggggtcgctggcggcgcgcggcgcttagcttatcataaatgcattttttatttcttaaattcttgataattaaatgcaaatcgataaatttgctttgtgctttgaatatttaatttttctagttttaataatattattcaaaaaacgttttaaaaagaaaacatttttatttaaattttcttgacaccattcaagcatttggagcagggctgcacgcaattacggattgcggattacggatattacggggttttgggagttacggattacgggttacggatttttgggatttttccgtaattttgatccgtaatttgacttttggattattttttcgagacgatttcttgtacgattatttttataaaaaacaaatttttctattttttatttaaagggctacccatatttcgatttatttaagaattaaaatagatttataattttttatttgttgttgttaaggctatttgggtagttcgcctagaaaatagaggcatcacttttttgtcacacctatttttcacgcattttatgaaaattcataaaaccttagccaggtgaggggaggaattccccccttcccccgcccgaaatgaaaaattaaaaatttttacaggaaaaattgggacttttaaatttttttgtcgatttttcttaataaaatcattaaaattaaaaaaaaatttgcccggcggcacctatcggcaccgccggaccacgatttgcgtaaagaatggaagcgggcttagggccaataagttctgaggactcggcaataaacttgactagaaagctgctttttccactccccgatggaccagaaataagcataccgaagggcatttttagttttaattctttatctgtgtaaaattggtttccaatcatgatgaatgtttaagggctaaatcaaataatcacatgcttttaaatactttattatttacgggtgatcgacgcaattgctgtcatttcctcatcttccatatccttctttactttcttctttggctttcttttctgtgaaacgtccatgttagtcgtggcagccgacacgctctcgagaaattcatcgagaatttcatggtctgtctgctccttctcctttttggttgtagtttgttgttgttgttcactacttattcccattgttgcggccgaaacagctgaaaaaaatcccgaggcatcagccttgttcggttgttcttttggaacggctgtttgacccaaatcaagccccgtcgtagccgcagaaagagaagcagcgaattcggaagcatcggaatttaattgttctttttggcttggcttcggtggtttgtcctgttctacttccattcccatggttgctgccgagatgggagaaaagaagttggaggcatcaactggctgttgtctcggcttaggcttgggttttagatattcagcggtcatccccatagttgcggccgaaatgggtgaaaagaaatctgaggcgtctgccctctgttgtcttagtttaggcttctcgtttttttgttcaatgtccattcccatggtcgccgctgaaactgcaccaaaaaattctttgccgtcgccttgtcgcgtttggtgactcgcaatgactaatcccgtcgttgctgccgacacagagttgaagaattgatgggaaacacgttgttccgcgtcttgatgactttcctgctttcttttcgggagctgaggcggtggaggaggtggaggcaaatggtacaccggagtcggggtctgggtgcacgcattggagcggaaaccgtggtcaacgttgaaaacccgtcctttgtttcgaatctgttgagtaataattgtgataaaacaaaacacagaaacaaaccttgaaaaatgtgtaaccaggcaaatcgtagatcacatcaaatggcacaaaacgtgggctaattttgaagcgtgtgcaccaaatggtaacgccttccttggaaacgcaccattccgtctcacattcggttgacttacattctcgacatttgccaagaatatcgaattgaaccgttcgtggtatcgcaattcgttcactgctaaccgtaatgccgttgttggtttgatttatctcaaccaccggcaaaatgttgtccatgagcgactttttgtcgtggaggttgatactcatttttttgaaaatctgatcaaaat

SEQ ID NO: 2644 - DNA, 3123 bp, Heterodera glycines
aatggttaatgacactacttaatggttaaattgctttcatctcccaaaagcaaggtttatgcgcttttacctgttcaacaccaaaaaacgataaacgaactgaacacacaacccaaacattgaaaagaaataaacgattagccaactgtcgaacagcagttctttaaactgagccgaaagtgaaaaataatcggagaactgcaaaacggaaaaattcatggaccaaccattgtttgatagagtaacctaaaatattcatttaggaatcatatttaattaccaattaaatttgtatgttaaatacccacattttgcgacagaaaggaaagaacagacaaaacaatgtcaacaagcgcagtttggagcaaaattcgcttgtacactttcatttcctttggcgatcgcttcacaaccaacaaaattaaaattgcatttaaacacaacgccagaaacaggctgattgatgcattaagacgatgaatttggattagcattttaaaggttgtgaatttttggatgattaaagtcgatatttgaattctaaaatgaaagaaatgttaataaacgtcacttgtaatttgttcgctaaatccacagtgtaagaaaatggaaaaataaactcataactttggttgaaaagtaaataattttcaattcttaataaaattcggcaatatatgaaaaatgcgaattttgtcaccatggaaattgaaaaactttaaataatgacaacgaattaagaatatttgttggcacttttttaaaacgggtaagaatggcgagtggtctgatgagagaaataatttttgaaaattgagagaaaagggaattttttgggaagaaataattattttaatcagttctttttagggattttggaatttttcagtaaaaaaaaattcgtgttcgtttttcgtattttcgtgtttttagggcgtttcgtgttcgtgtttagtattttatttttgtttcgtatttttcatttttcgcattttatttttcgattcgcaacaaccctgttgtagataatgattctgagcttttcgattcccaaactaaatgcctttcttcatattggaatcacgcccgactcaaaattaggcatcatttaaatgaaacacataaagcttaaaattcccaaagacaaaaattttagaataattgatttggttggcagaaatatcaaaaaattgtattacaacaactgcagcaaaatgtttacatatgtacgaatgatgtaacatgaacaagaatcgcattcgaagagagcactgccctaaaaagaagaaggatggatttttaaccataaatgaaaatatccagaaaatttgcttttcaatgcaaaattcaggcataaaaaagcctttatgaaactgagattcggattttttgaattgaaaaaccgaaattctgagtctgacgggtcaaagccggaaccgaaaattatatcatttaacgatttggacaataagctgacggattttcttcaaatatggattttgagaaaaataaattaaatgcctttcttcatatttttggaacagactactcttttgcaaaagcatatcttgtgaaaagttctgaccttttttaaagcagatacatcaagccaaaaatttcctggtagcgcctgttggaactacaagactaaatttttttttgaatttcaaaaaaatcccaaaacctttctaaatagtttgtggcaaaatatattatgaattttagtgaattcaaaaaataataaaatccgttgaaataggttatttttattttgtaataaagtaagctataaatacataccgttgaaaaattatgttaaaaggacaaggaatgaatgaaagacacaatctttattaatggcacaaagaaaaaattaatatttttgagtgcattccgtgttcattttacactatccgttagggttaatttctttttcattgtgccattgtcaaaacaattgcatatgttatttcttgtccattaaacacgcgaatatgtttttcgaaacattgcatgcaattgaatctttcaattgtcagccggttaggtcataaatgcaatgtcgaaggtatttcgcagaaatttttgagaccgcatctgggtgaccgttgaaaaattatatttcgaatttttttttttttgccttatttaaaaggacaaggaatgaatgaatgaaagacacaatttttggtcacaatgaaaaaataatgtgtatgaaggattccgtgttcattttaccatatagaggagatttcaagtgatggtggaatttagagaccggaaatttcaaatttgcggatcccgctgcgggattggtactgaaaatttttgcgggacgggatcccgcaggcataaatcccgcaaaatcccgcaaatcccgcatttaaaatttgcgggatcccgcgcgggattgcgggattttggaaatttcgaaaaaatttagaattaaattttgaaaatctctaaaaaaactaaatatacctggccattttaaaaaagaaatttttagaggctggcggtatacgtgaaaaggggttaatgggttgatcaagatttttaagggtcagcagaaggttggagagagatcggcggacaaattattaatggggtcaatccataattttaacgattttatttttaagtcgttttttgcggcgcgctttttgaaaagattttcgggaacagagtgtccggcggtgccgataggcgccgccgggaaattttttttgaaaattttgtcaatttcttaactgatcttgtacaaaaaatgaccaaatatcgcacttttggactcaatttctgccgagttaataagtaagagccggtccggtgctcaactgcctattgttgcgtcataaatatttggaattaaaaaatgaaaaaacaaatgctttggttcggaacaaacctgaaaattttggccgtgctaccgggagcaaacattcccagtttttatgaccccccgaatcctgatcatttttcaaaaattccgtaaaacccaacgggaaaaattgcgaatgctatgttttttttagaaaatatattttattattaatttcacttctctaatgtaaatattggttcacatttctttaattatttaaaagattcccatcgtaatta

SEQ ID NO: 2645 - DNA, 1933 bp, Heterodera glycines
  unsure (1)..(1933): unsure at all n locations
agggtcagcagaagggtggagagagatcggcggacaaattattaatggggtcaatccatatttttaaggattttattttttagtcgttttttgcggcgcgctttttgtaaaagattttctggaacacagatttccgccgggcccaaaaatcccccccccgcggaaaaatattttttgaatttgtcaattcttaactgatcttgtacaaaaaatgaccaaatatcgcacttttggactcaatttctgccgagttaataagtaagagccggtccggtgctcaactgcctattgttgcgtcataaatattaggaattaaaaaatgaaaaaacaaatgctttggttcggcaccaaacctgaaaattttggccctgctaccgggagcaaacatcccagtttttatgaccccccgaatcctgatcatttttcaaaaattccgtaaaacccaacgggaaaaattgcgaatgctatgtttttttagaaaatatattttattattaatttcacttctctaatgtaatatataggttcacatttctttaattatttaaaagattcatatcgtaattatcattgacacattaccgccaaaaaaagccgtccaatttttgttataaaactggtaatttcttcccattctcccccttttttggctctcttcaatttttgagtttaatgaattttcatttttcttttatcaatttctttttttctccaaacagcacgaactaatttgcccatttaaaatataataaaatttaaaaaattatgaaataataaaatttttaattcggttgcattgggcgaatttgtcgcgagaaaaaaatgcgatggtgaaaattttgaacggcggacggagcacagcagcagaagcgcaatatgtgtgggagtgggagaaaatgtgaaaatgggcaaaaattggggaggggcggagaaataggaaaattgggcacatcgacgagtgatcgatggatgggcgacgaaatttccattttcaataatattttaatgcgatataataataataataatagcaacgacacgaccattgtgtgttttgttcatccctaatcatccccagcctcattcttattttgttatacatattttatttggtttgtaaaaaaaaaattaatataatttaattatttatttaaaaattaatgaaaattacaaaattttatgaattcccccgtcagtgaattagaaaatctaagactaataaaataaacgtcaagagatgtgaattaaattaaacaagtttattaaaaataataataaaatgaatttacggtttttttccaaaaatataaattttttttttttcaatgtttttaattgtaactttcttttttatttctgtttcttttttgcaaataacaaatgagttaattaaaaaaacatccacccctcactgttttcatcacaaatattgcgctattttcccgttgattatttttctgtaacgaaaagattttaaatcaaatgcaaattcattgttgaaatttatttttgtcattttttgtccaaagtttgcctaaaccaaaagcccatttaaaccatcccttccctcggcccctccattttcgtcatttttccaacaaaaatcgatgattatttttgattttttattttttttcgcaaaactttaacaattctcatagaatacagcagttctccgcgctcattcgctttgaatgaatgaattcattttgttgtgcaaacacaaaaaatgttcacaaattggcgttggccaaaagcacaatcatcgcataaattatacattttccttantatatttatgtccctaattaataaataacctgngtaattanatggacatgctgatttagcgaacaaattgaacggacttacaaaattaatatttttattactaacttcacattctccatataattacacaacttactaatta

SEQ ID NO: 2646 - DNA, 3953 bp, Heterodera glycines
aatttttgatggtttgatcaattttatgcgtgtttactcccattacttatttctcaatttcacatgattgttgtaccgtcctctgtttgacgcattcagaaatttccgcgtgggctaatttccgttcttgacaatgtcacgtcatcaattgtcacgttggttttgtttccgcaattgatgcagtgaaagtatttgaatttgtccgcaaatgtcctgtgctctaagcacttcccgagtctcgtaattagctaattatcgaatcagtttttcgttgtcaaagagtcctcacactttttttgtctcatgtctaaatttgtgcagcttttccaatttgttggttggcgtttggttcggtcagtcatcagttgaacaatggaattgtttaaatttaatctgccagtggtcctatcagcgatctctgcccgctgtttttgttgtctcgccgcgacgcattcatcgtcgctgcaaaatcattgctgtcatttccctatgtaattagctaatcagtgaagtgaaaaatggcttaacgcatgtggaaggccattaaaggtgtggtgataagaaagtgtgttgtgcaatgaatgcgatgataagggcaaaaagcatttaatttctctcattagttgttttaatataatttgctttgttcttcgccctaatcatttttgaattctttgcaagttttaatttttggcctttttcacataagcgaaaaatatgcctttctctcgacttgttgcttcataagaattttttctgttaaaatttatccgttaaaatgattaaaattcgtggctggagtgtttcctctctgttggatgatcactcctctgccatccgatcggctgccaacagtggtgcctcgtcctcgtccgctttgtcaccggcggttggcattaatgccaccggtgtaaaaagtgccgctgtttcgaaaaccgctaaaattgatagaaaaaagtgctgtggtgatggtggtgataaattcagaaagaaaatggattggttggaaaaacaagtaaaaataattaaaatcaaaatacaaaatattctcatgtttataatctctacataatattatttattttatatttttaagcattcattttttaatttctatttcctttcttttttataatgaaattttattaattttaaattactttagcgagccacacaccagtttttgcttgctaaaatggtgtctatgaatattgtttcgccaaccgccgctggtccaaaacttccaaaacacaagccaaagcttgggaaatttatctatttggtgggatttctttttatttcttaatataaattaaaatttggtatttataataaaatattcaaaacaaaacaaaaattaattttaatgtgccaattttatgctttcagctcgcttttattgctgtcattggtggttttttgtttggttatgacacaggtgaaaaacattcttctatattgtaaaatatgataaattatattctaaatttcaggggacttaaattaaaacagtaatttattttttaattgaacaattcaaattaaggcattgtctccgctgcgatgctttacgtgccaaaaaattcggacctgaagccgatgagcaacgcatggattgggcttattggtgaggaatttttgttttagaaaattaaatttttattatagtttcaattacgccgggaatggccggggttggagcactgcttgccggaaaagcatcagacatttttggcagaagaaaagtaaaattgtttaaatgatggaatttaaaaatagtagaaatttaattgattcacaaaatcttttatttaaatataaaacataaaaattaattaattttcctttccagatgatcattctttccacaataattttcacatttggtgcaattgtatgtgcaattggtgtaagcaaatggattttgttggccggacgaatttttttagggatagcaattggtattatatcttaataatataataaaaaataatattcaatttgtaggttttgcctcaatgattgtcccaatttatgttagtgaatcctcaccagcgcatattcgaggtgtgttttgtattaattaaatttatttatttaattcttatattatttttaatttatctttaaatggttgttataatataatagaaatattaaacaaaaattgagagttcgagtgatcagccagctttcagatgatgatcaacttttgtcgtagtagcagcaaatatttttgcgtttgcgttttcttacatgaatccgttgaattgggtcgagaggtaatcattaggatacttattaattatcatctaaatttaataaaaaatctgtatatgactattggtcggatttgccgcaatttcaagtgaaatgcaatttgtcataatttgttttttgtccgataaccttttgaagcatccaatctgccattctaataaaagtgtgcctcattcaattctataaatgatatatcatttgacgtctctcggtctgtaaatgccgaattcgaaagaattttttagacaaaagatgggtaaactccaaatgaggggaaccgttttagattttgttgaacattatgcgttttacccactcgaaggttcagtctcgaaggcatttagcctacccatttttgttccttaaaaaggatccctcgtttggttttcgaaccccactttgatttttgtcgacccttctctaaatagtgctcttttttgtaatatacatatgtccaacatgctttaataaaaatcaacaagctaagtaaacgctttaatgtttttatgtaataaatagggccgcaaatttagtgaaaaaacttgtttgctcaattgttttgaagaaaggagctcaaaaaacgcatttctgcattaaaatttttcgattctgatgtctttatcggtcactagaaatcactattttggcaaatgtgattgaaagtgtacgcacacaaatttgtgaatatgcaaaattcacattaaaaataggcgctatctcggatccaccttcctcgtcgtcaattaattttacagtatctttttaagtacagtaaaaatgaaaagcattatggacacaaaaaatgaattaatggcttaaatctttttcgtatggcctgtaaaatccgtcactacaaaccaatttcaaaattgcattcactttcatagactgtaatttaaatgaaaatatgaaaaaaaagtaaacacttaaaataaaaacaacatctaaaaggtcgctattttgttagcacacactaattttgcgaataaagtccttttttatttttatgtgttgtgactaggcactttcaacccttatcttgacctatctatgccttctccaactgaacatctcgcctatttgcattaattcttatctcgaatctgttcacttaaatgggttctacgcacaccgtttcaattttggcctctcagttccaaaaagatttgcatgtgtggcgaagtggtttttgtaagatagtaaagggacaaagggtggtggttcgagtccgttgtgcaacatgaatatttttatttatttttgtccaaaatattaaaaaatgacgaattttgggaattatttttgaagggttttcccaaccaaattggaaaaacttgatacagtcatggtcataagtgttgtcccatcatgctttgaaaaaaaaattgcgtataaaattgtcattttccaatttcaacagataagtagcataccattggatagcattttttatgggctttacaatgataccatatttgcattttcaaaaaaccgcatgactctatgacttataccgtctgaggtatgggcacttcaattttgacggagagtaaattgcactattttcttatgatatacagtactttttataagcaccgaaataaaagacgacgtatctcaacgggcctaaatcgtacacccactattccataggccattctgaagcagatttt

SEQ ID NO: 2647 - DNA, 4627 bp, Heterodera glycines
atcgatatgcaaaattggtgcagatgtatgggattgaaaaaaagttatatgagaggaagtaaattcggtttttctctattaacagagataaagaaatagtacgccaaaaagagagatgttttttctctgcactctctctttattgacacatgtctcgttttttgactcggtgtgtactatatttgtgccaaataaaacaaacaagctagaaataaacaaacaattttaaattagttcattttagctaaatttattacataaattaattttattttggttgaatttttcatatttaccttaattattttattttctactcattgtcagaaatacatgtatttaaccaacaaaacaaatatgtatattaacatgttgaattgacaacaaactttttttcttgtcattccttattcattcatctttatcaagaaatatcgaaatggaattccttgtacgactggtccaactcctgcactcggacataaccgtcctctcccccagagacaactaaacgaaaacataaaaaacaggataaagagtagttttaaatttttttagtttttattctcatcggtttggatcaaaatggccaaaacggtttgaagccggttagaaatcggagcatgttgtccccccccccacggaaaaatttaaaaaattttctaattttttttttgtaaaatttctgttttaattttcaggggggaaatgaagtgcacccgttagaaatggctggtttataaatccatctaataacctagttgattttatcttcaatgcaaaagaccccatccgcaaattagggctcgacctattcctaatcattggagccccagttagcaaagtctacacggttaaaaatcataatacaaaaaacaaacaaactaaaatcatcctttgactttaataaatccaaaggccacctttttagaatttatttcattttcattcttatcagtattttcttattgtaagtgccttgccccgatgactgaccaatgtcccccgtggggtcgaaaatgatggaattgatgggtccgaaatggcccctgaatcgggcaaattcctcttcgaaaatcaaatggtacagtcgggccacgaattgctccgctgttgtggccgtctgagtgacttccatgtgttcttcaccaccgcctaaaacgatgtggtcgcggctgggagagacggaggcggtgttcaccgggcgattggacctggaaaacgttatttgaaaatcacaaaataaatagttaaaaatgttctcctgatgacactcacttgtacgttttcaaatgctgcagatcatgtgcactgtgcagttgtgccgttttgtccttaaacttgtaaaattcaaatacaacacgtaagaaattgtaagagaacggaaaaattaaatttcaccttcgatgctgtgatgataaatgtctgatcggcggtgatctgaaggtcgttgatttggtatttgtgcgggtgtgtgaaattgctagcggcgcccggctgccgcaggtcccacatcgccagctgtccggtatgatcacctaaaaaactcacaatcagaccattaactgaagtccatattgctcccgaattttcaaaaattagggagattgggaagaaaacgataccgaaagacggcgaaggaattttttttgaaaatcgttgaaattattaaaagattttgtttataaataaataaatttgggggatttttggttattagtgcttgaaacccaatgtcgactgaaattaaaaagaaaatcgcagctaacttaccggctacaatgtgatcgtctaagtgtgagaagagacatgcgttgcattggtcgtcgaaagtgtcgcgtaggatgggttgcgtcattttgtcgcgaaggtcggccacgacaatgcccgggagaccgcccgtggtcggcttgttcagcgtgaaaaccaccaaattgccgctgtaggagagaccgatggaacggacaacggaaccaggctcagagaaccccttggaaacgcccgtctcaatgtcccaaacctaaacaaaaccaattaaagagggaggaaaatatagtttggagcacagaatcgggggtatttccgaatttatcgaactgttctgtttcatcaacttaccataactttctggtcaccagatgcggataccatcgtttgtgtgtcccaactgacgtcgatgtcccaaacgacaccggaatgtccttcataagtgccaattctttctccattctccgtatacctaaggcagtgtatgaaaactaaaaattgatgaaaaaaagacgacgacataccatgcacagacggcggaacctttggaagcggagaagagaatgtcgccctcgcgattcagtcggactcgggtgatcgctctttcgtgacctttgagtgcaagcggtcgcattttaaacaactggaggagattaaaggacaaattcagagcaaatgaaataagtattttaacggatggaatgtccaaaatggtaaagacagaataaaccgaaagatatttgttgctttccaaataaaaacgataacaaaaacaaatgtaacaataacaacaacaacaacaacaacaaaaaaacaagaaaaatgagatagcaaagtgaaacaaattcaaaatgtttctaatgaaaaacaaaattcgccttttagccaattaatgtgttcgtctcgtttttgtaaatcgctgtcaacggcaattcgttggtcagaacggagatgcgcaacaatctgaaaaagggacccaattctataaaaaattggtataatgaaaatgctgccttattcgcatttatgcgcagttttgcatttagcaaggtccgccgcacttccaaattcgaatcattcgccaattttttccgttttttcgccttcggctcactttcacaattcgtttcattgtttaaattggcgagtccattctcaacgagacgacgaaaaagcgcaatgagttcgaacatttccattggcgtagttcgaggatgcttaaaaattgttgaaaattctttgaaatctcaatgagatgcatttttatactgaaattgcattggttagccaagtcacaaagtctaagcgaatgaaaaggtcgcgcgcggccgaccgaaggccgacgcaaatggcgaacactttgagcagcaaaagctttgtccaatagtcggccaatggcgtgcagaaaatggccatgcaatactcaacagcgaagctaatgaaaatttgaaggagataaaacccgataatttttaaataaatggaaatgcgcaattacactttgcaaatggctccgtagtcctgcgggtccacgattccgttggtcagcagtcgaagaatccattgcctttccttgagacaattttcagtggacgaactaaaaccaattgacaaatgacaccatagaacagtaaacaacagtatgcatttgcacctgaagaagagtttgaagaattcgggcactgaattgagctgaagccatggcttttgggtcaggtaggacatcagcggggcgtatatcggctcatgcggcagcaaaataattttggcgatccgcgcgaggaattggctgaccactaaagtatacgcagcagtgaactcactgtttgttattcatggtaacctcccattagcctatgttttacaaaccgtgcgtcgttcgttcgttgcattccaacaatgagtttttgaacacgtttaacatatgtcgaaaaagtattcgttgtggaaaatgttcgtcgctaagctccacaagtcggccgcgaaaacgctccaaaaaggcgtaggccaaagctcgaaggtccgccgattggaaactcgtggaggcaagcgcaaaagacaaagcattggactgaacgatggggcgacaggagagctgaaaaggaaggggaaaaatacgaataaagcacattgaatgcggcaatgaacttttgatagcaaaaaaaaacaaagaatcgaaatggaagaccaaaaatttgaaaaatagttttgtgagtgatacaatttaaaagtgcttattgtaggctgggtattgtgacgtatttggaatttgctatttttttattattgtgctacgaaaactctgtgtgtatgaacttgttggtatcgagcttcaacaaaatattgtataaacgatggcaagcccattcttttgcaaaatctgagctcatgtcgtaatcagcgcctttttttactcgagacaaaaataaaaaaaatttagttattttttgtcgtgacatcaattccgcagtattaacgaatttacaatatttggttgtacctttgtacccggagcaatcaattggacgagcaaacgaagcacaaaacgagggtcgtaacagctcggatcaatcttgacgaaatgatttgatcagctcatcccagctgaaaaagttatttgccccttttctaacacctctcccgttgcaatttccatcgccgcattgacggtggatcctttagacagtgcggcactgaaatgacggtcaaaatgggccaatttcagcaaggatttccacattcgttttgaatcgaaataggcaagaacctaaaacaaaattgttttactaatgatttgaattttttaaacctgctcaggtataggtatttgtgcaaagcacgcccatattggatcagctct

SEQ ID NO: 2648 - DNA, 2267 bp, Heterodera glycines
aaaaaaaaatatatattttgtgagtactgaccgtgaagccgcccttttcgggctgagaaaagtaaaacagtgccgtggcaattcgattgcccgtccccaaatcactgaacgcttttgtctcttccttctgaacaatttaaataattgtcgttttacagaacgaaaaaccctagcaaagtcgtagtgcgggtcgtaatggcctccgattccgtaattggccacctgaaattgaaaagggaaatgtgccaaaacaaaagtcatttgattgagtacttgcagttcctccgccgtttccatctccaaattggtcatcaaattcagtcttttattgattcgatcgaccacttcgtcctccgtgccttttagccaagcacttttgcttattcggtacgatgccgtctccaactttcccgtttgactgttttgcaccgtggcacgtgccaactaaaataaaatttgggttttgtcatttggtataaccaaagttaggggagggaggggtaattttgaccatttcttagcaaagaaaatagacctaacatcagaattcataaaaatgtttggtccgtgccattccgaccaccttcggcttggccaactcctgaatgcgctcaatttcctcatctgtcacgacatttctgaagagcacagcgagcggattgaagcgcacaatttcgactttgaacggcgccaataggagaaaggggcggtcccttttgtagtagcaatacaacttggaggtttgtttcacgctcttaaaggtgaaatcagaaaaaaagccaaaaagtgagcttacaacgggcacttcatcacggcacaaagcctcgtaaatattcctaaaatagaaaagtaagaattgaatttaattgtcattggcacgggatgcgctcgcctttccgagttgtccaatgagtcgtcacggcgtcgattgtccatcgggggaatgtccctgcggtaatccgcggatttcactccatccgcagtcaattggtcttcgtacctttcgtgtgtttttgccattgttgaaatattcaacgaattgtcactttcccaacttccaaattttaatttaccattttatatttcctttggctcgcgggtgcgtcggagctgaacaaattttcttttgaaagtcatattttgaaagttcgcaccaatctcagcaagacgatctgtcgttacgagggctcttttgaggtttccctgtttaaacatggcaaaggcgaggtattctgagagaaagtgcattttacaaagtcaaaaagcgaagagacaaaccgagcacatcggactctgaaaagaaagggaaaagttaataaattcacttttttttgggggggggggaaataaattattggacatttctctgaatttagtaaaatccgaccagaaattgtcggcgttttttcgcgctttgccctgccgagtgcttcttgcatccaaagcaaagtgtggtaaaaatcctgaaactcaaaagtttattcgggtgaacggaaatgaaagtgttcgcctcgtcattgtacgcaatgcgaccgatttcaaagcaatcaaatgctaaaacaatgtgaaaatgtacataagattttgatttgattttaacttttgtcctaaattattgaaattttttttggcaatttggtgaaactacggccattcattcattcattcagtacctgtcatttcattgccaatttttatgtcctgcacaaatccgttggccaaatccctcgtgtccaatcggtaagtgtcctgcaaacgaagcaatccgatcgctgcgccactcaaatcctcctaaaaaggcatccattgtttcccaaatttgtcatttttgctaacatctgtaggaaaaagcgcatggccatcagtcgtcacattttgcaaatattcgtccgccacgtccgcccgcatttcgttttgaagttctttccacgcattcgatagccgtttgatcagtcggaaagcgtttatcggattggacacactttggatgttcgtctgcaatttctcattgctctgtcggtatttggaagccatgctaaacaaaagcgaattcaccaatttcaaaatgaaaacagtttccctcaaagacctcttcaaatgttccaaccgttccgtctccaattttatgtaattatttatcagttgcggaatttcccattccgcgtgagtcaatcgttgcaaatcggcggaagaagtgaagaaatcggcactgaccgcaccaaaaggcgacaaaggaaaggacagaaaggaggaaatcatggcaaaaa

SEQ ID NO: 2649 - DNA, 1687 bp, Heterodera glycines
cactgtcaatcaaattaagaattgctggtgttgttcgatagctctatgtgtttattattaatttgcaaaatctcaaaaattttggttaagtttcaaaaaagttatggccagaaggaactcaaaaacccagtaattcgaactttttttgctctgatttttttgtgcataaataaaaatttttgaaaatttgcaggctaatagcatttttcgaatgctttcgaataataccaagaatggttaatttggttgagaaagaaaaaagttatggtcgaaaaattcgttcgacgacgtttcggctgacgacgttttgtcctactccgtacagcagggcttggcgaatgagtcataaaattagctgaaaagcaaaaaagagcattaaaatcaattttaaaaatttattaactgagcgtccgctacttctcactcctcatgattcattctgttaatttaactttgatttcactaatgcacttttttattatgatacatattgttttatttctttaatttaactgccgtacctccccttggtaataagcgaatgtcgtcggtacacaaagcaaatgctggaagataccactattattctaacagaagcgacactgcttcgatcccccccccctatcatttcgattagccaggtccctttttagcattcaatcgaaatcccccccccccctctcggtggatttggtgttttggtgggtcagatgtgtccttgtcccccccccccctttctctccttcccccattatttttattttggatgtcctcgcaacagaatgaatgcgcaatttgagttcccgttatttctcgtgttgggctcaagacaatgaatgactgaatgaatgagctgactctgtcgttggcccttctcccaatccgtccttctccgccaaattcccacagaacgggcgagggacggattgaattgctggcaccgaaacgcatggacaaatggacaacattgtggaggcaatgggaagattaaccgcaattggtcattcgccggagggggggggggggaaattacccattcgagaaagggacaaaacattaggcggggaattaattaatccaattaacgtaaacgaaagtgagaaattgaggagcttctaattaatttgccataattagtgacgcatcaacatgacagtacactaatgagaagatgctacgaaaggaaaacgaaaatttattttctgcaatttacaggagagggggggggggggagaggtcgcggatttattttcacacaaataaaaatcatttccgaaagttaaaattgtttttaactgtattttgtcagtccaacgaatggcaaattgccaaccatcgcccgccttcgccggagattcaccgtgccctttttgccacaaattccaattgaagtgaatcttcgaattcatcaaagatgttcttgggatgaaggcaaataaataaataacaaataaataaattgaaaagtgcttgttgctaaaaagaaacagaaactttgctgccattgtccgaagtttttccctctgcgcccattggcaagtcgaaattcggaaagtaaaaatttagccaattctaaggaaagaagggggggggggggcgagaggctgcaaattgccccaatttcctacgctcgcatcgcatacaatttgattggtcgccggggaattgggggagggggggggggaga

SEQ ID NO: 2650 - DNA, 1072 bp, Heterodera glycines
ttttaggtatttttgagtatatttacaacatcaatttttgagcaatttctaaagatgaaggaaaataatttttttatcaatattttatattaagttatgtttttgaattgattgaccttatcaaatgaacagagatgcagttgtaaaatttttcgccttctcgcgcaaagtttttcctgaactgtttctgccagatggttgagataatatttgtagatgtttgttcatatctcaatacattatttatggggcagtgggagggttttgccttagggtgcgctggtccgcccgccttcgaatgattacggtagggcttccgcaatttgtgtggtggtgccgcccgttccacacccaattggccccaattgaggaaatggattaaatgagtggctgctgcttgctgagcggaggagtgccctcccccccccccctccgtctcccctcgcccgcccccatttgactcttcgccaatcagccgactaatgtcattaaccccttaggcgctaacggctgaaaatgcattctaatgacacggaaggacaacagctgactgccgtcaacggcaccagtgcgtccttattgcagcagcatgacacccgctacatgctgaatgggtacggcattggccgcacgaattttgccatcaacgagattctcggcttagcctccgtggccaccatgccgcagatcgcaacactgccgaacggcggtgttggcacggtgtccaatggcacttttgccaattacttcatgacgccttcgtcgtattgcccttcggtgttggtaaatgctccattcggggaccaatcggcaattattagctctatgacgggcaccaattgtgcttctcaaaatgggttgtctgggctcgagttcatgcctatgatgcacttccagcaggaatatggcgactattcgtcgttcattggaaatgcaaattcaaattcgggtggaattttgagggatggcattcattgggcgacaaaacccaatttgatacaggcacttcaagataacttgtccaaagattgctgaatgatatctgccgacagcaaaagcagaagaattgcag

SEQ ID NO: 2651 - DNA, 4937 bp, Heterodera glycines
  unsure (1)..(4937): unsure at all n locations
tgaatgaaatctgccaacagcagaagcagaacaattgctttgcgaacactgcacaaaatatggccgaattggcagcgaaaaatttgatggcggcgaaaggggcgacggaaagcgcaagacgaagcaacggcggaacgaatgcgaacggtgtggtgggcgcggggggcggctcaaaaaagaaacggcgccatcgcaccattttcacacaggcgcaaattggtaaggaaaacaggcgaaaatggcacaaaatgaaaagaaatgcaaatgccaaaaagtcaaaaagcaaatccaatcagtaaatcattcattgctttgttattttctgaatcaaattctgcattgattcatcgaaataatttcatggcacttttgagatgagttggaatcggtgttcgaaaaggcccactatccggatgttgtgcaaagggaggaattggcaaacaaaacgcaattggcagaagatcgaattcaagtaaagtgaagtcaaaagaggaaagagcacaaagatgggcctaaattaaggtgtggttccaaaacagaagagcaaaatggtaaaaaatagtgaaaaattaattaaatttcttttaaattaaggcgaaaaacggaaaaaacgtggggaaaaagcacaattatggccgagtaagtgagaaaaagaaggcaaaacgaattgagccacccaaaagatacggattatacggggcgatggtccgccaccaattgccattgcccgacaccatcacgaaatgtgttggcaatccggacgacccccaagaatcagccgctccctggcttttgggtacgttcactgctcctccatcgcaaatggcattttcctatgccaaaacattttgaaggaatgcataagaagagtatggaggctgccgttcaatttgatcagatcggagaccaccaggacattgatgagatgggggaggaactgaaggcgatggtcgtgggaggggtggggacgaagtgcggcgcgggggcactgatggaattctcggaggacgagaaattcccgaaggaagagcagcgcaattgcagtggccaagggcacgagaagaagcggagaccgcacgggaaatacggcggcaagggaatgccaacggcgaacaacgacagcacattggaaacgcaattggggggcggcgacagtcgccaatacatttttggaattagcggacaataaattaattgttaaattaattgttttgttttgcttgggtaaaatggtcaaaaggacggaggggccaaagcagcagagattagggagttcagcagaaaggacaaccaaaagtgaggaccattttacctttttgacaataccctcaccattttatttgacaatggcaattgtacatttaatttaattgtgaaaaagacaattttttatggaattgttaggaggacgaaagaaattcgataggtatttcattcattggccaccctgaaggccggcaaattgacttttcgtcggagaattgccgtaggaaatgaccgaccccatcattcgtcgccggcggcgcgacattcgtttcctcgccggcaccacccaattcttttgtttgtccttcacatgcctttctctttaggactatcaaacgaagatgaagagggggggggggggcacttggccaaatgggcaaacacaaaaaggggcggctttgttcgccctttcggcgccatttaattcgttaagtgttcgcgcttctttccccccnccccttggcatggcattggcaccccttccactcttcttaagcatcacacccatcatcaccagagcaagagttcatcattacctaaactaattaacctcctaaatttaatgagtctgaagagaaaacgccaatggcagagaatacgcttttatgtaacaaagctgttttttgaacaatagatttactaattaggtagctaattaagtaaatgaattgaaaaaatattttaattaaatttattaaatttatttgcccacaaaattaaattaaccaaaagtaaaaaattgcgaaaacattttcttattgttctttttgcgtcttttcgctttctttttttttgatttgataattttagaattaaacccatttgaaaatctttcttccgtctctttcaacaattgttttgcatttgtcgtgttatgcttgtaaaatcatttcttggtccgacgaaactttgtcaatttcgtttgtcgttctttcacaattcggtggtaaaaatgaattctgataatttccgcgttgaacgcgacactttcggtgaactacggtaatttcgaattaattttactttgaataaacaaatcgtgactttcgctttgttttagtgttccttctgatcgttattatggagctcaaacggcaaggtaaaagattcgaaaaataagaaaataactacaaaatggacctttatttagatcgatgcaattcttcaaaatcggaggacccgaggagagaatgcctttgcccgttattcatgcatttggctatctgaagaaggctgcagcaacagttaaccaagattttggattgaattctaaagtggcagcggcgatttgtgaagctgcgggtaaattcgcattttattaaaattgacgacattttttattctatttttagatgacgttatttctggcaaattggatgagcattttccgcttgttatttggcaaactggaagtgggacgcagtccaacatgaatgtgaacgaagtcatctcgaacagagcaattgaaattctcggaggcgaacttggctcgaaggtacacccaatgattttcaaattttaaccgccaaaagtcggccctttttcagactcccgtacatccgaatgaccacgttaatatgtcccaatcgagcaatgacacttttccgactgcaatgcatgtcgcggtggccgttgagataaacactcgtcttttgccttcgctgcgtttgcttcacgacgaattgtcgaaaaagtcaaaggaatttgagcacatcatcaaaatcggccgtacccatactcaagacgcggttccgctgactttgggtcaggaattcagtgcttatgtcactcaaattggaaacggaatttcgcgtgtggacgcaacgcttggccgactgtacgaattggccgccggaggaacggccgtagggacgggactgaacacacggaagggatttgcggaaaaggtggcaaggtataacaaacaaaagcgaataattaagcaacattattcggaagtataataatttgatttgggccgctttgtcaaaaaattttcattttttcaacgcttaggataaatttaaaaaattcaaaattatcttcgtgatttattttgaaatatttttacaaaagcggatccaaattaatttgtcttggccgagtttagcaaattggctgagttgacgcgtttgcccttcaaaacggcaccaaataaattcgaagcattggctgctcatgacgcccttgtcgaggtgttttttcgataattaagtttttattattttttttattgagattaggttcatggcgcgcttaacgtggtggcaacttcgcttatgaaaattgcaaatgatattcgctttctcggctcgggcccccgttgcgggttgggcgaattgtcacttcccgaaaatgagccgggctcttcgattatgcctggcaaagtgaatcccacacaatgcgaagcactaacgatggttgctgcacaagtattcgggaatcaggtgaaaagcgtgaacgagcggcgcatttaaaagggattagagtcccaatgtttgcaaatctgatcattttgctcaatttcccacttttgtaaggttgccgtcactgtcggtgcgtcaaacggtcactttgagctgaacgtattcaaaccgttgatcgtccgaaatgtgcttcagtccgttcgtttgttggccgatggtgccgaatcgttcactaaacattgtgtgataggaataatagccaatgaagaaaacatcaaaaaactgttgaacgactcgttgatgctcgtcacggcactgaacccgcacattggctatgacaacgcggcgaaaattgcaaaaacggcacacaaaaacgggacgactttgaaagtgaatgttattttgttggatttgggtggtccacctgtttataaattggcacattttcaaagaaaataattttacttttcatttattgggagttttaacatttaaaattgcggattaatttttcctttttgaatccttattgaccattctctaatcctaaggaggaagctgtcaagtccgggctccttactgctgaacaattcgatcaatgggtgcgacccgagcaaatgatcagtcccaaataagacagacagaaacctttgaatcaaaagtgatctgctaaaattgtctacaatttattttagtgtgcctttatttgcaagtttttttttttgctttgattagtttttaaagcgctgtcaatattttttttgtgtgtttttccttttagcaaagttaaaaagcgactcatatacacaatgctattttactttatacttttcgttttggttatctcaatttaccattaactttggcatttttctttattcatttgacattgctcaaagcaaatccctttgttttgtctttgccgagcacaaatggctctctgcgtggcgatttatgataagcatgtgagtgagtgtttgtttatttgttcgattaccattaattgctcccaactttctctttttaggatgccctcctctatttacgcctcaaagatcgaatgtccgcttctcccttggaagtccaacgtttcctgcacagttcgtgtgacattgttgcggacaaaatgaactcccctggtaacaaggccacccaacaggaaaattttctcggtgcacttcttttgagtgatcgctttcgggtgatcaatttccctttgattccttttgcatttttcaaatttct

SEQ ID NO: 2652 - DNA, 1154 bp, Heterodera glycines
ttatctgacaacaccggtacgaagttccttttggtcatcgatgcggaggagggcactctcaaagatcacgaaattcggctctttttcaaaaacattcacacaaaatattgcagcgccatttcaaatccgttttattcgtttggaagtactttgcaatccaggtgatcatctccttttgcaatgtcactgctattttggagggcggaaattgaattggaattgtttcgccttcccccccccccatctcctaatcgtttttcaaattagaattccctcttttagtaaaatagatgccgtggttaacgaactgcttgcatccttttgactgttcagaaaagcagtaattgatcacagaaaagagaactattgcaaataaatataaattattttcttttgagcattttacacactttcgcttgaccgtattgaggttgtaaattaccttaatattatcagaaaacaaagttttacataatttaataagactgatatttttagcctctaaaatgtcaaaacccggtggaattgtacgcatcaaaaatgtcagtgatttcgtcgagccaagtcaggttagctgcaattttgtaatgttttgaccggaacaattcaaaaaaaaaccctgaaatttcatttgaagcggattattaaatatcaaatttcgaatctgaccatgagaaagtcgctgacattatattcgtttagaaatgcattcttccacttcgtcaaaacggggaaggccaaaaggctgtggtcggcaagcgattggtcggaatccatgccaaatccgtcccctccgccgcgacggccaaaagggtcaaagtgacgctggacgactgtttggtgtgcagcggttgtgtcaccacgggggaagtcgaattcttctgaccttccatttttttgtttttcttttcatggtaaaaaaatgtgaaaattttattatgcagaattgtatttgtttaatagtaataataattaaatcgtgattcgatcatttccatttgaaagtttgatttggtacgttcagccaacattttacttttcttcactccgaaggccacacaattcgcacgtcgcgctgtgttaagagaaatttatggtggttttaaagtttaaacattcctctaaaacaaataaatgcgtgcgatattgtttgg

SEQ ID NO: 2653 - DNA, 1567 bp, Heterodera glycines
tggaaatttcaaccaaacctttccacgaaaatgtctctcttcaccaattcgtacacttaaacattgtcctttccctagttttctgtcaaataatcatctgtccaaaggcgaagtggcggccaatcattctcagaaagaaaattgcgtaagacaaatggatgcatatgaagaaataaaataagcaaagcaaggctagtcaacgaaaataattcttaggcgtctatttcgtgattttcggaaaaatccttagcaaaaaatgcaacaaagacgaaaatatagccctaagaaacttgaaaaactttcagaaaatacacccaatgaaaaactcaaaaattcatcactctattcatttttacaaatgccaaataattgatttggatgttggaacatttggacttttatattctttttaaaaacggattgaataaacggaaagatggtttactgtaactcaatcttttcactttctgacagttggtaaattattacttatttgactcgttgcttgtcattattcattgttgattttcacttactcttctgaattttttaaattctccaaccattcccgacaaattctgtagggaaatttcctctatgatcccttaattgtacttggagcccaaaattgaatcgccgtgtttgaatacttttaagaaattatgaagcgttgaagttgtcatgttttttttatattcctttaaactgcaatagtgccaaatctgacattaaattctgcttattcttcctcatccttaacccggattagaacgaagatttaaattttctaaaattcataaataatactccaaattgatttcaaaaatttcgactacatacagtcgaatccgggttacggatgcggaattgactttaaatcttcttatcttcaacaagcgacctagtctgcatcctaaatgtaataaatgctacttagaaattttttagagtaaataagcaaaaatgtcttctgtgagcaaatttatcaccaacaaagggccctttattgctgttggaatgggtgtggttggaatgggctattttggctactacaaattttggcgttcggtacgttctccaattcctttttggattccaattgttactgccgttttcacttaatgattacttaatttttaagtcgcgtgagattgctatgtcttacaaacaagaagacgaatcggatggatacacagtgaaacgcattgaggaggcatacaaaactcttcaggaggcaaaggattgtaaatccctgttgaaaaagcactttactgctgatgtgaaagacaaattgaagtacaagaagacgaaattgggtgcctctctcttcgacgtcatcagatcgggttaaattattaatttttattcccgggctcctattgcagttcacacgaccataaaaaaagacacgaccataaaatttttttgcaagtttagtgaaccataactttttcaagaagcatccaaattaaatattcttagtatattcgatagccttaagaatcctctattagccagtaaaagttcaaaaaattttgtttggtttcaaaaaatttatggccagaaa

SEQ ID NO: 2654 - DNA, 4351 bp, Heterodera glycines
caaactttggcgaggaccgattgggcgaatgaaaggacttggacccagatgggaaatacattctttctaccaggtttgtgaaatttttcttatattaaaacaaaacgaaaatactcgcttaattctgattaaaactttgattaggattcgctgcggtcgttctttgcttggctatcctttcaatccgttgttaatgcgtgacgattatttggtcatgcaacaaaaggttcgaatggctctcgagaatttggaagatgaccctgaaatcggtggaacttattatccactcgaaggtgaatttcttatttgtcctacatataaaaaaacatattttttattatttaaggaatgacgaaagaaacccagaaacaactcatcgccgatcatttccttttcaaggaaggcgaccgttttttggaggccgcaaattcaagtaaattcgccgctgttatattttctggtaaacccaaaattttagaccacttttggcctgcaggacgtggcattttccacaatgctaaaaaggtgcttataaatgaaagattgcatagtctttttgcttgcattacattcattacctataactattgttcagacctttttggtgtgggttaatgaagaggaccatttgcgcattatctccatgcagaaagggggcgatgttggcaacgttttgaaacgattgatccgcgggttcttgaaatttttttttacaattttttagttttctattagtgtgaaaggtatcgagaagcaagttccatttgcgcgtgatgatcgactcggctatctgacgttttgcccctccaatctggtttgtttcgtgcaaatttatacgtgaaaaaaatgtattttttagggcacgaccatccgtgctagtgtgcacatccgtttgcctaaaataagcgcaaagcctgaattcaaaaagtcattcatttaatagattaagatttatataaaaaattgtactgtaggatctgcgaggacctcaagttgcaagttcgcggcattcacggagaacactcggaaagtgaaggcggggtttacgacgtgtcgaacaaggctcggcttggacttaccgaatttgagggtaactttttatttgcttatacccacaatgatattgattttttctgttcattttcagcggtcaagcaaatgtatgacggtgttaagaaactcattgaacttgagaaggcgtcgaagtgaatgaattaaatatctatatccatttgacgcctcgtaattgcattgctttaatcacaatattgtatttttgtataggtctatagggtcagaaaatgtattgcattatgaaattgtatggacaagtaaaatggttaattgactaacctcttattttatctgtaatttaataaaagtaaacaattaattttcgtttccatttacatgagaggttccgtcgcttcaattgatttggacacattttttgaggtcgatcgcatctgctcatggattttgtcaaacaaatttcaaaggacggctttacaactgcccgatgaacttctcgaacattcattccatctcgtagaagcggttgaacgtagggtggaatcggcaggaacttgggaagaacagagggggaggctgtatgtgttggccgacacgtcctatcgaaggtgggacaaatcaccggcaaccgtggcgaatggttcaggactttagttgtcagaaatttgtgtgccttgttattatattcccaaaatcagttgttgtctggatgagattgcggctgaacatgtcgcgtgcgactccatcgttcactttggagacgcgtgtctaagtgcccgcagcagttccattcccgcgctatacattttctgcaggttggaaattaagattgaaactaacaaaaaaagttacaggcacccattcgaattggaaaaattcgtcgagcagtttcgaattgaattttctgaatttggaactgaaaaacagtgggatgactgtttactgttatgtgaagccgcctatacacacattcaaagtcatccattcagagaaagattttataaaaaacataatttaaatgaacaataaattaaatttgagattcacttggaagtgccatttctcgcattcttccgccgtctgttcgtctgttcaattttgaagtgtcggagccaaattcgccctcttcctccattctcgggcgccaggtgccggtcggattcgtcatcgatcagtgttctgagaaaaagcggcattgttttttgctttttgttggatctactgacagtcctttattgcccatcgcgcatatgacatttcgacacattgaaaaggtaaatgatcgtttttggttgttcttcatttaacaatagcaatctttgaacatgttctggttcttttggaaaaagctgattattaatttaagaccattgtctacacccccgaaacaggccaattcaatgcttcagagtgagtttctttgcccgcttttttcttagatttggattagcttcaatttgtcatttttgtttgcaactctgtcttccatttctgataaaagccaaactgtttttccagcactctgaccaatcggatgttattgcggcgattgtatttgatagagcgactacgcgacgcgcgtacggttggcttggtggttggagcggtggcattacgcgggtgccgtgaggcggtggcccgagtgcgcaaactttgcgaaatggccgggaagaaactgtacgtcatgtacataggaaaggtggggagcaagggtttaaacacttggtattttaaattgcgcagctgaacgaggcgaaattgtccaactttggcattgatgtggaggtgtttgtgttgctcagttgtccctttggcattatcctagacggcaccaaattttgtcgacccattctcagtgtgtttgaggccgaaatggcgttggacccggcacaaagtaattggctggccgaaatgcgatggacatcggacattgaacggatttctatgggtaagtttaggacgaaataaaatattttaatgaaaaatatagtcgacattagctgttgtaacaaaagcaagaaagagggcaccgatgaagatgtcggattaatgagtttaacatcgggcaacattcgccgttgctacggtcctacgaatgccgatgaggaaaaaaacaatggcattggaccaacaacgggtggcacttctaacaccaaacaagtgatggaatataccgcaggtgtttagactcatttttgtatttatttgcaaaaaaattctaggtgatcatttcgcaatgcgttcttggcatggactcgaggacaatagtggcaacaacttttgcatttctgctgatggcgtgacagaacgacaatgcccatgcgaactgaagcaaggaatggatgggattgccacgcgatatgccaatgaaccattcaattctgatgtccaaaaatgaaatttaaaaatttataaaattttaaattgtttgactttgatttggtgcataaactcgcaagagtgcaatttgcggtgcatccctattttaaatttttagaaaaatcactatttataacttattaaatccaatatgtttgcgatttattaagagagagagaagagtggtaattagtatttggttttgttttcagttttgtcattaattctctctttttgttaaaataaattttctttttaaaaatctgataaatggcaaatgttctatgtacatacatacatacttgtgctcaatttgttgatttttcagattcattttccaatctttcagttcctcaaagtgatttgacatttttaaatcaaatggtaaatttacatttaaaagctattatttctaattaacactatttgtgattttatggataaattaaggctcgaaatgctgagaaggcaatgacggcattggcccgatggcgccgaatgaaagaacaggaggagaagggaccgatcgccaaacggccgaacgacgttcgcgagtgcaaaaagttgggcgacgctgaacgatttcgtcgcgaattgatccatgacatttcgaaaagaataacgcgaattcacgtgccgaatttgggaactaacaataagtatttacacaaactattgcctcatgatttttagaacccgcgacttggcgagttcaaaatcaaagacctcaacgaccaaattaaccgactgttgcggataaaattggcatgggaaggacgcattaaggagctcggcggagtctaccatcggtactgaataaaagaattgtaaaattcatacttaattttgctcggctgaatgatttctgaatttgttccgagtgacaaataaacaattcgtcttacaatcagacgaatcgcgccgcgggagttggaccggg

SEQ ID NO: 2655 - DNA, 2412 bp, Heterodera glycines
aaaagggaaatggtaaagcaaaagagtcaaaagacaagatcagaatgggaaaagccaagggtgatggcgaggaggtagagcaaagtgcgaagtcgagaaaaggcgagaagtgtaaccgccagaaaagtgaacattttgtcgagcatccttcattctttttatacggccaaacgggatgggcgggtccacagtgtctgggtgattggtggtaggcgggcaatgctgattggtgggccaggcggtgggtgggcgacagtatccggatgagagcaacgggtaacagatggacggacaacggcgagagttgggcaccatcgggccatgggggggatgaacagggccaagaacgcaagccaattcccgatttaatcagtgcaaatcgccaaaatgcatctggggattaatggaagaagcggaaatggtgggcagagcccacggattagcaatgaatatttataaaatgggacacaaattgggataatccccaaccaaaaaatgtgttttttggttttgttattttatttttgttttaatttctgtcggagacaaggttagccccaatttattgttacccatttgacagaatcccaatcactatcaattcctgtttatggtatattaaatgccacactttttaggaatgggttaaacgtggaccagaaatgaaccgcgagaaggagctaattgaggacatttaccgcgtgcaagcggttggcattttagtctatgttttaaaaaaaatttccattttaggactccgatgatgaagaaccaattccgatcaaagaatctgtggtgattggcgaggatggcaaagaaatgatcatcaaacacgtgatggttccatcgcagtccgaaattgaggagatgatagtcgagcggaagaagcagtatttgctggaaaaattcgcggattgaaccttttttatcttgttttttcgatatttatcttaagttatacaattaaaggattgaattaaatttgattttatcctaagtataatatacctataaaagttggcactttaaccaacacatattgagtcagacgcatttcatttatatttattcaaaaaactaattttacattttcataaattgacccaattccaatgcctgccgtaaaaggtacgtaaatgttgacgaacattgtggcaacttctgctgctcattccgcccacttaaggtgatggaatgcgcggattggccgttttcatcagcgacattcgaaattgcaaaagcaaagaggcggaattgaagcgcatcaacaaggaattagccaacatccgatcgaaattcaaaggtatttagaaacattcaattttgataatttataatttagtccatcaatgtccaaaaatattgtttttaggtgacaaaactttggacggctaccaaaagaagaaatacgtgtgcaaattgctattcatctttctgctaggccatgacatcgattttggccacatggaagcggtcaatttgctgtcctccaacaaatacacggaaaaacaaattgcaagtttccccatccaataaatattgcgatgatttatacgaaatttcgtcaaaaatttctggaaatttcactcaacgtctttgcaactttacagggttatttgttcatttccgtgctgatcaatcttaattccgacttgatgaaactgatcatccaatccatcaaaaatgacttacaatcgcgtaaccccgtccacgtcaatttggcactccaatgcatcgccaatattggctcccgcgacatgtgcgaagcgttcgcccacgacttgcccaaactgttgacttctgggtaaaattttattctccaatttgctcgctccgatctttccaaatgcttgtcccattctttgtcagtgatacgatggattttgtaaagcaaagtgcggccctttgtctgctcaaattatttcgcacctccggcgacgtaattccgcccagcgaatattctattcgaattgtgcatttgctgaacgattctcatttggttggcttttaagcttattgttagcttttaaaaatccatttttgttttcctttagggcgttgtgacagcggccgcttcgctaatcgatgcattgtccaaaaaatggcccgatgagtacaaaggctgcgtttcgttggccatttccaggctgagcagagtcgtcctccccccttttgactccctttccatcagtcttcccattttcagattgttacatcgacttacactgatctccaagtgcttaccattcattaatggactgacagcttatttaattctattctttttatttatgaatttttcatcccatgccaattacattttacactttccccaaggattacacatattacttcgtgtccgccccgtggcaatgtgtcaaactgcttcatctgctgcagaattacccgcct

SEQ ID NO: 2656 - DNA, 4011 bp, Heterodera glycines
cccgtggccttgtgtcaaactgcttcatctgctgcagattacccgcctccggaagaccccggaaaccgcgcgcgactgctcgaatgtttggagggcattctgaacaaagcgcaggacgcgcccaagtcgaagaaagtgcagcatgccaatgcgaaaaacgccgtgcttttcgaggccatcgcactgatcattcactacgacagcgagccgggactgctggtgcgggcatgcaaccaattgggcacatttctgtcccatcgggagaccaatctgaggtgaggagcggtcaaacggctaatttatcgcattttgcttttatgttggcatcttttgcttaggtatttggccctcgagtccatgtgtttgttggcaacctccgaattttcgcatgacgcagtcaagaagcaccaggagaccattatcaactcgttgaaaaatgaaaaggatgtcagtgtacgacagcgggccattgtaatcaccaaactgttcatcgattaaaacatttttccaccgactacaggatcttttgtacgcgatgtgcgaccgttccaacgccgaaaatattgtggcggaaatgctcacttatttggagacggcggactacgccatccgcgaagagatggtgctgaaagtggccatcctggcggagaagtacgcctccgactacacttggtacgtggatgtcattctgaagctgatccgcatggcgggcgattacgtgtcggacgaagtttggtaccgagtcattcaggtcagttcctggcttttcctcaatttggattgttttctttgtattattcaaattgttttctcttttcctggcttagattgtcgtgaatcgggaggacgtgcaagggtatgccgccaaaacggtgttcgaagcactccaacagccaacttgccatgaaaatatggtcaaagtgggcggatacgtcctcggcgagttcggcaatctcattgctggagacccgcgatccaggcacaaacaaatatttttacatttgtacttgtattgatgcttgtgttttgatttatatttgtttatattgatgcttatgtgccatttgctcgctcccttttcccagtgacaatctctccccgccttttcagtccgatggttcagttcgacattttgcacagcaaataccatttgtgcagcatcaccactcgctgcatactgttgaccacctatgtgaagttatgcaaccttttccccgagataaagccgcacattcaggcacattattattccttttgatgcaataactatttcataattaatttattttttgtgcttcatcaggagattgtgttgcgggctgaccacaacctgaagaacccggacgccgagttgcagcagagggcggtggagtatttgcagctgagcaaagtgacgtcgccggatgtgttggcaacggtgagaaaggaacgggcgaatggacgagaatattaatgggcatttgccatcaatttggtaccattttctacagatactcgaagaaatgccccaatttgcggagaaagaaagcagtcttttggccaagctgaagaagtccaagccccaagctgaggagacggacacccaacagatcgaaaagaaacaaaggccatccgccgtaatgtctccgcaaaaaccatccgcggttcgttgagacattgctgttgtaactgttttcatgtttaaattttgtacgtctgttttttctaaaggagtcatcgccagcgacttccactgccaccaaactcgtggacctcagcggtgtcggcaccactggcgacagtttggacaattcgatgaccaacggcggcggggagacggcgaccaatgcattcagtcagctgaacgacctttttgccatgattcagcctccaaaaacgaatggaatcgccgcttcgtccgccgctggcggtgcttcggccgacggaatggcggcgacagaaattgggccaatttggaataaaaatgactatacaaagtgaattcccaaacaatttaaaaaagatcattagaaaataccaattataaggttcgttatgaagtccaacggtgtgctgtacgaagacgaaaccattcaaatcggatgcaaaatggaaaagcgtgccaatttggcacggctgggcatattctacgggaacaagacaaatttcaaattcagcaactttcaaacgacagtcacttgtcctgggatgctcgcagatgaaattctttgtcaagttgctctttttcagattaatttttctattttttcctcacactctctttcctcttctcatgcactcatttttctcccccccccctttttccccctttcttttcactattctcactctctctcttttctctccctctttttttcttacccccattccttctcttctcttccacccaccctctctatcttttacagccccctttctccttttccctcttttctcctctcactctctcctctcccttctcttctttcttcccactttctcaaactctctctatctatctttccccccccccctctctctccccgttttctcttctttactctctctctctctctctacatcaaatttccaggcaaaagctgttgacccggacattgacgccggttcccaagtgcagcagctgatcaatgtcatttgtcttcagtttttcactgcccctccaattttcaatgtttctttcacattttcgtgagtttcttctcttacattgtttttctttttattttctctttttgattttcagtgcccgcgatggctctcctcaacaattttcgcgcagtttttaccttcccgtttttatcagcaaatttttcgaaccctccgacatgtcatccgaacaattctttgcacgttggaagcaactgagcctgtactactgcactcttacaaaaaaataataattttttttttcaggccgtcccaagaatgtcagaaaatttttgcaacgattaatccaattgacagtgaccaaattcggatatcggtgcatttatacatttttgaaataaaaattgggcctcacaatgctatagacctggaattttttaaagaaccggggatggattttgaattgacctgtctgtctttcatgtctaataaccgtttgaattccagcaaatccctgaaattacctaaataattttggaataaatataaaatttagctcgcaaatttgggcgcacaaattctgcaaaatgttgacccgaaccctgaaaattttgtctgtgctggtattttacaaacgcaggctgcgcaaatcggctgtttgatccgcttggaaccgaacaaacagaccaaggtggtctatccgttttatttattaattaatgactccgtttttttgctcacaatcagatgttccgcttgaccattcggagcagtcgggagggagtcgcggcgacactttgcgagctgatgggtgggaatttctgatgagagacgcctctcaaaacgaaaccttctgaattttcataactgatttgtcaaaacaacccaatacaataatagcaaatctgtgttgtgttttctctgtttttcattcctaattacctaattaattattttcctcactgcaatctcatccccatttaaatcatcaatttttattgtctatcattggtcgtaagacagcacaattgaaatgccattacccaaatttagtcgttggacattttttagtaaatgaaaataattatttaaaaactgtttgtggcaagcgtttttctcactgattctgatcggcgacgatattttgggtgatcgtgggaaagagaaactcctccctatattagaattggtagaaatgttttttgtgtgtgaaattcacttttggaatcggtgaatcatttaaattaccgagcccaaatgtaaaatgtatgaattagcttgtcattataaatttaggttatgtacagtttgtctaaaaaccataatttgtgaaattttatcttacaaatgcgcaaaatgtcagtggggagtttctgatcattttcacggcgattcaatttgggc

SEQ ID NO: 2657 - DNA, 794 bp, Heterodera glycines
agacaagaaaatcccggcaaaatattatgccggaaaatttaatttttggcatttttgctaaaaaaaaattttatgctggaaaatttaaattttgtcgaaaaaaacaatttgaaatgggaaccgcgcgggttgaactcggcacggcgcgccattattttttttttgccatatcaggcattattaatctcacaaaagttcaaaaaaaaataattaaatttgtaattgattaattcgaccgtgccgaaatgacccgaacccctgaaatcgcttaaatttttattgatcaatttacccttttaatttaaatctgtataaatttttagaaaagttaggacttaaatattttattttaaacatatatttaattgtaaaaagttttctgaatttaatttggtgtttaaaaaaaaataaaaaattagagaaaaaatttgtaaatttttttgttgtcttcaatttattggtataataatataaagaagccgtagtataataaggtttttcgtccattccgatcactcaaacacaacaaaatcaccccggttgatcaatcaatgatgagaatttccaaatcagtatagctctctctctctcactttctctctgatcagtccttgatcactctctgatcagtgtgcgtccactggggctgccgttttggtcgtgtgatgaatgccgaaatgccctcctgcgcgtcgcgccacttcaaattgtcacacattgttgccgtcgcctgccttaaagtcgggaaaatattttaaaaaatacaaaatttctgaaaattttacataaatttg

SEQ ID NO: 2658 - DNA, 5162 bp, Heterodera glycines
  unsure (1)..(5162): unsure at all n locations
atttatataaaggaaaacattttgaaatttttgttatattatcaagcgaatttcattcaaaaaggggattttttctaaagcgtaaaatgccgaaaaatgaaagatattgtaatgccaaggcgcaaaaatgtggggaaataaagaggaaagatgggcattttcagtcgtgcaaaatggcgcagtcgttaaaaaaagcgttggattgttcaccctataaaataggcgcaagttcgagtccgctcggacgcacggctttctttttttgtgaatatttttgattttcaatattaaaaaatgacatcaatttttgtaaaaaaaaaatgaaatttattaaaatttttttaataattttaggaaatcttatttggtaaaaaatgtaaatttcaaaaatgaaatcataaaaaaacgaaattcatttcgtaaaaaaaatttagatttcttttcagcgattttttaaaatttcataatgaattatcaaatttttctttcctacgtaaatcgttgaaaaaaattaaaaaaacttttttttcaaattttctaaattttctttcttgaaaaatagatcgtggttttaaaaattaaaaaaaaaaatttccgggggagtggagctgctgctcccgattttctcaccccataaccctcccatttttccataaattttccacccccttaaccctcaattgtgagaaaattcaatgtttttttcccccaaaattttcgtcgttcgacctgtacgcgtcgcgctcgttctgctccagctgtgcgtagaagaacgccttgcccatgccgaccactgcgcgactgttgtcacaaatgtgttgcgcggcgccgagcgtctcgcgccggagctccgcggtgccgacgaggcgtgacacgagaccaaatttgtgcgcaactgtggaaaaaaattttttttttttaattcgaacggggaaaggcggcggagccgaataaaacatcgccaaaaaaatgaaaaaatttcaaaaatttttagttacctcttgcttaattccaaaaataaataaaaattaagtaataatgaaattcaaggaaatgaaaaaaaaaatttaattgtacgtttttttctggaaaattcagcaaatttttcctgaattttttgtttttttgtaaaagaatttatttcaaaaaaacagtttttcttaattgtggaagaatatacagaaaatgttaagaataccaaaattaatgaagattgaacccatggaaaactgaaaatggacaaagcaaaaaaaaaattaatgaaaaaaatgaaagaattttggcaaaaaaatccaaaaaatggaccgaaaacatttgattaaatacaaaaattaacaataaataaaactcactnttancttccaanaaacntccantcancaccatntcaancccaatttttnntnncacatttcncnacaacnnaaccnccgnnntnccacaaaacanncccancttaacnctncaaaaacanaaaaaatnaaaaaaaataattntnnnccaaancnactttaaacaaaaanaaaaaaaattnctaacttttnaacaaaatttnattccccaaaaatttttttttccaaattttcttanaaaattnnccacatttttannaattaantcccatttctnnactnattttnactttaataaatnnnnccattttnnanatttnnnttnaataaaaaaaatatttttgtggtccaactgtgccaataggcggcaacatggaaaaattaaatttttgagattttcaacgaaattcattaaaaaaatggcatactgtttaaaaatttaaccattttcgttaaagaaattttgtcggggaaatccggagacttttttttttttactcatcatgccaaaaactgtttttcaagtattatttttcgaaattttaaacccctgggagaagaataagaaatttggtagccgcttttaagccaaaaaaaaaaaagttaaaaagtaacccattttccattttatggagtcaaattttcaaaaaatatgatcaaatgatggtccgtcccatccgactgtgccccattaggcaccgtcaagaaatttttttttttttaattttaatgaatttccccctcccttttccctgggggtcactcacccggcgacattaaagctggcacgaccggacgcaatgacaatgtcacaggctgcgaccagctgcgtgccggccgcagcgacgaggccgtcaacctcggctaaacaaaaaaaaaattaaaaaaaaaaaattgtggaccaccctccgccggtgggcctcgaaccatgaaccccgaggggtcaaaatgtgaacggagccaccaacaaattgtcatgggtaaagtgttaaagggcaatcaagaatttacaatatcgctcgtatcctttcgtagcgataaatcggagggccaaaaaaaaaaatttttttttgaaccgacccaaaaaagtagaggattatcgcaatccgggcagaaaaatggcttgttaaattacaaaaataaaatgacaaatgaaaaatttagaaaacaatgcattgaaaagtgaaatgcgaataaaaaaatttttaaattagaaaaattgcagaaaaacacatctgagtcgaaagtttatggctccgaaacgataattcgaaagttttttttttgaataaacctgatgaattccacatttaaaaatgagtgtttggctcgactctgatatattttggtagggatggggtccggatttcgagcgtcggttttacaaattaaaaaaaatgaaacaaaaaatcacaaaccgatgacgggcaattgcatttgtcgaatgaatgtcatcagttccaaacatttgttgaacactttgcggtgcatttctgtgccggattcggccgtctaaaatgaaattaaaagtaaaatttaaaaagggataaataaaaataaatgttcggttcagtatttttttttttggaaaaaatctcggtccgtaattctgccaaacttcgaatattggcatgactgagcgccaaaacttgaaagaggacagtttttggggtataagtcctttcttttacttcggtttgaaagcatttgttaagcattcgatagccctaagttttctcaatttgcctgcaaaatttcgaaaaaaaattaccaaaaaattgcttttccgaagctttttgggtcataacttttttgatattgtaatgaatttcatgaaattttgcaaggaaatagagaattcttaggcctatctgatgctatcaaattcattcaattcggagaaatatgaacggaattataccccaaaaaccggggccgacatccagttgaccgaccccccattagtgccaacttttccctcgcccatcaagtaaaatttgaatgaaaaccgtgccaattccggtagatggtgtccaccggagtaggcaggccccgaggcggcgaggatcaccacccggacctccggccgagcgtccaactcgcgcagtgtgtcgtgcaacatttccatggcggacaaggacagcgaattgacccgcttgtcgtccataacctgccaaaaatgaaaaacatgcgcttcataccgagccgagacagcctactccctagtttaaagaaaaaaactaaaaaaaaaaattttttttttagttcggaggggaatattggggcggcgaaaactgatgaacagggagtgagtgccgccgaggaaaattttgatttgagtgacattttttgtaaaattcaataatttttagagagtcggcaaggaaaattttgaaatttgagtgccattttttgtaaaattcaataatttttagagtcggcaaggaaaattttgaaatttgagtgccattttttgtaaaattcaataattttttagagtcggcgatgggaaacgcgctaaggcttaggctaggcctaagctttaagctcaggcgttttttatatatattagttgtacgagttgccattgactgactcaccgacggcaccgaacaaaaaaaaaaaaacccccattactgactgaccagccttgccacccggttgcccaggtgccattccgtctttgtcgtcgacggttgttgctgttcaacttgttgatgttggtgttgtgcagcagcacttgcagttggttgttttgttgctgctccatccgttgcgaaggcggcggtggcacgaaacaatggacaaaactttgatgatgataatgcaaataatgctggacgacgaaaacggtgcagcaattggtggccaaatgcttgactcattttttgacaaaaaaatgtttgttatatttttgaaaaattagggcaaattgtggttgtttatttaaatggaggacgccaaaaaagtgccaaaactttgatggattaaaaaaaatgaaatggggatgtagataaattggcgctatttacaaagaggtgcattttgaaacaaaaggggggacccttttgttttgcaaaattttttaagataaaaaaccatgataattttttatccggggttttaaaggtcgctaatcacgaatctgacatgtattttgactaatttctaatccctaacccgaactcgaataaaaatcggaattttgaatttttcaaattatgatttgttgttcgaatctacacccggatatccgcatacttgatgcgaacaatttgatggatctcaagtttcgcgtccattataaatgtattaatataaatcttgaatctatcttgacaaatatattacagggctcatatccagggacctatttcaattcggaccaggtcctcgacttgatttttgcgaaatggactgcaaaaatcctgtttcaattaaatcgaaaaaatcgagtgtcgcacttgattttggcatcaagtcctatttttttgttgcaattaatcaagtcgaggacttgatcaccaagtcaaatgtaaaatcgactgccacattcgattttttaatttttgtttcaattcaaataacagtcatggtgaatgaaaaaagttttcaaatttatcgagagaaaagttaaataaatcgaataaaatttcaaggttgtaagtcgcaataacatgtttatctacatcggtagagcaatttgcgttgcatccggtattgcaaatcgccccttctcacataaaaatcgatagcctaaaacgaataattaatccgtttcttctcatttggtgcgaacaaaacaccttt

SEQ ID NO: 2659 - DNA, 3177 bp, Heterodera glycines
ggaatgcattggcaaactgaaaactctgttttcagacacaaaatcaatttttgtgcgccgttttgagtgttttcagctggcatgtgcgccgactcaaaacgtgctggactttggcgcgattgtcaacgcccgttgcgagcgagccgaaatgacgctgtcgaaagaggaagtcaagtgcatgatcttcatttcaggtttgacagacgcacataaggacttgcggcaggagtgcctccggcagttggaaaaggcaagagccgcaacgccgcctcaggacattaagctggaaaagcttctcgaggagtgccgcgccatcctgtcgctcaaaaactcgtccgctgcgctcgcaaatccaggccaagtccatgcaatttcaacccgaccacaaaaacttggggatgggtcttcaaaaaagcattccaaacccaacaattttcgtcctagccaaccaaattcgggaaattcaaatgttaccaaaacatttacaggcaaatatcaacattctcaggcaccagttagtcaaaagtgtaagcggtgtggtcaagcacacgcggtgcgagactgtttatttcctgtggacgtcaaatgttttggatgtcgaaagcaagggcacacgagaaatatttgccccaattcagctcatccacgtgttcaatcacacgttgtggtttcgactttcagtgtgaatggtgcgaccaaagaatggatatggattccattacaagtcaatggccaccagatcaaacttgcagccgattcgtgttcacatttgtcgatcatacagcttccggtttggcaaagtttaggcgaaccgaggttggaaaaagttggtaaattagtgggttccttttcgggccacaaattgaagttgttgggaagtttcaagtgtgacgttctgttcagaggagtcacaatgcggcttgaactttcagtggcagacaccgaagcgccgagcatcatgggattggattggatcatccctttcgagcgtgccacccaacagccaattgccacgactttggagcagcagtcgctcattgtcaacagtgtgcaaccaacaaatgatccggtcaaattggaagggcaaatcaaggcttccttcccgaaggtgtttcaacctggcctcggacattgtgtgaagacgaaggccacgctgcatttgaagcaaaatgtgaagccagtgttctgccgtgcgcgacctgtgccgcatggagtccaagcagcagtcgacgaagaattggaccgacttttggactcgggagtgctgaagcccattgatttttcgcgctgggcagctcccgttttggcagttcgtaagaaaagtggtaatgtgcggatttgcattgacttttctacgggactaaacgatgcgctggagttgaacaggcatccccttccgcggaccgaagacatttttcatgctctgcgtggagccaaagtgttttcgcagcttgatttgcgtgatgcttatctgcaggtcgaactggacgaaagttcaaagcagttagtcggcatcaacacgcaccgcggactttttcaatatcagcgtcttccttttggcataaaatcggccccgtctatttttcagaaagcgatggaccaattgacgtccggtattccaggcgtgtttgcctatttggacgacatcatcattgcttcggccgatcactcgcagcatgttgctgctctcattgaactcttttcccgaattcaggactatggatttcgagttcaattggacaagtgccactttttgaaggctgaattgaagtttctcggacacgttgtctcgtccgatggtctgaagcccgatcccgctcgatccgatgccatccgtaatatgccgtcaccgcatgacattggcactttgcgctctttcctgggtgcgctcaactattacggtcggtttgtcaaggaaatgcgcgatttgcgtgcacctttggatctgctcttgaagaaggacactccttggttttggggtcctgatcagcagaaggcttttgatcaggccaaacaggttcttcaatcggatttgttgctgacgcagtatgatccgagtttgccgatcattgtcgctgcggatgccagccaatgtggaatcggagctacaatcagccatgtttttccaaacggagtggagcgcgtcatcgagcacgccagtcgaacgctcactcccgctgaacgaaattacgcccaaattgaacgtgaagctttgtctctgattttcgcggttcaaaaatttcacaggatgatttacggtcgtaattttactctgttaacggatcataagcctctcttggctatattcggtaataaaaatgggatcccgatctacacggcttcccgattgcagcgttgggccctaattttgtccaattatgattttacaataaaatatgttaaatctgcaaattttggacaggccgacgttttgtctcgattgatttctgagcaccggacagacgaagaagtcattgtcgcccacacatcggacaacgacgtggacagcactgaagaagtcgaatatgctcttcttgtcaacttggagcagctgccagtcgatgcaaaagaagtgagcgaactgacgacttcggacgatttgttgcagcaggtggcacaattcgtacgttccgggtggccaaacatgttcaattttgacaggaaaccgagtcattgttcctgcgccgcttcgtcaacgtgtactcaaagactttgcactttgctcatcctggcattgtgcgaatgaaggagtcgtacaaaacagaagaggattgttgtcaggagcttttaataatgttgttgcactgcacacggcaaaacagacaacagcccaaagcaaacagcaaaacacaaaacaatgccgaagataatttattaattccaaataaaatagggcgaggacaatcaatagggataactgacgaccgcataaaactaacaactaacacttcacaaaaatcacaaacaaaaatgaaacaaattaaataacaaaacgccaaatatattttaaaatcacaatattagcacatcctcgccctctaagaagcgatgtcctcagcgctttgggctcatcggtagtgcattcggcgttgaaaggggcggcaagggtgtcagcagtggatcggttcggcatgtagtagcgttgcaaggtcagacctgtaaaaacaacggacaaaa

SEQ ID NO: 2660 - DNA, 11109 bp, Heterodera glycines
  unsure (1)..(11109): unsure at all n locations
acatcagacagttggcacgtgtgcgaagcgagaggggtgcgcgaaaactagtgcagcagtcaggcggatcactttttgcccctttgttggcccccattctgattgaggctgcccgatacctgctttcgcgcagcaataatggccaataaacattctgctgccgtacgagcactacaaggggctggttgcagcgagggagacaaagaatgacgacgatgacaacattgctgagcggacaaacttgggctttgtcaaacgataagtgaccgctgcagtacagaagcggaagggaaacgtcagcgaacggaacgcatgtacaaccagcagctgcgccggtacctaaagatgcgcaaggagcataaggagcggcccgtccgggtacagctcagcaacggcgctcaactgctaaataaaacagtggagacgggtgtgcaggtacggcctggtccggacgaaccgaaggacaagtccgtgatggttaccgacgaagatgaagaggaagaaattgaagtgccaaagtttttaaccccaacaagccagacgcagggaagcagccgatcacccaggaccaataagaaagcagcaaaacagcaaaaattgatcgagaagaaggaccacctgttggccatcattatgtctgatccgcagagattcggcgcaactgaccgtgtgaaaatcattaacccaaagacgggccgagagttcattgactcggacctggcctggtcaattgaacgcctggtggaccctcgcccggagaatgccccttcgccacgcggaaccaaagagttgaagaggaaactcgcacagaatccgcttgccagtagcctactcaatcgactgtttgttgggtctgggttcgtcggacaagtcaaacaaagcgggcgttttattccctcaaaatggacaagaaaataaacaaaatatacaccgacncggccaatccgggcgggtatgcgggtgcgagtgccctgtacgcggcggtgaaggagaagcacccaaagttaaagcgtaccgagtttgaggactttttgcagaggaacaccacctacacgttgttcaagccaaagagagacaagttccgacgcctacgcactgtgcctgcgggttttatgactggtgagattttgtgcggcctttttacagtttattcacgggttcagatgttcaggcggacttggccgatttccaagccctttcgcgcaagaacagcggctaccggtacctgctgttggctgtggatgttctatcgaggcgaatgttcggcacccccgtaaagagtaaacgaccgacggacatgaaaagggcttttgaggagctatttgagcaaatgccaagggtgcctgacacactgtacaccgatcggggactggaatttgtggcaaacccgctgaaggagttttacgctgataagggcattcaaaagtttgagaccagttcaaagaagaaggccgccatggcggagcgggccatccgcaccgtaaagactcggctgtacaaatatttttccgccaacaacacgtcggtgtgggtggatgtactgccaaagtttttgagtgctatcaacaactcggtgtgccgcgcgaccggacttagacccaacgaaatcagcgacaccaatgcgagggaggtgtggaagagggtgtacggcgaaggactcgcacaattggacaagacaccaaagatcagagccggggaagcggtcagaattcccgagcctaagcacattttcgaaaagggtactgtaattcacacattttccgatcaatttattttaatttttaaggctatatccccaattactctgatcacgtgtacactgtggatgagacccgctcaaccaacccccagcactatttgctcaaagactattatggcacaaagttgaagagaaaattttatttgccagaattaacaaaagtacaagtggatgaaaacacaatgtatcgaattgaaaagaaatacaaagaacgagtgagagatggaaaaagagaagtattggtgaaattcattggatttcctgaaaaatattgggtgaaaaatgatgaaataaatgaataaaaatattacaaatttaatgaaaattaaaaaataaaaacaattatggcataatgtcggggtcgttcagctcctcttctgtgaacatgttcacattgaggtctgggttgaacagacaggtgcaagcgccagggcagttccacttacaccactcttcgtcgctgtacccaaagggcaccaccttcaacccgtgatccctgaccacccccttattcacggtcgggttgaactgcttgaccaaggggacggtgaaaatctctcccttcttggtgatccggaagttcttcgttgggtagttgaagcggacgttgttgtccggctgtcccagcttgttctgcaccatctccttcatcttctcgaaggtgatgcgctcgcaggcatccgagtccagggtgatcccgcgcagcttcagcttgtactcgtcctcccccgttgcgttgttgcgcagccacaatccgtacgccttgggccccgctaaacaaaaaatttccatttattttgatctatttttaatgagtcttaccacaaatgaattccataatcgtgtggttcgggtactcgtcggcgagctccccgagctgctcaccacccggaagtgggtcccccagccgcgtcaagtagtcgtaaaagatgctgtccgtgtcctgattttaaaaaattacttcacattttcattttattttttgaattttaccatgtagagaatgcgggtgtcgtagcgctctacacctggtgcagggccatacacctttttcagcgattccagcaagtggattcgcgcagcagaggtggtccatagggcaatggccacctgagaaaatttcaattgtctttttttaaatattttaaaacttttcttacattgcttgtgctgtgctccaccacatgctcatctttggccttgtagcagaccatccagaacttttccgtcagctgatcaatgctgctgacctcaatcttcgagtcgttgagcagtttggccagctcggcatggcactcgacgatttcggttttggtaagccggtttctgtatgatttgtattttttcataattcttaaccaaaattttaccgaagtgcgaaccggccccacagcgagtttaaacacaacttggacaggtagcggagcccgggattgtgcttgatccggtcagcctccagatgaacgtgggccttttgtttggccttgtcgctgtggtcctgcttgcgccgttccgactcctcctcactgatgcccgcctccgtacaagacgctggatatccgcttgcttaaatttttgttaatgatttttattaattttttttttaaattttaccttcaaatttcattttgagaaacttcagcaggtacgagtggaacagcccattgctccaatcgcacgccagaggccagatataggcacggtacacatgcgtcaccttgtaccacgagcggagagcggcttccagctcaatgtgtgtgactgttgtcgaaaagcctattaagaaaaaatatttgcttaattacaagcttcaaactcacccctttcagagtcctcaaaatgatcgcaattgtactcggggtcgatcaagccgcgcgggtacatttcggaacacgtccggcagaggggaaacagcgtgcggttgttgagccggtacggaaggaccgggatatcgtagtggcagtggcggggcggcactacgaagcacttgatgatgccctcaaggcggatgccgtcgtcgccaacaacgtcctctggacgcctccattccacgtccttgtcaaactgcaccacggtcgggtggccaaccggataattggtgaacatattccttaaagtgccaaagatttttcaactattcatttttttccgacatttcttaccgcgacggataaagactgttaaagtccttcactttgatcgtacggctcttccagtcgcccgtctcagggttgatcaccgaagcgcccaaatattcgggccctgttcgacctgtgcccaaaattattttgcaaatttaaacccaaaaataccgccaaagaaggcgtcgtggaagtcaattggtccggagtccgggcagttgtcgaagtacgccttcatggctgggttgtcctccagcattgcgttcaggtggcactcccagatgatttccacctcgaactcccgcgcaatgtcccgggttcgcttggcatcacgggccctgagggccccggccgtttctcctccgcccacaatcgccgcatcatcgggaaagcagcttgggcatccatgccaatagcaccttttgaatgggtaaattggcacatttttcgaattctttccttacccattgacctcgatggccaagtttttgtcctcatcagggcgctccatcatcccgtccaagctgtagttgccgaatttgaactcccctccagggctttcgacatggcgcaggactcggccattctcccgcaattcttcttcggcacgccactgagagtcgacaaaatgtaaaattaaaataatttggatacaccttcaaatatttccgggcgatggagctctgtttgcctcacttctcgtatcccaggtgaggaataatggcgacacgttctttgtcgtggtgagccaactgcacccaatacttcatgcagccggacgggatggtgaccgaatccgtgatgtcatgccgagtctcggacaagaacagctgccgcatctttaccataccatgggccaggatttggacatcttcaattttttttgttatttttgcatgtttttttttcaaaaattgtacctgtcttgcagtagtccgcgatgacttcactgagctcaaaaccagtttcccggttctcgtcgtaccactgctcaaactttgcgcgctctgccgggaagagtccacctgggtaataattctcaatcggtggcagggtgtccaacacagtgccataattttccgcctaagattgtattaatttttatttaatttttttataaattcctcttaccttattgaatttgtgtggaaaatatttcttgttttccacgccctcaatttctaggccaaacgtcttgacaaaattggcaagttttattgggatcaacttgtaactaaagtgatcaaaaattttaaaagatttaatattcaaaatatttacctgtcccggaaaacggtggttgtgtagactcctgttttgcgggccttcatttccaggagatggttcacctggcggatgagttcagggcggacacccatgcgcagcatttcaccataaatcagcacatgatcgtagcgggaacctttaaattttatttcttccaagtttttttaaataattccaaaattaccggcgtgggcgtacgcgtatgttgtcaccgactccggcttctccccggcttcttcgtaccccagcatccagttgttctcggcgtcctcatctacggcatcctcttcttcttcgcattccatagcctcgccgtcggtgttttcggcattcttcctttttctgcgcttcttcgcaccgggctccatgccgaggacttccgtttcgaagttcagcaaccacttggtgaaggctgccagtgggtcttcgaccaccttgcggcattccacgtccgtgtgccagaattcgaacggggaccaggcataagttcggaatcggccacaaagcgcgcaggccttttccaattcctgatcccaaacgcccttttcaatgcagcgggtgcatgtgacatgggcaaagcagaagttgacctttgaatttttcataatttgctaaagttgaaaaaacaaaatacctgatgcttgaaccgcatgagttgcgggtcaggcttgaagtccgttgtgcactcaaagtcaaagaacacaaagcgcttctccttcttaactttgggccggtagggaatgtagcagtcgcggggggcgtggaagccaaggcaaatcttgcagaatttgtggccgcagacatgcccctttttcttgtcttgatcctgtgatatttattattttattttacgaatcttaaaatacaaggcctaccgccattcggtaaatcacaccacagtcaacacattttttcgagctcatgcagattgattttcccacaatttcctcttcgttgtcacgtttgacccggcagtttgtgcatttggcatggtgttcatagcaatcacgacttttaaatgtctaaacaaaaaaattctttaaacgaaactcaaataactttactttattgcaccccaagcaggtctgaaaaaagttgtcattgccttggacgcagtttcctcgaaaggcagacccaacacgcaggcagttgtggcatttccatttgcattttgctgtgtgttgcgtttgttgatgaaatggcatctcacactgtaacatatttatttaattacagtataaaatatattattatagatactccaaaacaatagttgcgggcactgaacagttttccaacatttttaaccgggtcgtaatgcccgtcaccgccgttttcgccatcgataaaaagaacgcaaagctcatttttatactgttccacagttgatttccacgaaggcttcatttttccaaacgtctcaaagcagaaaagccgaaacattccgggatggagcacctcataatagtccttaatgataaatattacgaagaataaaataaattttgtgcctgaattatttctccatattcctctatggaatagaagggtaggtgcatgtcaatgttgcacccctggcccagagcctgcacgccttcaagctgttttctctcatccctcttatactcagagaagcgttgtcggggcaaaatgcatttcattcgcagcatttcaaacgcacggaagagacaaaggttgtcattggtctgcagcgcaaaagtagcaccatcggcaatacggtagtcgatgttgaagtcatttctcccttttccagccattttcggtttggcgcacttgctctcgattgccgtgatgtcaattacaaatggttcttcaaggagtgatggcctttccttcgctttgttgctttggtcgaccatttcaaaacgcgtcaggattttttctgttgccgagttgtccaactttttaaagtgtacagccacttcgtagtcaaggtgttttgacgtcagaaggaaaatgaagtggtccgcggatattttcattgatttggccccctcggaggcataagaaaggcacatggtgaataaattgcgcagaatgtcctccggaaaaacagcactaaacgttaggctcatcaaaaattgcccaataaaacggaacgctaaacaccattttaaaaaaatacctcaatcaatcaaagcacaacaaaaattttttttaaatataattttcatagataaattaaataataataattttatatgatgtattatttacaaccacacctttaaaacgtcccgcttccacctgtgtggcagagagacatgtaaagccatcgccgttgaacaattccgcctccaattcgcgggtaattgacggctccttctgggccttgcgctcattgttgtccgatggcacaacctgaaaatgtctcccaaaattagaaaagaattttagaaaaacatttcgtaaaaactaaccgagatcggaaggcgtttcataacctcatccaatggcggtgcttcgtccatcaattcggtgccgtcatccccaacaggggaatacggtccgtcgagggtagaggggagggaattgtcggaatattggctcattgttttctttcttaaatttaaaaaaaaagaaaattcaaccattgagtttagttaaaaatgtcaaagaaaatggccgatcaaaaaaaaatcgggcatgacccgtcccctgagcgatgttttgggccatttttggagagccaaaaacgcgcataggtcagcccctacacgtgtttttaaccttccggcccaaagccatcacattggagggcatacccaccaactatgactatcatagcaagcgattatggaaccgctcatggaactcaaagtgtgtggcactaccataccaaagtgcggaggtatggtgtaggcatctctatgtcgggtaattactcccttcacagagcattttcgccaacgcccacagcacatatgagttccgtcaacgcggattttaatccggggtgttgagtttgagcagctgcgcgttcgacactgctcagtgactcgcggtcctccgggccagccagtcccggttattctctcgctgtaccaatgcagcccgtaggcagggcacattagggctaggaaccgccacccccgctgctaggaacaggcacaccttcaccctcaaggccagcgagtgaagggcccccatccacaccagaccgactatctggttaggcttaaacatcgctgtgacacccggcgggctatgacggaaacatggtttcggtcagtcactgccgcagccctggataccagcggaataagccccgtggacagtgaacgcccgtgcccacccctctgggaagtaacccagtaccggggcaggactcctcggtttaaggatggcccccaggatatttgaaaaggcttaacaaatatcctaaaggggtttagtaccgagtaaaccaacaaaatgaaaaaatggggagagaaaggacagtgcaaagtacttgtgatcaaagaaaaatgaaaaaaaaacaagggaaaaatgaagaaaaagataaatttggcaataataaaattaattttaaaagaggaaaagaaaaaatttatagaaaaaatagtcaaaaatggaaataatttgaagttaaaaattttaaataggacaaacataatgccaagagtcgaaataaatttttaaatttgttaaaacagaaagccaagagtgaaaataattttaaatttgaaaaaaacagaatgccaagggttaaaataatttttaaatttggaaaaacagaatgccaagagtgaaaataatttttaaatttgaaaaaaacagaatgccaagggttaaaataatttttaaatttgaaaaaacagaatgccaagagtcaaaataattttttaaatttgaaaaaaaatgcaaagggttgaaataatttttaaatttgaaaaaaacagaatgccaagggttaaaataatttttaaatttgaaaaaacagaatgccaagagtcaaaataattttttaaattcgaaaaaaaaatgcaaagggttgaaataatttttaaatttgaaaaaaacagaacgccataatttaattttgaaaaaacagaatgccaagaattaaaataatttataaatttgagaaaacagaatgccaagaattgaaataaaagaaaaataatttttaaatttgaaaaaacagaatgccaaggattgaatatttattaaaatttaaaaaagagaatgccaaaaactggcaagaaataattgaggagttttggcacgaaaaggtgcgacaattggcaaatgaaaatgtgaaaaaagggggcaaaacaatgccaaaaatggaaggaaataattgaagaattttggcacaaaaaggtgcaataattggcaaataaaaatgtgaaaaaaagggggcaaaacaatgccaaaaatggaaggaaataattgaagaattttggcacaaaaaggtgcaataattggcaaataaaaatgtgaaaaaaagggggcaaataatgcaaaaaattgaggcaaaataaatgataagggattattgattggcttttccatccgtaaagtgaattaaattaaatgaaaatgaccaaatggacaaaaaatcaattagtaaattgtttattgtctgaaggtgtcagattacataataagcgtgcgggagtgtgggcggcactacaaagtacgcgacctattaaaaaatttgatttgtttatttggcaccttttcaacacccccgcccctccttaattgatttgtttatttgaccccctccccccttctcgccgcctgctctcgcccccctctcgccgctggtgacgtcaatttttccctttatgagagcaaattaatgtttatcatcaattgccaatgtggccgagtggttagtgcgtcagtctggccgcccccctggggttcggatccgcttggtgcgtggaatttttggagaattttaaatgaatttaaattcaacgtctttgaccttttaagacgtttaaaataatttagaattaaataaatttaattaaaataatttgcataaagtcgcgcagtcaaaaaagtcgcgcacccccctgcaataggtttgggtttgcaagaaaaactcgcgcaataggtttgggtttgcaaaaaaaagtcgcgcaataggttttggcttcagtactgaaaagtctggcgctcagatggcccgcgctcacttggcggcgctcaaatggctggcgctcagttggccatacacccctcccacacctatggggggctaccgtaatccggacaaaatggagtgggtaactactcagatggatgaaaaattttacaaatttgtgccatttccgttgcccgagcgtccgttgcccagaaaaatccgctttaaattccttaagattgagtaatttaaaatcagagttatggcaataaaagcatttattccattttcagttacatcgatcacttcgtcatcgcttttcttcgttcaaatcaacaaatttttgacaaaagaggcaccaatttagagttgtggatttattccgcacacagctcggatgaccagccgatttgggatgtttttgtgcgtgaaatatggccaatttttgcatcaaacattcgccacttgcgctttatcgatggtgatggtttggacaatttgcgtcgtcgcacttcgccgacaattctcactgatctcaaactgttgaattcaatctattcatttggtctgttgcctgatccaattagtgattttgacgggccaaatgcaactgctggctaagcgttgtacaaatggttgcaaactccgagaaaagatggccaacccaagcgattgcgttgcaaagattttaacaaacatgtggatattgattggngtcacaaatcaaggaggtgtggccataatttcggcaaatcactgatttttgatttgacggacaaacaacaaataaaaacaat

SEQ ID NO: 2661 - DNA, 1676 bp, Heterodera glycines
ccggaatattattttctgccgaaatggctggattttcctttttttgaggcctagaccttaattttaaggtctatgagaattttttcgttcgttgtaccttcccgtcttttggccattttttgcgaacattaattatttctcgcttggaatggcgtgtatttaaactcctaggattttcttaattcttttttaaatttccaccttctcaccccaagggcaaattacggcggaatggtgggcgccatatttttcttggaacattgtcacacattcatgcattgttgtccaagcttaaaaaattgagaattttgagaatttaacaaatttgaattgccttgggcacgtgcaaaatcttttgaaacgaaaaacagattgcctaacgaaacaaatttgttcatgatcggctcatccaacggatgctcaaattcgattgaaataattttctgtgatttttcggccacatttgaagaagagttgttgctggcagagtaaatatattcaaccatttcgaccaccgactcaatttttgacgtaaaaccagctaaaaatttttgcaacttttaaaatttaaaaataaattaaattccataagaagtaacaattagttacaaattactcaattagcaaaagttaattatttccaagatgcgttatgtatagaaattgggcactacaaaaaagataaatttttctggttattcaattaagaaaaattctgatgagtaacaatcaatcaatgagtcaaacaaaataaattaaataccgtttaagtctaacaaacatttataattacctaattagtaaaaaccaataagtttgcccggctgggcaattattattcgcatcccgaattgctcgagaaaattataataattcccagtgactcaagaattgacatactttcaaaatggaaccaactgaacccgtccaaagacggcaaatagcgtcgcaaatcggccccattaggccaacgtttgttgcccagtgaagaaagcagtgttcggctcccgttcagctcattaattaggcaaacctacggtgaaaataagcatttaatttattttttattatataatttaaatagaaatattaggccattttctcccggccgaaggccgggagcgccctgaaagtggtggaagggtcttacaactttttgaggcgcatccgggaaaaatatagagaaaaattctgcgcggacgactgagtcccggggaccgatttctcactttttcttgcgtttgttagcccataactttttttctaaaactcggatcaaaaaattcccgctgtgagggccctaagtgagaatgttgcctaaaagttaaaaaaaattctaggcctctagctctaaccccctgggctgggtgcttctagaacttttcagtaccaactttgtccagttcagtccccgttgaataactcattaggctttgacctgagcgtagggtggccagcagacttattgtagagatcaatgagctggatttttccaaattttaaaatttcgaaaattttcaaaatttttcgagctaggcctaatatacggtttttttggtttttgaattttttgattttttaacgaaatttcccaaaaaaatgaagaccacttccaaaacatcggtttttcgagttctatcgattggttaatttttttggaaaatttttcgattttt

SEQ ID NO: 2662 - DNA, 4134 bp, Heterodera glycines
cacttttcaaacaacgcatttccgttgggaatggcactgaacaaaagtgccgactcgggcccgctcagctgtaccgccactttggcactgttggtctatgaaaattgaatttttacacaaggagcccaatataaatggcaaaattaaactcactgcattgcctcccagtgttagtgtctgtaaaattaaaaaacacttgaatttaaaaattaaaaaatataatttgcagcacagtgtttttgtttttattttaattggcccaagatattttttcagaattaatccgggaagaaaactggtttcatttaaggaatttcgatctgtgtttaatcaaaatgcagcaccatcgaaaatattaaaagtgtcatgaaaaaataaataaaatatgcatttttaaaatagtgccggattttcttaatgatttggctacacttaattgtacctggtcaagaaagcgcaaatccgaatcttcttccggaaatccttgaacatatgtgacaacatccaaacaacaattacccacgaaaagaatttttcccattcaaaactggagaaaaccgaaataaatatttttttctcactcaatcaatgatctcacaataacatttccgatacttttttacatttttcggtagatttttatttttacaaaagaactaaagcaaaatatgtacacacaacaccatcaaattaaaaaccggagaataaaatatcaaaaaaagaggaggtggatagaacaaaaaaataaaataattttaatttttttcaaacgcaaataatgaaaaattaattagctagttcagttagattttattgattctaaattaaggaattgtttgtaactgaaatgtaaataatttggcgaaaaaaaaacaaattttatttggttcctttctcttatctatggaggttaaggaccgtaacgaatgaattgggcgcccatttttatgatgggatgaatgaaagtacaacattttaagaaaaaatacagatgatgatgctgttataatgaaaattgttggagcaattgataatataacatttgataggaaagtaaagaattttttttctaaattttattataaatcaaacggaaggactttaaatttaaaaaaaataaatatatttattattagggcagccaattttatgtaaatacatacaatattttttcctggcttcttctccatgctctaaatagtaggaaaaacacttacgaaactcatattaaatttttcagaaatacttttggcattgctcagaagtaaaaaagattacaaaaaaattaataaaatcctgagttttaatgttggagtttaattaatactgaaattgtttttatttatattattattattgtattattaaatgcgaccaatcagtagagagagagaaagagaaattattcagtttttaaaaattgcatttttaattattcaaattgaaattgaagcagaaaagaaaaaagtggaacaaaaaccatttgacgaaatatttggagaacaatgggaagaaaaatgtaatgatcaaaatggaaatgatcagaaaaagagagaaatcgttgaaaaattcaacaaaataaaagagaaaactaaacaaaaagaaagaaaatgttcaataaaagaatggagtaaaattgaagtaaaaatagcgaaaaaattggggacaaatcgccaaaacatttataaatggatcaaagaattaggcctatataaatgccacaacaaatcaaaaacggatgaaaaaaaaattgaaattgtgcaaaaatttattgcaaagaaaaatgagtataaacaaaaaagaaaatatttgaaaaaggaatgagagaaaaattatagtgaaatttgtaagaaaatcggagttggccatacggtaattgaaaaatggaagaaacaattcggaatgagtgaaaaaagaataacgaagaaagaaaaaatggaaaaagcgaaaatgtattttcaaatgaagaaatatttttgagaagaattaaatgaggattaaaaaattaatgattataaatttggttcattgttcgcttttttctttacggattataaatgattatttatatatcttttagaaataaaaagctaatttttggttgaatttggtgattataaaaaatccctactttctaccgtatttcaagggaaaatggccaaaaattgatcatttttgagttgtccaattttcatatctacaagtcgtagccctaacattcaaaaggcaattcggtagagaattttgtgccctttcaatgagcctatccaaaatttccagaaaaattttttaagcaagcatgaattatttaaatttttaaatatacctatgtattctagaacagaaaaaatatttaaaaaatccgaccttggcgccaaaacatggccaccaaaatgacctttactcttttgaaatgcctatttagcaaaaggttaattaaagtggctcaaaaattttaaaatataatctggaagcgtctaatatgatggctagcgcgggcttgttcagttctgcgtttgcgtttcgcccatcacaaacataattgcgatttccgggttcaaaattttcaactccacgaaatgtttgccgtccaaaattctgctgaaaattctccatttgttgctgcgggttgttgtggcaaagaatattctccgttcgagcgttcagagcaaggtgttcggccgaatttgtcgctataccagatcggtggttagccgattgacgcagagctgtcagttgggagtggacagccatttgacgcacaaaaactgggtgggcgccgtccaatctcgactgcgtatactgcacatcatttctcgccgacccaatagcatttccatgtccgccaactcttcggccaataccatgcaataaactcactggatttgattcatgggcgggggaataggtaggcactaatcccgcagtgttcaaattactgacacccaaatcgaaattgtttgacaaaaatctttcgtttgtctctcccaaaccattttctctcacatttcttttgttcacgcttgaactagaactcacaaccggtacattcatcgccgttcgctcgttttgttcaatttcatccaccacaatcaccactgagttgccggtgttccttgtcgctggcaacaatctgtttctcaattgctgttccccgccaaaattttcttgccacgttagtggtggcgttctcacaaacattctcgtttaaccgtcttggttcaattccaaaatcaaattcgacaatcttctcagtctctgagcaattttcgacaactttcaacaatttaaaaatttcggcactttctcagtctttgagcaaaaattttgtgcaatttctcaatctttgagcaatttgcaatgccgtctgctgcgtttattcccagtcttcgggctctaacaacgccgcagatatgaaagtcgaagtagaaaaacaaaagccaaatttggtctcctaccaaatttaaaattcaagaaaacctgcagtgagcttacccaaaatgtcaggagcgccaggtaatattattttggtccaccgcactcgaagaacactcacaacccaatgaccaaataagctttcactttattaaaatcaaacacaaacaaattcagaagacgagggggaacaaaacaatcaatcaaatccaaaatgacggagaacagcaaaacatgacaaaaactttaagaggggagaaataattgcatgaaaatgagaatgaataaaacaaacatcaataaatggtcaaaacgacaagcaattacgcactaatttaaataataacacagtgggaaatgttatggtcatccaagttgacgtccttggcgaaaagacgaaagcaatgctattgacggaggagcccaaatttcggtaattgatgccgcatttttgtacaagctgatgaaaaaccaaacattgaacatgcatgacttgcgagtggccaaatcggagacacgaatttccgatgctaatgggaatccattggcttgtttaggcgttgtatgccacccgattttgagaaatgattacactaagaaagtgcaagttgctttgcatatcgctcaggcaccaattgggtttaatcttttgttcggaacgaatgctttgaattccttgggttttaaactttttgatga

SEQ ID NO: 2663 - DNA, 2020 bp, Heterodera glycines
  unsure (1)..(2020): unsure at all n locations
caaaatttttggattgagccaacaattggaattggaaaggacgagaaagtcatagccccaatgacgaatttttcgagtttgtcagtcaaattggacccagggaattccatcgggaaaaatgaagtcgtgagtcatgtcgaagaatgcgaaaattttcttgcaacttcgaatgaatacttcaaaaataattatgtagcaacagatgatcaaaatgtgtcaatcgatagaattttgattgaaattctggaaaaaaggcaattccagattcggaaaaacaaagtctgttggaattggtttcgcaattcaagagtattttcgctgtttccgattcacagctaacccaaacaacccttattcagcatgaaattgagacaggaattgcagcaccagtgagatcgaaaatgagaccagtgccttacgcatatagagaaaaagtggccgaaatgttgaaagattatttagaaagggatttaattcgtccttcatattccccgtgggccagcccagttatcgtgccaaagcgcgatgggtcgctccgtttttgtgttgactatcgtgccgtgaattcgataacacgaaaggatagttttccattgccaaacatagacaatactcttgttactgggaggtaaaaaattttttacaacgcttgatttcatgtcaggctactggcaaattcggatgaaacccgaatcggtcgaaaaaacggcgttcataactgagtttgggctccacgagtttgtggtaatgccgtgggttatcgaatgcagtggccacttttcagcgttttatgaatcgactttttgaaggaatgatcaataaatttttatttgtttatatcgatgatgtgttaattgcttccgaatcacttgaaagccatctcgaacactagaaatgcgtttttgagcgtattgaaaaatcaggcttaaaattgaactctcgaaatgccaatttagtgccgaagaattgccgtttttaggtcacactttgactagaaatggaatcaaaatgaacgaagaaaaaatacaaccagtcaaaaatttaccggttcctaaaacaaaaaaagaattacagtcattattaggcttcttcacttattataggaagtttatttactcggttggaaccattgcagcaccactttttcgtttgttaaagaaggagacaaaatttgaaattggcgaaatggaaaagaatgcaattgataaattgaaagagaaaattttaagtgatgttgtactttatttcccaaattttgaggcagcgaaaaatgacccattgaggaatttcattataatgacggatgccagtaaaattggcatttcggcaattctcagtcagcagaatgaaaaaggcagaattcgtccaatttattttgcctcaaggcaatgtaacaaatttgagtcgttatgcgccgaccgagctggaagcattggcaattcgatttggagtcatcagttcataacaatgattcctactagagtaataacggaccataaatcgctgatcggaatgtttaaaagtaaaaaggaaaccggaaatgcacgagttgacaaatggatccttgaattaaactcaaaattcactctgaaagttgaataccaaccggggaaaaagaatatgattgcggatgttttgtcaagaacattcgagacaaaagagtgtgaaacgttagaaattgctgcgccggaagatattgcattgattgggatgttaagaattgaattggggcaagaaaagaatttgactgttcatgagaaaatggaatgtgttcgtgaaacaaaagaaagcgaaatgaaatttgtttatgattttttgagtcagagatttattcctgaagatcctaggcaacaaaaaagtctgatggacatttgccacaaatatattttgctagatgaattgttgtatttttgtaaatcggacggaaaattgaaacttttcgttccagaaaaattcagaaatgangtgttgagacagcggcatgaaagtaaatgtgcagagcatatgagtggcaaaaaat

SEQ ID NO: 2664 - DNA, 1735 bp, Heterodera glycines
ggcgggcgaagtgatcgaggtgtacctgcgcaccatgcagaaccaatgggattggatgctgaacctgagcaagtgctggagggccacctgcgcgacgcgtacaatgccaaggcatttgtggaggagtcggagcaggtggagcagcagatgcagcaacagttggaccatcttgatcgtgaatattctcgtactgatttttcgctggacgatggtgaacagatgttgcgacagcttgactctgtccgtgaatacatccaacaattgcatgcgcgactcatttcactgaccgacaggtgtgcccaaatttcaccgctttggcaacgtggcgaacgcatttcaaaaccgctgccggtgatggcactttgcgagtacaagagcaaggacaaaattcacatcagacaaggggatgagtgcactctgttggacaaccatgaccaaattcagtggcgagtgcgcggtatggacggcgttgaggcttccgtcccatcggtggtgttccgcattcctccgcctgacccgcgattggcctcgttcctcagccgactgcacaaccaattcgagaagttgcgcaaactgtgggatcgcacccatcatttggtccgttacaacatggtgctgaacacaatgcgcacagtgcgtgcatgggacttggacactttcctgtcgattccatccgatcaacgggacgagatcatcaaagctttgaatgaggacgtgaacaagctgctgtccgagatggaccccaacgatcccttggccaagcggcttaaggacgagctgcggatgacgaacgaacatttctacgatttgttggcacgcgctcagaaagagccggagcccgactactccaaccagttcgatgctgcatgtgccgagttggtgcgcaagttcgaggagggctggaagcagctgaaccaccgggtgcaggaacgagtggccaccaacttggaggagttggaacgccaaatcaaagagcacaaggcattcgaagatgcactgcagacgcttgacgtggacgtgtcgaatgtgaaggaactgtaccgccagctgccccacccaacgcccacccagcgtgcagcgcacgacaacatggtgcagcgctggcaagacatttgggagctgtcgcgcatgtacgtggagcggctgaaggggcttgaatcggtgttgaacgggttggacgaagtgacggacattgtgcgacgccatgagatcacgctggcctcctttgacgacatgccggccgcgctggagcgcctgcgcggcgtgcacgcccagctgctggagctgaatatggtactgcaacagcaggaaaacatcgtcaagaagctgaaccgggacactgcaacgctgcgccaacatgttgcgcgcacgcgtttcggcgctgcaaaccatccggtgctaccagttaagccgtgccgggtttcgggattcggcctgcttagttccgacccctgagatcgatctcctccgtccaccgacggattgttggactgggccgtagcccccgcggaaaggctccgtcccatcggtcggctttgggggagggccagtagtgggagtgatgactggggaattgactgactgactggcctcgacggctgggagagccatcgcttaaaaggggaatcccggtgggcgttccaatggggaggtgcctaagcccttcaatcccaatcggtagccgagacccgagtccagacgtacacctccaccccagggcaggaaccgtccctgg

SEQ ID NO: 2665 - DNA, 1375 bp, Heterodera glycines
  unsure (1)..(1375): unsure at all n locations
tattggaggccttgtaacttttgaactaggcggaatgcaccgctaaaattaaaaattcacactagaagtcgaccctgctctatccaatggtatatcatttatatgcattttcctagttacagctcggaatgttcccttgtaaggtgtataaaacgtgtttcagagggttttcggggtcgctaatcacgaatcaagcatccatttcgcccaattccgaaccccggactcgattgattgtcgttaagctgtgttgtctgtcagctgactggttcttacgcggcctattttaattcttgagaaaatttagaattcttagaggtgtattttctgaaattttttgggtcatttcttggtgtcgtttttattgcaaaaaaataggcaccaaaaatggcgaacaaggtacaaaatatgtaggatatcctacgatacttttattctgaaaagtcgtcttctgaaagcgccataaaaaattttattttcaattcgttgctgtattaattttttttgatcctacactgtgtaacattagaataaggacaccctatttttgggagtttgaccacttcccatgaaccgatcgagttgaaattttaactgtacgtagcaattctgaaaatattaagattctaaaattgagaacccgaaataaaacaaaaagcaaataattgtttatatttttgttagagtcgatatttaaccaaacgcccctcagcggacactagccgtagagcaatcattcaaaggcctttttgtagagaattttgtgctctttctgttcatcatattcatcttccacggaaaatttcaccaacgccctagaaattttttgacgaatttgcccagattttcacattttttgcccacaaaaattttgtgtttaatgaattttttcttacataaagtgaatagaaaatgcttaagggatgtctataagttattttagtgttaattgcttccagttcgattcagtgggtcacatgtttgagttgatttaagtctcataagccttgatttctctgaaaaatttggaaaattcaacataactttccctaaaagacatatttctgtctgcaaaactaacaaaaatatgaacaatacatttcgtttaattcttatttaaatgggagaacagaatcttatccaggttcgattttatcccccaaagattaaaaaacaacaaatttagcggtataatcacgacccaaattttgcggaaatggcgcgctgcatcacatcattggcatttgttccgctgggtgcactcattgaagcaattgttgcgcttgaccaccacataccccgcgaattagaccgcgntttttgattggtccccaacaacgaaattttaaacaacaaatttgaaaaaatactttta

SEQ ID NO: 2666 - DNA, 1583 bp, Heterodera glycines
cagcgccaagttggcggcgcccagttggcggcgcccagttggcgtcgcccagtcggcggcgcccagtcgacccccaccggcgacgaggggaaaagtcagagacggagggctaagaaagagagacgacttcgtaaaagtgaaaagaaatttaaatattttaaaagattttcaaattagtgaactaatgaatagataagtctcgctcttcaatttcattccaaattcaaaaaaaaattacgaaattgagtaatatttttataaataggacatcgtaaaattataaaaaaaattttcttcacaaaaaattaaaatttttccttagtggtgtctataaaaattaatttttctcaaaaaaattggctcaaaatcgtaaaattttgatttttctgaaaatctgttaataaatcacacccaagcctgtaagcagcgtcggtcccctgtttcctaaaagtttcttttttggaaaaaccgcgccgcaaaaaagcggttttgaaaagcaaaaatttggtctccgacccccccccccctccggtggatttcttccgtatggagtcgggtcgaccccgcccccgcctttgattgcatgtatgtgtcgagattctgacattttatgggggaaagggtgtgcataacggaaaatacctcaaatacaattatatttattatcattaggtgatgcgacttttagttacgaaaaatctcgaaatagttaattaaaatagtgaggaaaaataccaaaataatgacaaaatcgtaaccaaaagtcagaaataatagtgacaaataatgaatataattctcagcctttaggacatgaaaataagaaaattttattcaaaaagcaacaaaattaagccaaatcatgaaaataaatgattaaactttggagatgaattttaagaaaatttttctttcttagggggtttatttttaaaattttagggtcgattcttaatggtacatttttcttaaattcttggagacgattcttaggggctattattcgttttcattacatttttgttaataaattttgggcaaaacgccaaaatagtgatttctagtgacgaaaattgattttcaaacgaaaaattcaacacagaaatgcgttttttgctcctctcttcaaaataaatgaaacaaaaaaaaattaagtcgctaaaaattttttaaaaaatcatatgatcaaacttaatggcggtaattaattttttttttttttagtttaataaataatttcaatgattttttggtgccatcctttgactatttatacgcattttggcaccacaaacattgcacttttattacatgtttttgcactttgattgtttgtttgtatgtgccaccaaaaatgcatcggcggagtgtgtggccaaaagaagaaaaattttctggaaaaattcttcaaaatgattgatcaatgcgcaattatgtttgatcatatgctctttaaaaaaaatttttatttgagtaattgtctgaattaaaaccattaaaatgttcttcggctatggacattatgaaggatcacatttttaagtcaaaaacaaacaaatccatcaaagtgcaaaaacatgtaa

SEQ ID NO: 2667 - DNA, 1492 bp, Heterodera glycines
ctctttttggcctcctccgttttggccgtgcttataattggcattaaaatggacggaccgacaaaggcaaaaggcgccgccccaccaaacgccgcggggccaatgggacttttggtgattttttaattgcataattaaataaatcaaaattcagcatttattgaatggcaatgaaaagggaaaagcgccctctggcgaaagtaagccaattttggggcagaagccgagcgtagaacggcaaaagagggacgttttggggcacgccggcggatacgtcggaggatgggaccatcccattgactcgacactgtaagaacataaatttaataaaaatggtatattcaaaaatggaaaatgtattttaaattaaataattattattaatttgaattattatttttaaaaagtttagaaaattaaaatatttatttcttttgaatttaattgtcctttattttagtgattgggtaaagagtcagtggaatgatgccaattggctcgccgatgttgtcaacagaaacgggtgggaaaataccggctctcctaccggcggacgatgaatcagtgaattgtgccgacaaaagaacgaaagatgatggcatttttgtttgggaaggaatttaattcgacatttcgggtgaccaaaaagactttcctttttagttttctatgtattaataaaatagcattttcttcactgtttacagattggtcggtgtgataaaaaattttcatactcttttggatagttttgcggttaagcaaaaacggcaaaaatcacttactgacgaaatcaccgggaaccgttttggcccagccgttgggctataacttttttttattcaaccaaatctgacgatcttgatatcattcgaaagccattcacatttcaatttggcgcatgctttaaataaaattgtaattttcttatgagtaaaaaaattttttgaccaaaattttcgatgtgtaaaatcttccggtggctcataaaatctttgtaaaaaaattggttcaaaattgcaaaatttgatctttttttttggacaaaatctgaatctattaacaattgcattaaaaattacaaaatttttcccggtgcgatttcttctcgaatccatccattgtatgcttgtatatgcacctgaaaccttcaccatatcaaaaaatgttaacgaagaaaatctatttttgagcccctttcttcatagaatatgatgcagaaaaaatatggccccctactcatcaagtacctaattttttctaagatttgatcattgtaaattttcttttccgatgaatctagggggcaagaatgagttatcacgattcccgagctcagattcttaatcagcgcatttttctatcccagaaaaaatcgcctcttaaattctcaaacttatttccacgccaaaaaccacaaacggccccattgccagaatccctgcatgtatacaaactccaaacaaaaacaaatttcaaatttgtgccccaa

SEQ ID NO: 2668 - DNA, 3629 bp, Heterodera glycines
  unsure (1)..(3629): unsure at all n locations
ttttgttcttccgattgataaaatatgtattaaattttttntaattcattaatattaagcaatatttattgtttcaggtacaggccatttgagaaatacaggtacaggtacatgcttttttcaaaatgtcgacccataaaatgaaggaataaatctttaattgaaattttattggcaataaaaagcaaaattcccaaactgatgcattaatttataatgaaaatttcttatattaggcaccactctcacttcataaagcaacattcgaggagatttaaattttttagggacttgggcgacagggaccgaattctcattattactgtagtttatggtctcataattttttctcgaaaacccgaatcaaaaaaagttctcttgggagggccctaattcaaatggtggctaaatttaacaacttcaaggcctctatctctacccccccctagcatgggtacaaaaatccagtaccaactttgtcccattcattcctaagcgaataactaattttcttgggtttcctatgagtgggggtggccagcgaacttattgtagtaaaatttatctttcatgttaaattttgaaattttagggtctcctcgaagggtgctagtgcatttcgtaaaaaccgccacccatgcgcgtttcgtaaatccgccagcgcgtttcgtaaatccgccaatgggttcgaaacaaaaaatatgtaacaaataaaaattcataacttggcccaagttcaaccaaattaatatttcatggtattttttaatagctatgggtgtattctttcagaatataatattacaaaatttttatcttaaatataaaaaaagttatcaatcattgaacattctaagttttttgcaatggtcaagcatatataattataaacccaatgttttaaatctataaaatgcaattgagccaaattaatttatatattcgatagctctaagaattctctatttacctttaaaatttcagaaaatttaattgaatttcaaaaaagttctggacaagaaattctgacataagactttttgaaattttatgacgataacttttttatacttaagataaaaattttgtaatattatattctgaaagaatacacacatagctattaaaaaataccatgaaatattaatttggttgaacttgggccaagttatgaattttatttgttacatattttttgtttcgaacccattggcggattacgaaacgcgctggcggttttacgaaacgcgcatgggtagtggctttagcaacccagggggtttcgaggtcgccgatcacgaatatgaaaattattacgaaaatttgaatttttgaaaattctcactactgccataaaattgatttaaaaaaagctaaaagtagtcataaatcattgaaacaccaaaaaatgatcagtttgttcagattctaacataaaagcaaatttttaaaaaattcgaggttttcgaccttttgttcgaatttggtttcgggttcggagtaggcaaaagtgtgcaactgttcatcttgttaatgaaatcattgccgaaattgaaaaaaaatcacatttttaattccgaaatggtgagctggtacttatgtcgtttacgcactataaaaaaaatagtttttataaatcaaacatataaacatttgtacgtggttttcgggctcgctgaccacgaatctgatacccatttcgaccaattccgaaccgcggacctgaattctgtttagattctaacataaagggaatttaagtgaaaaattaattttgacttttgtgcgaattcgggcccaggattcgaaataggtcgaaatggatgtcagattcgtgatcaaggatcccgaaaccccctagaaatgttttatgtatgatttataaactttttttatggtctgtaaacagcataagtaccaccggtgagcttacaaatttggatgcctaacagtcgaattagtttaaaaaagtgcgcatgaagatgaagctgttagaaatattgtttatacaattatagggctttactccacaaacaatacatacacacaatataggaatcacaacaaagaatcatcctacacacattacacagtgatatgttgtctcctcgatcacaacatcttcttcatcttgtccaatacgttcgtcatggcaatccatttgcggatatgcttcacgtacatgttgtgagcgccataagtttgcggaagggccaagtagagcagaaagacggtcttcaaaggcacgtacagcagcagaaggcagccattgatagagccaaagagaaggtccaactggcaaaactcggcgaacacgcaccaataaacgagccactgggtgtattccgctggaaattggggaattggctttgtactcggagagaaagcacagcagaaaactcacatgtgttttgagtgttgagggtcaacaagctcgcgtacattgggtaggccacagcttaaacaaaggaaagcgattagttagcagaggctgcacaaaaacggcactctctcctcaaaacgcactgataagagtagagagaaacaaattgccagggcagtacatcaacacgagcagcacaagagaggaagtgatgtagaagagctgaaaacccgggcaaaacagtgtaaattaaaagaagaaacaagagattaggctggctccaccttttcacgttccattccgcttatttcttcagccttcttgatgaacggatgttccaattggttgagcgttttctgcagcaccggaagcacgtcattgaagtctttgatgggcacttcacgcagctgaacgctcacagcactggcagaagaagtcgtcgattcgtcagaagacattgttgcgctttgattgtcagcccaagacactttagtttaatacaaatgtaagtgaaaaatgacgaaaatcaataatcctatttaaacacattttcaactcgtttgtacctatgtgtgttaggtaataggtcggtataaaaataggtaggtaaaatgccagtcagacacttacttacacatgtatttaaatactgtattccacaatatttttcatttatttcccttctcattgatggaattattgtaaaattttggtgggtgcccgccagggatgtgcctaggtttcgcatttcgcctttcgcataattcgcattttttggcgtttcgcattttggcgcgaaacgcgacttttacacccctaagaattggattaaattccaataaaatttttcaaaattttacctataaattggctaattttcagtgaaaacctgtttataaatgatcaaaatttccaattttttccccggcggcgcctatcggcatcgccgcgcccccaaaactcctattttttcttagaaaatggcccaaaatcgcaaaattggtaatttgatgaaaaactgttctcagcggcgccccaaaactcttatttctcattagaaaaaagataaaaatcacaaaatttgatcattttttagtgaaaatctgtcaacaaattttaatcaaattttcaaaaattttcccggcggcgcctgcctcctcttcccaaaaagtttttggaaaaagcgcgcctcaaaaaagcgttttattgatttttaaatttggaataaaattttaaaaaatgattt

SEQ ID NO: 2669 - DNA, 4369 bp, Heterodera glycines
atccgggttcggggttcgaattgggtcaaaacagatgccagaatcggttttctcgaccccgaaaaccctaaaacaagtttattctaataaaaattttttgaaaatctggacgcagataacccacaagtaccgatttttctatcatttttcatcaaatttgatttatttttttaaacttctctacgtggtgtgctcggttttacgcgtaccatgacattttggcgtctgaaaaatgttttacgcgtctcatccaaattggtttattgcaaatagaaattaaaaaacctcaatattttagctgaaaatctgacaattaaatcagaccacaaataacgaattcatttactcctaggctcataatgaaatttttgaagacaaacgatcaattacggcttgaaaataacacagcaaaatacgttttttccaaaagaaaaatagccatttcgtgcttttgaactggacataaaatttgaattttgaaaatgtatacttgaattatcacgtttatcgatatccggtgattagccaattatacatacatacaatatatatatatatatatatacacaaataatgatcacacaacggttttacaatgacaagtgatcacagacaatatagcacattaggcacatatgggggaacaatatgggatcatttaaaatcatttctgatcactgtcgatgaacatcattgaagcgggttgtagagcgtcttgttcttgtgccgtccggtggttgttcaggccttctgcgacgcggctcctccagctgccgacttctgcgacgcggtgcccagtgccgacgctcctccagcaggcgctgctgacttctgtgacacggttcctccggcggctgacttctgcgacgcggtgctcagtgccgaggctcctccagcaggcgctgctgacttctgcgatgtcgtgctcatagccgtccccgtgccgggcgccgcgtacgctgagggcactgaaaatgaggaaaaatgttagggtgaacaaaaaaacgcttccccgcccgcccgtccctctcctctcacccgccgatccggtccccgctggagccaatgatttcttggaggcttcggctggcagctgtcccaccgcggaagttccaccaggtgctgcgctctgtcccgtcggtttggcgctggcctccgccccttcctgtcccgccggcatttgcggctcttccgtgttctgaaaatgaaaagggaaatgattttaaaaaatcagccacgacagaagcatcgctaccttctgtccactgccgcagcattaagcggcaccggctggaggaacatcggcactgggcaccgcatcgcagaagaccgcagcggcaccggctggaggaacatcggcactgggcaccgcatcgcagaagaccgcagcggcaccggctggaggaacatcgacactgggcaccgcatcgcagaagaccgcagcggcaccggctggaggaacatcgacactgggcaccgcatcgccaccgcatcgcagaagaccgcagcggcaccggctggaggaacatcgacactgggcaccgcatcgccaccgcatcgcagaagaccgcagcggcaccggctggaggaacatcgacactgggcaccgcatcgcagaagaccgcagcggcaccggctggaggaacatcgacactgggcaccgcatcgccaccgcatcgcagaagaccgcagcggcaccggctggaggaacatcgacactgggcaacgcatcgccaccgcatcgcagaagaccgcagcggcaccggctggaggaacatcgacactgggcaacgcatcgccaccgcatcgcagaagaccgcagcggcaccggctggaggaacatcgacactgggcaccacatcgcagaagaccgcagcggcttcttttatcgactttcacagttttaaaagactttagactttgcaatgtaaatatttttatagaattttttcgtctaatttttttatagttgatttaattattaatatgattttactgattataaattaataataataatctatttattattgtccaattgatcagtcttacaagtgctgtaaggaacacatacaaaaaattgaacatttttcgaccaaaaatttatttttcgatcgagaaaataattgaaaatgtcgtctatcgtttttatcataacacattttttcatcatcccatgtaaagggcttaaagaaagccggaaaagcgtccgcgcgatccgtaagcggcgccaaagccgccggcatcaaagcgtttggccggcacaagagggtagaagctgaataagcagaaggtaggtacattgagtataaccagtgctgtcgaagacagctttatgtaataggattaagatttgccaattttttgcctttggttccccggggtacggtagaaggaaagtcaacaaaagtaaacagccgacagcggatttccattcactttcgattattatccaaagcttagtttaaaattatgccgcttttatttcgaaaaaggattgtatattcggccacttccaccccgaaaatgggtaaatggccttagaattacgaggtaatggttttctcagggtggtctacactttcacaaagtccaaatttggtcaaacacccccccctctcccccaaatattgtggccccaaaattcattgttccgcttattgatcacataattttgattattccgtgttttattacctctcatagctgtaggggtctgtcggtacgtaatcgaaccgcttctgctgcagttgttggggcgcgaatgcggcgccgctatacgatacaccaccaacaccgccaccgtactaagcagtagctggcgacggcacgaatgggaccacacgctgcggctccatcacaaagcgctcaaaatgtttctgctgctgctgtagctccatcgcaacttgctggtccatggccgcttttggtggtgccatttctgcgctgggaggcgcttggcgcttcagaaacgcgcggggaccaaatgccaatgcgctataattaagtgaaaattgataccaccaaacccaagttaaaagaaaaacaaatttgtcacttactcatcaagaaaaagtgcagtaacagcaaaaagtgtcgcaatgaatcgcaatgtgccgaacattttgaatttggccaaatgctttttaaaaagataaatgtcggagtaggaaaaacttttgtagggagctgaaaatgtggccaaaaattagttttagttgcaagaaaaaacgttatgccaaaaaggacaattttccgtggcttatattccctggcgggcttaaatttcatgcggactgatagagggagggggcggggaatgcaatgtgccaagttcccacagaatgccaacattcaatcaactgaaatccttgtgtgcactataaagtatatttttttatattacattggcacactcacatgatttttctcttcgggagaagaggagataatccgctgaagggcaaagcacccgggggagggagtggggagggatttgagacagaatggaaggataaatggcactcgttaaagaaaaatttctgcttaaatgaggacagacagccgaaggctttcagaaaaagatgaagcggcggtgccaatttgccctaatgaacagaggaagggatgataataacgatgaaagtgatgattaaactcagacaaattgcgttaatgaaatttgtcacaaaattttcagaacgaggcaaagtgctgttgacgcatttctcacaaaattaatgacagttaattttttttcttgctgaaatggatgtaaagccaatggtcggggattaaattgcgcattaagcatttgggaccttacaaaaattttattgaaattgagacgcactcagaaataaaaatgatgattactaaacaaaaaataatccttttcaatgcacactatgagagcaacgaaaaagcaagcgtaaatcctgcaatttgttggagcaattgcattgtatcatcatatcaattttgcatagataatatagatttaaaaaagccaaaatgtcgagaatttttcgtaacacctgtttttaatgacaaattcataagaaaagcactttaataggctgaatttctcattttcgttcttagaattctgtgtcgttgaagaaacagattttctccgctcaatttcgaatatgaatgactttttagctcataaaaacatattaaaaagttttagcaaaaaagtctaaaaaattatctttttatataatataaatttttatcctgatttaattatggcgtataaataaatccgataattttgatacattaaaaaatagaagcgaccttttttaaacacaaaatatattggcatccggaagagcaaatctctgttaattatggagaaatt

SEQ ID NO: 2670 - DNA, 7210 bp, Heterodera glycines
gaaaagaggcaatcccttcagaatgggtgtctctattaaaaaattggcaagtgggcgttatcccggggttatgatcacgaatctgagtcaaaagcttcacagtttggtaccgaaacaaatgcaataaaaatacggtaaataaaatattgtctatttactactagagcacggacatttaaaatttgcgtatctagctgtgggattgggacccttttttttgcggggcgggatccccgacgggattatcccgcaaccaaattgctctgtattatccggtcaataattgacgaagcttttgcctcatttgtgatgttttcattggaaaacgattacttaatgaaaaatgacaattttaataaataaaagcatagttggcaaggtaatatgacaaatccaaggtccaattcgtgatcataactcctggaaaacccaatatagcaatttttagctcaaaaattacaaagataaattagggacacccattctgaaggattgccgcacaatatgtcaaatagttttttcttcatttctttaaaatgagatagcgaaaatccatcaaaaccgagagttttcgggacataattttgtttgccttttttcaaatcccggatattgcatgtcagaatgccaaagtcgagttttccacctgctgattgtgagctcaaaatggaatttttacccggaattttaaacttgtttaaatttatgattttggccaaattcgttaaactcaagtgataaaattgccattgcaaaagtgccaacttcgtcgtccagccaattgccgtcgcagccattcgtcggccgttcaaagtccaagtcgccaagttcgtccagtctgtccacattctgacaaaaatggcaaaattaaaaaaaaccttttattttattagaaattaaatcgtaaattaaacttgacaaattcaattcggcattttttttgtggtgccaacctcaatggagaagccgctttcggccggttgtacagcgaacaaattgcgctgtttgatgccgatctgttgcttttgcttcagcaaaagctaaatgaaacattcatgattttacaataatttccaattttaaatttgccttttttggcgccttcacattgggctgaagttcgctgaacaaatcgacgcattgctgaactcacaacagaaaattaatcgaatttaaaatttaatttgttttcgatttggcctaaattcaaggtcccaaaaataataagaaaattgaatgatcacttctatctttaacaaatgggacatttcggcacaatttaatcggttgccacttcgaatttactaaaagtggaggcaataaattcttatttatttgtctttggtataaattgttttcccccattcttgatggtttttatcattaaatggcacatttgtctctgtgcttccctgctttttcgctaattagtctgctaattacttcttgcggcactgccccggccaattgctgttggcactgctgcgctttgccttttgttttcgctttgtttgccgctgccgctgcttcttcctgccgatgtcttcggtattgggcaatttggtcggccactgccaccggaggttcggcattccaattgttgtcccaatctgttacggtggtgccaaattaaaaccaacaaattaaggagcctcagaaactgtggcataatgccaaatgaaacagcagaggaggcaatgcttgtcaaatttatgttcaaaaccgtcacattagacggcattaactcagattattgggtaattttaatctttaaatttaaaatggcacaatttcgtcccatttaaaaagtcatatgctcagggaaatgcccaattttttaattgggaaatttcatgccaacaaagcattcagacaattaaaaaggctatataatagctttgggtccgttcaataaatttaatttgaaatattttgttgtgtcctaaatgtatactctctgttttttcaaattgccattcactcatttttctgtccaattaaatttaattgcaaaacccgtgtaaagtgccaaattatttttgtattttaaatgaatatttgccaatttattcaccactaccgccattcgtcgtgttttgctgctgcgatttctcaacatttgccacaataaatggcaattcgccgatgcgattttggcgacccaaaaaacggcacgtaatcagccgaaagaaggcaccaaaaagtgccaaaatggcggacaaaatgcgccgtaacaaaaacaacggaacggagaccaaagacattcggacgaaagccctgtgaaaatttaggtatttttgtcacagttggaataacgattaaaactttaaaaaaaaaattcggaattttatgccaaaaattaagttgtgccgtaaaatttcatttatgagccgaacctgtcagattatattcaccactaccgattatatttgtattgacgaatgcaaaacattcatatgcaaatcattgaaattaaactctaaaattcaaatgaattatcatttacatatttaatgggaccaaaaacgaaattgaggcatttgtgcccgaaggcaaagcagcggaaaattaaaaatggcgaattaataataattgacaaaacatatcgccaaaaaatttaaatcaaaaattgatccaatgccctttcaaaatgacagtaatacaaaaaataaacttataaaatttcgtttaattttatttaaacaatcattagggctataaattatatgcactaaaaaatgccaaagatgcgcataaaatatgcattaaaaatacctcaaaataaaaactcgaaaaatgcccaaattttagacaattgtaaaaaaagtatatgcactaaaaaccttcaccaaatcaaaaattttaacgtaaaaatgctatttttgagcctctttcttatatgcgcagaaaaaatatgcaaaagcatataatttatagccctaacaatcacatattagctactaaaccgacaagataaaatcatataaattccaatttatagaaccacatttttcaattcaaataaaagcaaattttattttgatactttttcaataaatttctcgctaatggggtgttaattagttgtaaaaccgtgtattattaatttccaattagcagcaaattgatgacattttgattttttattgttcgtttttctcgcagcaattctgataagaagaatggaaaggaattatggaacaattcgatcatttaatcttaatcaccactttttctatacattctttttgtgattttgcttttacatttcccgattttagcaattataattaattagtgttcgcattttcatttaatcacttttaaaattgtaaaaattttaaagcaatcagctatattaatcctttaaatatttacttatttctaatggagctcattaataatgaattgaactgaaattaaatatggtcaaattgaaattaatgaattaattacttattaattaactaattaccttagaatggctgtcattcgtccgtttttgctttttcttccatttttgcttttttctccttccgctgcgttcgttgatgaccccaatttgtgccttcgtctcacatcggcggcccatgacgaaatccaagagttgcccggactcagctttcggccaaacttcaaacattactcgggtccgtccgtcctctaattgcgtgcattaatcgcccaattttaatttttttttaaattcaaaaaaaaacatttactttgcattatgaggagtatttggtattttgtattacgccatttgctgtttggtgctgtattttaataagaaatattcttatgaatattttatttatttggaaaattaaaatttgcaagaaatggcggctaaaaaattatttttttcaattgaataattaatttaatcgattcaaaaaaggatttccactcgtttaaaaatttatggcaacattttttcaggctttttgaaaacaacgtcaaaaaatctattccattattggtttgtgacctcggagaataagccgtgccaagacccattggtctgaaaaatattttctttttggccaaatgaaattgccaattctttaaagcttttttggttcaatgggggccccggctgttcatcattgggcggtctgctggacgaattgggcccatatttgatcaacgccgacgggaaaacattacgcaaaagcccatacgcttggaacaaaaatgcctccgtattaaaattaattcctcaaaattaaataaattttaaatttcataaatttcattaatgtgttatttttgtcagattgtttacatcgagtcgcccgctggcgtcggcttttcccactcagtcgacggattgcctgccccgtcaagcgatgactcagtaagaaaaaaattgtaaaaataattatccaattaattaatgaaagcaattaaaaagagggaagattcacgattcaaaaagaaccgaaaatttgtgatttgtcaatttcagacggctgcagaaaattacgaagcggtcaagcagttcttcaacaaattcccactgttccgttccaacccaacgttcatcaccggagagtcgtatgccggcatttatgtgccaatgttagtggccaaaattgtagatggacaggcggaattccccatcaatttggaggtgtttaatttttttaattattcatttctaatttaaaataatttttttttcgtttattttaaatgtttagggaatggccattggcaatggctttgtgaacgcgccgttggacaccgacacattggcacgttttgcctatgcccatgggcttgttgaggagtccaaatggaatcagattgccaaacagtgttgtggaggatgtcttggtaaattggcattggcgtgtgccatacacttcacgataaaatgcctaatattaaatttaatggattttttttcaatttcttaagatacctgcgatttgggctcactttacggctcatgtcgatcaattgtaattaactaattgaagaattaatgtcatctcattaatgaaaacataaagattttcccggaaaattgcatttttgataaatattaaaaaattataaatatcattttatctatttaattataaaatttattttttaggtggctgagattgtccatttctgttggaggggcggactgaacgtttacgatatttatgaaaattgcagtaaattttgcaaattaatttactcattagccttatgatttttttttgaaattttaatttatttttctaagtgccgcacccaaacaatttggacataatgagaagaggcattttcaacgcaaagtcaatgcactcaaacgattcagttttgtggcggactgacgacgcttttgaagtaaaataaataaataaaaaataaattttcaatcaaattttctgtcagaacgccaatcagccgaaggaggaaaaagtgaattatttgctccgctgtttgaatggtaattaaaattaaatgtttttattaaatttaaaaatattttaggtcaaccattggttgattatttgaacaaggaccagggtaagaggccaattgttatttgttagagatcggaattccagcccttatccgatctctatttttgtataaagtgctgctgctggagctgtgcaagaattaattttgactcaaagttaaccgagaaattaaaaaaaaataccgaaaaaatttgtccaaaaaagacctaaaaaacgagaaattcgtcgagccaagaaacaagactctcgaagatgatccatatacaaaatttctgtttgctgactttttacagtacgaaaagcgctgcacattccgccgacagtaccctcttggacccaatgcagccgatgggtggccatgcattaccgtaaccaatacggtaagtgacatttctttttttgtaaaaaatgagaggaacttcttccctagccgacatgtcccatttcgtgtggaaagcgttgtgggccaatgttcgggtactgctcttttacggagacacggacatggcgtgcaactttctgctgggccaacgcttctccgaaatgctgggcttaaaggtgaggcgggagagggacacgacatctttattaaaattttatttttaaattttctatttttgcaatatttatttctgttttaaaatgcttcaaatttagcgactcggcactaatccttggcattttggtggccaaattgccggcataaaaacggaatatggcagcggacttacatacataaccggttagtttaataaatatatttttactatttttctgtttaagtgcgcggtgctggacacatggcaagccatttgaaaaatttataatattaaatactatgaattattttattcaatttgaaaatataattttaaatttcattaaatattttaattataaatttatttattttaaaacatgaaaatatataatccgttcaagaatttcttttaggtacctcaaaaacgtggaagtgaaattgaatatgcgatagggcaatttctgacaaacagaaccatttgagaaaatacagctacaatttgcaggctaatgggttcatccaattactgttaattagtgtgatttttttttcttaaaatttgcttaatttttataaaacttaaatttcagcaatatttatttattactctaaaatagcgtcaaaagttcaagttcaaccacaaactgatactttctctggtcgaaactgatttcacactaaaaaaataatacaaaaattcgcctgtttgtaaaacttgacgcacgcattaaaatattaatataaaaatccgcctacttgtaaaacttgacgcactataaaattaatatgaaatccgcccgtttgtaaaacttgacgcacacattaaaatattagtataaaaatgcgcctatttgtaaaacttgacgcggcattaaaaaattaatacaaaatccgcctgtttgtaaaacttgactcacgcattaaaaaattaatataaaaatgcgcatacttgtaaaacttgacgcactataaaattaatacacaatccagctatttgtaaaacttagtgcatttaaaatgaatacaaaagtctgcctatttttaaaacttggtaaaatccgcctatttgtaaaacttggtgcattaaaaaggtaataatccgcctatgtaaaacttgatgcaataaaaaaataatacaaaaatccgccttttttataaaagttgactcacgcattaa

SEQ ID NO: 2671 - DNA, 1854 bp, Heterodera glycines
  unsure (1)..(1854): unsure at all n locations
gctgcaataaaaaaagcaatgcataaatggtgacaattacaagcaattagcaatgaatgccttttccgctcctttgtttttatccaaatccaaaaaagttgacnttttggtagagtcgaaggtaacgctaaaaattggaaaaaaacattaatgaacttattaaatttagcgattccattacgaaaaaagggcaattaagaaattattgtaaattggccaaattaccatttttcgcttaaatgtccgttcgtcgggttcggctgtttccaatgcttgggagcctagagctaaatacagtagaaaaattaattggctcaatatgttttttcacctgattttttgcattccgatgtccgctttatgtaaatgtttgtgtacggtgtgtacagtggggaacggacggtggcatctgaaaataataatccaattgctaattacaattaaaatttaatttattattgctaaatgcctattttggtaaattaaggagtacctacaaaaatattaataatatttattaattttaatcaaaattatactggtttttatgctaattaccctgataaaattcgcatgcgaaaacttcgcggccgccctaaattattaaaattaattaatatttaaatatttatcacattttttaaattatttgttttaccacatagccatagaccaccagacggcacttttgttcattcatacaatgtgccaagcatctgtcctatcggcgaggaaatattggcattttttatacaaattaaacaaaaatttcaattttaaataatttttcaatttgcccatctgtcagctgttgggcttacctcagtggcctgaaaataattttataaggtttttatttatttttaaaattgtaatgacttcgtaagcaaatgtcgtgttcaaaacttggtacggctgcgtaaattggttcacatctctgtcagtgtaagtaatgaagcatctgaaaatgaataaaattgaaaaaataaaaaataaagtttctttttccgaattttacccactcgcaaaagtgacacggcgctccaaaatgttgcgcttaaatattgctgttcattatttttgtggcttaattcccttttaaaactaatttgcgagggtgtttgggcgcaaagacttctaaaagttcattaaaaatgttttttggtcatttcttggtgttggagccaatgatttttaaaaaactattttttagcatataatcttaataattaatgtccctacaaataaggactaaaactcaaacagatgaaacatctgaggacaatgtattcattttgaagtcccaaaaggggcggaaatgtctccgtagctcaatgataaagctttcctcaatgggaaggcatgcttctccaattcaaactgtcagtcgctttcggcattttaaatgtcgttcttgacgcccaaaaacttcctccccatcatagttcccatccatgtcaattattaccgggtactgtcagtgcgcaaactgttgttactgtaacggcacaaataaagtgaagaatgcgtaaatgaactgacatttttgcctgaataaaataacattaaagaatggtgtcacttaaaaatggggcgggaaataattagtgatacatcaaaaacaattattaaacggattaaaattcaataatttttcataaagcaatataatgaaaaaagaaaatagataaaattcataaatacgcttccatttttcagtaaaatctgttgccgagttcggtacaaaatttttatgggtataggaatttttccattaaaattcccttcttcttttcgatccgtttccacctcttctaatgcaattntcgttgagattctcgcattaatatatgc

SEQ ID NO: 2672 - DNA, 1839 bp, Heterodera glycines
  unsure (1)..(1839): unsure at all n locations
tcgccgcacaatgcgcatcgagactcttgactcggtcggctgatctgatcagctaatcatcgccggcggcggaatgatccgtctcattagcaaaagagtcagccacccgcacttttctcgaccgatccattcttctcgcggctcctgcccattaatcattgcagatcaaaaagtgcccacccccgagggggatcatttctcccccctacccaagaaatttgatcactcccccgggcgattcgggaacagagtccatctaagcgccgatcagtgcgggtgccaaatggtcacaattagatgcgcaatgagtggacaactcgagaagctttgtttctgagatcaaagagccatgaccgctttagccgccaaaaatatattttaattttcttacaaaattagactatacctttcttatttatttttccaaaaagtcgccggaatctgtacaattgtgacggtgcttaaatgacgcacccgaaaacacagcgccgaccccgggggatttatttgggttaatcacagagggcgcggggaaacaaaacgcccacttttgttttagggctaatgtggcggcaccaacagaagcataaagttaatgggaaaagatcaatcttttacaattaattagcttaacttttttgcgggcggtgtaataaaagaagaagcgaaatcaatgagaagagtgaaagataaattgataagtaaagcttaaaaaaagctagaactgggaaatctgctgggcaaatctagggataattagggtaatcaatatttacatttaggcgcgacgtcactccaagacaaaatgttttgccgcccgttttctctcacaaattctcagacatttattttatccgcctttttgggggcgggaaggaaaagcgcaaaaatgttgggcatttgtgccgcggcggcgcacagacggacggaggatgaccttcaaaagaccaccaaatggcgaaatttccgcttaaatacaccgcacaaattcgatttggtggttggaccggtttttgaacgaaatgtgcgagcaaagctttgctttggaatttgaatgaatttttcagcatttttaagccattccctgcgggcagaattcaattaagtaattaattaattaactgattaaagaattacatattaattaatcgctggtttatggcagataataatgacgaaaaaatggtatttgattgaatataaaaataatgacgaataaataactttttaaagtgtctattttatatttttaattgccattatacaatataaaattacgtaactacttctttatctttgccataagttcgttttttttattttattgccgtttttagtaaaattttatagtcaattatgtgcatttaatccganaactgctttaattgactcattaggtaatctgataatcagaaaaatttttaatttaatttcaccttttaacaatttgccgttccgacactttgcttttaaatttgtctcattaaaaggcaatttttacgctttttgctcatttgtcagtcatttgtccctgctgctgatgatgaacaggttcttaatgctttctttacgccatgggatcgttttgttgtgtgttgggccgtgatttctgcaccttttgcggtctctcattagccacaaaagcgcctcgggcgatccccccaaggacagagcagcgaaaaaaactgcaacaagaacagcatcaattaagaagaagaagcaccgtgggagagggaggatgggcggaagaaaagcgtaccgaatttcccacaaatttggacgagcgatgaaaagcggcttcatctcattgctgttcatagcagtggaatggacagatta

SEQ ID NO: 2673 - DNA, 2305 bp, Heterodera glycines
aaaaaagcgttttattgattttaaatttggaataaaattttaaaaaatgatttttgctttatgattttaactataaaaaagtgttagaaaaaatttcgcttttcgcatttcgcttttcgcattttcgcatattttggcttttcgcatttcgctttttttttcatttcgcatttttcagtttcgcaaatttcgcttttcgcatttcgctttttatttttcaatttggcccatccctgatttgcactgcttctgaatttgcacgcacgtgagtagttacaagggggccagggtcccacttttggcgctaaatttgctttggcgccaaatttaaattcaaaattcctgaaagtgttgaaaattgaataatttatgttttaaaatattgtactattatttttgtaaataacaaaattttttattctcctagaaacaggaaattttttaattgttttcggcttttgtatcggaatgggaaattttttttctacgggaattgctgaacgtaattttacaaaatttttaatttttctaatatttttctatctaaagctgacgttgaacagccgtttggaccagaccagcgaccgagtgcgccggtcgtgtgtgtgtgtcgtcgtgtgatgacttgggcatggaatgaacgagtgaccatgctgctgctgctcattctgctcgtactgatgtgccagttcgttttttggaacatcaccatttgagattttttttggatttttaaatgattcgatgctttcaatttgatattaaaaaacttttttcattctttattaattttattaagtgtttttcctcatttaaatatcgcgaatattttcttagcagctaatttattgtttgtttttgtcagtggccgcacttcgaagaggccgattgttttgcaggtttgattgggtttagatgaaaatgaagagaaatcagggcactaatttggtttaaacatccaatgatcattaatgaacatctcagttatcaggtcatttctattttagggaattgttattagcacatgtttaaacacttctaatgactcagctttcatttgatattgtgaatgttaatcacgtaagaaaaaagttatggtccgataactgagtatgatcattgtatgactcataaagtgcaattcattttgaactgattaggaactaaattcgtaatctaaaacaaaaattataatttacatagtcatgtgtgctaatattggttgtatgatttacaccgaatcaacccatggcttcccctattattagatttgtcgtccaaaaaattgtgagcacggtttgctttcgtcattatcgtcgaccattgaccggttgaccatcgctgctgcaacttttgtttggattggtccgcttaatgttcgccgacatttttatgttttttttgctgtgacactttttaaaccggtactattatttagtgccctttacaatcattttgcggtcgctttgtgcgccgtttccgtcaacgaattgcaacacgtgggacgtgagcggagggcatttttggctcatttttgcaggtttacaaatttacggtttttcggctctgatttagctaattttattcataaaaattgtaaattacgaaaaagctaggatcaaaaactctaataaacttgcatatcggaaccctttatgtataatttttgaaattttcaaactgacgatcatgtattagggatatctaatgtagcaaaaagtttttatttctgaaagaagttataccataaagccataatggcgtcctgctgtgttctcttttatgatttagttaggtcattcatttatacacattttcgatattttcattcttctatttccttcacatctcttttttcagctttgccattgttttgaaggcgtcgcccattccaaccgccatattcattggcaaattcaccgtccgttttctgaatggcaccaaaaatgacaaagcaacgaaagcagagtggacaacggaaagcaatttccagaaagaaggcggactgtgataacggggtaggaggaattttaaagttaaaaatcataaataataaacaaaatggatttaaaaatgagtaaagcggagcactttgcttataatgttaatataataagggtcaatgacggacagccccctaactgatggtttattttccgaaaggatttcactgttaatcgaaacagtcgtttacggtaacatacttccttttggtttactgattggttgttagatggtgattaccccgctgtctaacagcgaattccaccgctccgctgtctaacagcgaatcccccacttgctg

SEQ ID NO: 2674 - DNA, 5544 bp, Heterodera glycines
gcatcggttcggggggaccgcccagaacacaaaaaacttgattttttcaagtgtccgttagtggtactcaaacaattatggggatcaaaaatccaatgcagaacaaatgactaggctatagggaagctacttccgaagaattcggtctcaccatatatctgtgtcgcatcggttcggggggacttgcaccgaaaacaaaaaaatcgattctttcaagtgttctttaggggtactcataccaaaaaggatggtgttacagagaatgagtgtgtcgattaatagtatgatctattcattggatttgacgggcaaacagaaaattaaatgaattatatatgccatctctattttattgacattgtgcgatattagattaataagttctgccctgtcgattttttaaatttttaaaaaccaaaatttttactaattgctcctcacaatcaatattctcacatcatttcttctgatcaatcgctcctcagtactgtgcgcttcctcgtatgcctcctttcctcaacaaaacgcgcaccgtgcgctcagaccgcggcacacccgaaagggattgcgtcgcaatttctgtacacaaatgatgcatttatatttgggcccgtctaatgtgcatttcctcaccaatttcatgcgggtctccgacattaaatgacggcgttgatgggcgaccgccgggggtgatttctgtacaccaatgatacatttgtattggggtccgttccgtttgcactttcttaccaattgcctgcgagcctccagcattaagtgttgccgacgccgtgcgaccaccggtggtgtgtgcgcgtttgtcaaactcatttgtattgaaccaatagggcgtggcgtaggcgagcgcattgaaaaaattcctctttttgaaggaggtggcaaaaagcgtcctgtataaatatggtataaagtcaaagatagaaaaaatgagtgtttaccactgcttttgggtgtttccgcaagcggtggcatgttttccttgtcgtgccgacactcagcatgggcgtattggcgtggagaacagggcgaccaaggcgtatcagctaacatttcttaaagaaccccgaataggatttaaaactttttaactttcacactacttacggcgtatgacgtttcgctctccactataatcttcatcctccccctcctccccgttgttatcgttaggcgtccaatggtccgtcggatacggttgcggatgttgcacaccatcttccataacaaattggtgcggattgtgtgggtgttgacgatgcggttgtaattgatgaatccaccacggtgtttccacagtgtatataggcatcggtatgtcgtttacgagtagggccactcccggtcgctcatgttgctgaaatggcacgggtacacatgcaccgatggaaatatcaatacccagccagctcagacttactccaagaataatttggcgctcagcgggaggttggtcgatttcgtcagcccaaatccaccagcgctgagcgtcagggatattgttgtctgtagttggggcatacgcagtttcggcataggtattattgtggctgttgttgaagttgctcatttggattattttatttaaaattatgtagcgaaaaaaaaacgaagcgaacggaggaaaatggtgcaagaatggcagaatgagatcatttggtccaaactccggcaccgccctttcactcagtgatggatgtcacaaagaacatttgttgccatagggcgcggttgtgggggacatacaatgcgacgatcaaaacgaatgtgtcaatcaatcatcagattaggggcacaggaccacaaagactaagggttttgtccatagttagggccgagaatacacatacgcggtaattagtcaaaggattaaactttatatttggccaccaaaaatttggacacagatgtaattaatcaattttaatccgtttagaggccgtacataacttacaaataaaaaaatttaatattttaaatatcaattcatgtcgttcatgtcaattctttccaagcactttcgttttccttgcatgtagttgtttcttggaccacctctacagtatgtaggaccgcaattatcgtaccaaaagttattttgactgtcattttcgtcattatcgttgtttttattgtttctgtttttattgctgttgttggtgttgttgtagttgttattacgtggatgatatgccataaattgcacagaattcatatcgctgagtcgcatgttgagcattgtacaatgtttgcacaggtgaaagttcaagtccacacctccatcgttacactctgttatgtcgtccttacggttgtatagctcttgtgcacacattttacatagtttaaatgtcaacatgtatttttgtcttttcaatttccataactggtttgtggggcgcgcgtagcagtgatcatgttcgatcacatcagtttgatgttgttgatcttcttgttgttgttgttgttgttgttgttgttgttggtgttgttttggcattttgtcctcatgctgaaattgattattcatacaaactccttcactttttttaatgaaattgtccatttttcaaaaaattagttttaatgaatgattaaagtgtatacttaagcatacaatctgcacttaaataggctgctatgtacgattttttgaagcgaattttttagcgcaaaatttgaatacaaattttgagggtgtgtagtgagtgattcgaccattcattctttcaaaaagcacgcattcacttttcgtgtaactaactcctgctcagatgagtttgctcgatcaattcacgaatttgtttaactgttctgcttatgacgttagtaacagactgcttagtgatgctgagcgaacaaaggctttagtgttgtgtaatcacaaacttctcactaccatgtacaaggaccgtaatggactgaatcacacgttcacgtgtactggtctgtccgcagagggagcagaatcccttctcgcttatggaaaactgagagaaccgttcaatatttctgtcgctgcccattattacgcacgtcatcgtataatgctgagtcaccccaaagcaccatgtgctattgagcgaacaactttgtctcatcgtggcggtcagcgaaccaccgtattaaagttctatcccttggaactcgtccgattctcctcctattgtgcaattccatcacggtctcctcatatgaacacctatgttgattatgctgattactatgctgacgatgatgatgatgaattatctgatactacgcttctccgtgataataccaatggggataatggtgatgatgatgactctgacggtccactaatggttttaccatccaataacctacctccaatgtgttccttacgtctggaatattggaaagtgtccgatgacggagaatgggcaagggatgaagtatgggttgcggatgatgagctagacaaattgcgtacaatactgcataatttataactttctcttctatttattaatttttatcaaatttactctctcttgcactaattttatatttttctgcttaaaattatacatttcccaaagctaattttgtaaaagtttactctttaaaataaatttatcgataagacattttatacaaatccaaaattaagtacacgagtgtcgtttggggaaacaatacctttcgtaacaacgggtcggtaacgcttggtaagtgctaccgagtgtacactacctgtgcgtatattgggtcgtaggaaattaggattatcaattagtataacttcgtcatcggtattgttaccgtcgtactcttttggtcctttggcgtaccgcagaaccgctcgcttgaacgtatcaaaatgtagaagacggcatgcgtcgccgctaagtgttatgccgcgcactttgaccaccgtctgctccttaccagtttgacggtggcgcattctcagtgcatattgcttacacccccctgacacgaattcgagcagttcatgatccggccattcatctgacaagtctccaaggtggggtccaatatccagcggacacccgtcctcttcccgatgggcaaaacagacactgtccgtgtctgtgtatatcagctctgtgttttctgcacgcacaactcgtttcatcaattttagaagatggaggcgtgctgccgatgttgtccataaggagagaacaatgttggagcaatcgtgctcatcggtccattcctttttagcggtgtatgtaatcagcacacactgttcatttaatgggtccacagagctgacttccagctgaggattgtcgaggtacgcacgtagttctgatggcgaatcagtaaccacagtctttgatagaccgttacgtagtgagaaccgtccccaaagggaattgttgcatagcttggctatagtccgcttcgccttattgtgttgcatgcgcgccgggtcaatgaccataccaaagcgctcctcacactctgtgatgaatttttcgcgttcctcctccccatttcccacctcttccggaaacccgctagcatgtgttttcattgtcataaattctgcaacgtaaccgcgaaaaacacgctcactccattgttcctgtgtccattctatggatcgataataggcggtgcagcggtacccattgcgtaatgcctctgccagttcgatcgatgtaaccgtagaaacccaaccgcgctgctcatcgctgtgcgtgcatcgataagaagcggagacgcctccctctggatgaaggcgtgcgcatgttccgcaaagtgggaacagcaaacgctgatcaaatttaaccggtagaagaacggacgtcaaagtatcgcatacgccacccttccgggacctgatagtgaaggcgttgcggcccaactcgaccaccatgatagcaatcccttagattaataggtccgctgtttcgataggaagagaacgcctgccgcatgtcgggttcccgtcttagccgttcctcaatatcacattcccagaatatactaacagttccacgaatttgtgagcgaatgaaagccattcttcgcgcatcgtcctcccgaattctagcagctgtctttccgctcggcattacagtgtcagctttaaatcggtgtcgttgatggtcatgcgcatgccagcagcacccgttcacctcaattacgctatccgtctcatgtatataaccgtccactgtatagcggccaatgcggtgctctccgcccgaggaatgggcggtctgaatttgcagtccattctcctctgcgtaccattccatgaatttgagcgcgagcaagctctgattgtttgccgtgtcatatccgctctctgggacgattgcgagctgatcactccgtaaatgattgaggcggaagtgtttcattgatgcgctcgcaatggtcagcgcgtcccaagtgatgtcgatccctccgtttccgttatctccaagctcaattcctccagcgtcttcctcttcctcctcctctaccctctccttcatcctccgtcagacgggtgttgtttatcccgggttcgtgaccatc

SEQ ID NO: 2675 - DNA, 2885 bp, Heterodera glycines
  unsure (1)..(2885): unsure at all n locations
ttcggtcgcctgcacttttggtgcacgctgaattgactcagcgcgtgcggncaatgcaacgaattcatcgtacgacatttctggccttcgcgacattncgagcgttaatgagagatcgggattngacagtgctctgattaggtgccgaattgcataatcatcgcacaaattttgcgtcaagcccgggtacgcacgggaaacaagactttgaattcgatcggctaatgcgtccagactttcgtttgactttcgctttactccgctcattaactcgtcgaatgcgctcatttcgcgacaatccgtgtcctcgagctgttgttgcattgcccgtcgaattgaatcgaaacgatagggctgggtgttaagcgcagcattaaaggcacgctctgcccgtccattgactttggattccaacgctttaatccgttttttctccggccattcttccgtggcatttgaaaattttttgaaaaaacttttcattttgtcagttccctcattgccatttagctcgggaagtcggtccatggtcagcacatattccaaattaccgatttttaattcattattccccgagtttggttgttctctgccgtcgggatacaaatgtcttccgccgtaatattcaggaaaatattcatttctccccgccattggctgctgatgatgcatcactcctcgcatattttgttgctggagcagcataggctgatgcgcaccgtgttgctccatatacgcagcttgttgaatttgtccgtgacaggtttgtcgcatcggcaccggtgcatgaaaagcactcgaataatgtcgatcgatttcgacgtgttgctctcgaaaaacttggagacgggcattaggatttggcggtacatcaattcggtccgaaaaatgcagattgggtccccggttttcgttacgggtcgggtttacaatcacattcgggtttacaaccacattttcccgaaaattttgttcgaatggtgaccgaagtggacttatattacgccgctctatgttttgttgcctcaattgttgcatttcgatgtaaggagtcgatgtcgctacgcgctgttcccccacaattacgttttgccgcaattcgttttcgaaattttgctgtatttgttgtggttggtcattgaccaatggttgaacaaaacttttttccacattttcacccaaatttgcattcgccaacaaattgttaccatggtcattcagaagcacttcttctcggtgcacttgctgctgtccgtttcgtccatccgctgcattgttggcattttccgtcattttcagtctgcgtcgaatttcgtttgcgtcgagtactgatgtgttcgctgaagaaacagaattacgcctatttccctcgttgacattcgggtttgctgccaaattcacaggattctccactatctgttgtcccctctgttggtcattgtctccacttaacggctgaaccccaagattcaccgtcctctggcgagtgttttttggcgatctcacaataatcattggctttacttcgccgtttttcaatttctcttccaaattcaaattcgaagtgccaatgtcggatatcgaagcggcggaattactttaccgttttgataaaaactcagctttgttgacggttttactttaccgagctgataactgtcgacttctttccgcttttctccaccaaatgtgatttgcttttcacttttacactccttccaactcgtgatttacttttcacttttccgaatctcgcagcttgtgagttacttttcacttttttggagacgctgtcggacttatagtctacaaatgccccggatagtaccgcgttgatcgtcacctttttccaggagcgccacgtcgtaaaattagccgcctttttgccggggtcctcctctgctcttttgccgaattccaaaacggggcgaaggagaagaatgagaaggaagacttttaaaatcacttaaagccacagcaatcccaatcaattaaatttaaacaacacaacaattaaaagtaccattaaaattaccacacacaatccgcatcacaaatttttaagtccgggcgaagagagccaaaaaacataaaatgaaaatgaaagacacaaaaaaataaacaaaatgccaaattaattaaaactttaaaagtcaaatgaggtcattatttaattatcacaataatttagtctaaagaagacaaagctaatatcttaaaaccgcatttttaatgcgacaattaatgtcactcttacaataagcattttctcgcacagaaaatgacataacaaattgggccacggaccaggctggaaaacttacaaagccgtgcttaattttacaattttacagttcattcatttttcactttttcttaaattattaattatttaaaattaaaattaaaaaacaaatggaacaattgatgattactgaattcgtttaaattaaaataagtgtaagtgatctattaaaagaaatttatgcagtcgtataaattatttttaaaattggaaatgccaaaattaaaaaacaaaagaagtaaacaagagtgcatcaaccagagaaacgatcagaggaagctgagcttgattcgcattcagaacttgaaaataaaatgtatacgtaaataaatgaggcatttttcgacaaaaataattcgtggaaattgacaactttccgcagacaaaaatacagataatatattattattttatatatattatacgtataaatatatatattataaaattaatttaccccaagaaagtccctcaatgtcgaacgcggtcgaaacgggagcatcgcaacaggcgacaacgatttgcacacattctcgcatcaaacgattgaccttctgaaaaaaaacatacatattggggg

SEQ ID NO: 2676 - DNA, 3805 bp, Heterodera glycines
aaaaataaaaaaatttttgtttttaaaataatccttaaaaaacccctttttttaaaataggttttaaaaaattgaatttttaaaattttaaaatgggattcggaacctaatttaagattattttaaggcattttggtgcttatttcaacccttagggaagaattttctttcaaaaaaaacatttaaattttttttttaaattatttataggtgcatattaaactattttagttatggaacttatttcacgaacaatgacatcggaggatggcaattgaaaaacattttgtttgcctataagaaaatatcatcaaaaaccgacaacaacgaaattgggtttaaatttatttatttttaaaacttattttatttaaaatcatttgaaaatgaatttaaatggctaaaaaaaaagtcttaattcataattagattcaaaaaatttatgatgaatcgtttttaaatgatcatttgtatttgttgtggttggtcattgaccaatggttgaacaaaacttttttccacattttcacccaaatttgcattcgccaacaaattgttaccatggtcattcagaaacacttcttctcggtgcacttgctgctgtccgtttcgtccatccgctgcattgttggcattttccgtcattttcagtctgcgtcgaatttcgtttgcgtcgagtactgatgtgttcgctgaagaaacagaattgcgcctatttccctcgttgacattcggatttgctgccaaattcacaggattctccactatctgttgtcccctctgttggtcagtgtctccacttaacggctgaaccccaagattcaccgtcctctggcgagtgttttttggtgatctcacaataatcattggctttacttcgccgtttttcaatttctcttccaaattcaaattcgaagtgccaagtcggttgtccaagcagcggaattactttaccgttttgataaaaactcagctttgttgacggttttactttaccgagctgataactgtcaacttctttccgcttttctccaccaaatgtgatttgcttttcacttttacactccttccaactcgtgatttacttttcacttttccgaatctcgcagcttgtgagttacttttcactttttggagacgctgtcggacttatagtctacaaatgccccggatagtaccgcgttgatcgtcacctttttccaggagcgccacgtcgtaaaatagccgcctttttgccggggtccttctctgctcttttgcctaattccaaaacggggcgaaggagaagaatgagaaggaagttaaaatcacttaaagccacagcaatccaaatcaattaaatttaaacaacacaacaattaaaagcaccattaaaattaccacacacaatccgcatcacaaattttaagtccgggcgaagagtgaaaaaaaaaaataaaatgaaaatgaaagacacaaaaaaataaacaaaatgccaaattaattaaaactaaaaagaattttcaattttttattggatagaaatttcatttttattagtattttcttgaattttagcatttttcttaatttcatgatttttgtaaatgtataaatcctcgccctcctacttattaaattttttagcttataacttgatcaataatagactaaataaaaccattttatgctcattttgaaggaaaaatttgagttagatacatgaaaatagtgcgccaatatgagagaaaaaaaaaatttttttttcacctggtcaaaaatttttcctcggctcattctctttaaatttttcatagcttcctattttgatcccctctaccgattccaagtttattttatcaaacttaagtttttaatttgagatcggctcttgcatttttacatgggaaaagcccaaaaataaaattaagttttacaaagttttggcgttctgattactgtataaataaaaaacaaacttatttgcaatgggagcttaaaattgactcgcttgtacatacagtatggcacagaattccgacaagttttttaagattcaccattttctgagtggaaaaaaaggacagtgtttcatttgacatttgtcaaatgggcgtctgaacttgcccattttcatttgatcaacgacagcaacaacaacaacaacaacagtgaaaaacaatttcgaaatttgaaccttgattctaaatacactaaacaacacaatgtttttctgcattatgaccaatcgcttggccatcaaattgccaacaaatttaaaaatgaattttcgccatgtgaaaagcagcaaattgaaagccaaattttgcaattgactttttcattagctgcgcgaattcttctttctctgatgttggcatatatttaaataaacaataattcatatacacatacaaatagaaaaaatgggaccaaaaacaaaaaatttaaaatttttttcgattgtctataattagggttgtcaattttatgtaaatacatatatttctttcagagattctcgtaaatattttatattttttagcactttttcataccttttttaatggatattttatgaaatttttattaaatgtcccaaaagcccaaaatttcgcaatttcgcaattttttcgtacatatttcattttctttacatatttttggagatatttttgagaatttatcaaaaatttcttgtgaaaaataaaaaatttttgtttgtaaatatatccctaaaaaccctttttttaaaataggtatcaaaaattgatttttaaaatactaaaatgtgattcgaaacctatttaagactattttaaggcattttgtgcctatttcaacctttaggaagaattttcttccaaaaaaaacatttaaatttttttaaaattatttataggtgcatattaaactattttagttatggaacttatttcacgaacaatgacatcggaggatggcaattgaaaaacattttgtttgcctataagaaaatatcatcaaaaagcgacaacaacgaaattgggtttaaatttatttatttttaaaacttattttatttaaaatcatttgaaaatgaatttaaatggctaaaaaaaagtcttaattcagggatgggatccgtccttgaatggcaaggacgtccttgaaattgggccctctttcttgaaaataaaaaatgtccttgtatgcaaggacgtccttgaaaatgagcatttggaaaagtttaaaaaaatcaaagaaatttgagaaatctttgtaattttcaacaatattttgattaaattttttggtcatttttggacaaaaatctgtaaacaactcgcattaaaaattacaaatttttccggacccccctatcctcaaaaaattttttaaaaagcgcgccgtaaaaaaacccattttataaacaaaaaaagtcgttgcatggcttaaaatcgcaaaaattaggcagtttttggtgaaaatctgttaacaaattgcattcaaattttaaaaatttttccccggcggcgcctgtcggcaccgccggacccccccccccccctctgtcccacaaaatttttggaaaaagcgcgccacaaaaaaagcgtttttaaagcagaaaaaagtcgtcgtaaatgaagaaaatgataagtgaaaacaaaaaagtgttggaaaaaatcaattccggtgaaaaatccatttgaataaatattaaccattttgcattgcatataataaaaattttaaatgtccttgaatttcatgaattttccccactatgtccttgcaaatcggcatacccgtccttggaaaccgacttcggacgataccatccctg

SEQ ID NO: 2677 - DNA, 1624 bp, Heterodera glycines
gggttattctgttccaaatttatgcagggatcggggtcaactttgttactacatcagaacatcaaattcaaaaaaatcgcatatgagggtcaaaaaaatatgcaaaattgcttcaaatgattaccttacaattttttcgttcaaaaataataaattatttttatctctcgtctctcatctctagcgttataaattaatatgatctttaatatatttttctttgcgcatatgctattaaaaagcggctcagaaatagcatttctacgttaaaatttttttggttgttttggtgtttattctcctgatgagataacacaaaaaattattaaagcaacaaagattcatttttagagaaagggaaaccattaaaatagtgtatgccagagatattttctgcttttccaaaaaatccaaccaaaaaggggaccaaaactaatttgtaagtcaacattagtaccaaaaatatacatattctaaatttagtgtaaataaaggcacaactttttttgtagttattttgttcaaattataattttaaattaaaaaaattaagccgtccaaggccaacaaaatttgaaaaacgggcgcgaagcggccgactgaggccgcgaagcggcctaacgagctaaaaaatgggcgcgaagcgcccttatgagttcaacaaatttaaaaaacgagcgcgaagcgcccgtcttgagcctcgatgtggactaaaaaaacccctataattttttttaaattcaaaaaaatctctccaaccaattcgatcaatttgaatcgcttcacagcctaggtagcgaagctcggaaagcgtgaagcgctttatccccactaaatacccgacggttcacgcacccgctagttgtatatataaacttgcaataatttattttcacaaaaaaaaataaataaatcgttttttgctgtattatttttgcattttttcactagcatttattaccactttttcggcatattattttgcccctttttagttaattattttgggattttcgccacaaaatccctagtcattttaaacaaaacaattttaagcaaaatggattgtgcgttggtcagttttgggagagagttggcacatcgttatgttttaaaataccattcatttactgagtttgccaacgcaaatgaaatcaaatgcggcaaagatccgcgcaaatggaattggaatggtgacaatacgccggaaaatgggtaaataaattctctctaaattttaacataaattgcaatatttggacattttgctatttgccaaagtattgtatcgattcatactgttttctctgggtgttcgagcatacagtaacacacattacagtatgtacatacaataatacttataattgggtgagaattttcagtttttttaaccaaagtctcggtctcgattctgcgttctcgggttttgttgtctcgaggctcgggccagagtcacagtgtaaggcaatagttcggtatatgatcattgatcaataggaattcgttttttaggcaaattgtctaaaatttgtgcgcattttatacgcacagataagcacgaaaaatgcgttttctacttggtttgggatgtctatgatgacttttataatgccttttttgt

SEQ ID NO: 2678 - DNA, 4431 bp, Heterodera glycines
ataaatgctctttgaaacggttcccgacctgcttgactcacccaacccgtctgatcacgttctgttttgtgatcagtgccctcttccgggtctttcattgctgccaatgctgactctgctgaccgcatgcaccgtacttgcgccgacaccgctctcctgaactcgcgcactgcccatttcgatcccatcatactttctctgatccgcaattccgtgagcactcgcaccggcaattttgcctccagcaatgggccgaatgagtcgtcgtccacgttcgccccaagctgctcgagttggcacacgcaccgctcaaactcgtcgatcatcgttgtcaggctgttcacgctgtcctttgccggtggcaagtgaagaagccgggcccgaattgcccgctgtaaatcgtcagtgtcgccgaatcgctcttttaacaggtgcacgaccaccgggtagttgccgtcggagggagggtagacttcaacagcccgccgggctggcgatccctcctttaagcagcgcagaagatgcaattgtttttcaaacccgggaatgggtttgtcgtccacagctcgcttgaaataggcccaaaatgttgtccaatcctcgggctttccggaaaaagtcggcggttgcagccgaacagtctcgaatgttgtcatttccgtgatttcgtccctcccgtgcttccgatcatgttctccctcgtctcgagcatgccgtcgaatcgggtatgtctgacgctcccgatagtcgtcgttcacgtgagtctgctgcttttcgatttttggttgcatcagtgccagccgatgggctgttgctgggggaaacgcccccatctcgtctcgatttcgattgatccattctcgcgctgggttcgtcactctcatgctggcgacggatggtactttggcacgccgctgaaaaatcccgtccaaattcgacatgacgggtgtcgcgacccgtcccattggtcttcggttgtgttgcggtacaccttgtccgtcgttttgccatcgtttggccgccccttggaaggatctctcccattcttccatgttccgattttccagtggaggtgggtcgtcccccaccggatggctgttgttggtcccgaatgacccgctcaatcgagaccgcgcgattgcttcttcttcatcctcgagtgcctgtcgcatcgtccttaagtctccgatgtgctcgtccgcaatttgaagcagttcagctggtgttggatggtttcgcaactgcaactctttcgttgctgccggcagtggcgctgtcagtaggtcgtagaagaagtcctggtgacctgcgggttctgctcccgctgctgccattccaatctcgaaatgtccttggaagatttgagttgcctccttgagtcctctctccatggccaaaagtcgcgctgcttggtagcctgcctccccttcggtaaggtcttggtcgatcacttctcgagcctccgcaattcgagcggcgagagtcccggatgctctctcgattctgtcccgcgctgtccgtaccgggatggatacactccgcaaattgcgtgatgggaagggtagcatcccttgctgatttgtcgccacgcctgtcgccatgttgcttcctctcgttgcttcgtttactctggcaactttttgttgctcttcgttcgttgaagcgacgggaccatccccgtcctgcacattttcgtcgtgctgtgcgccgttgcgatggtggccctcattcgctgggtccatgttgctctcgcttccgttctcgaactcgaattgttgcatttgtcgtctctcgaaatgttgagctggagccccctgctaacggcaccagtttgccgttagcttctcgaattcgtgctcgttggtcgctcgtagaccgattggtcgctcgtagaccgattgttggtggctgcagttgccccctgctaacggcaccagtttgccgttagcttctcttcgttgtgctgttggtcctcggcgaccaaaactctcgactgatgctttgccgacgtttgcagaaagcccctgctaacggcaccagtttgtcgccaatcttttactcgggcgggctttggccaaatgcggcttggcccagctgaggcgggattggttcccgctcctcttcaccgctctcgtccctttttcctctgctcactccgctcgctgtgccgtaaagggaatggcgccctttttgccgttcgttttgatgggtctgatgctgctgaccgatccgatcagcgccaaagggggacgagaatgggaggggggaggggtgacaaaattgaactggtactgttggatgttatacagcgatttgctggttgcttaacggcaccaccgacaagattttggtgaagggcttgtcggacccctttgagcagctccgaacgggcgggagttgctcgacaagattggttgtgaagggggcttgtccgaccctttgagctgctccgaacgggcgggagttgctcttcgctcttgactcgatgaaacgggttttgactcccgtttcctgcggcggatgctccggctggcgggagactgagaccgaaccgcgagactccggctgcgggaatctgaactgctcgaacttcgtgacgttcgctctcgacttgatgagcacgggtttcgactcccgtctcctcctgtggatgctccggctggcgggagactgactccggcgatgcgcgcttctccggctggtgggattagcggcgacgaacgggcctgcccttcggtggacggtttggcaccgctcggctcttccttccttctctgccctgcttggtttcgtcgacgacgggaattcgccccgtccctacggctgctccggctggcgggagactgacaccgatccgcgagactccggctgcgggagtctgaactgcttgaaattcgctgacgctccgggccaactcccggattctccaatgccaaagggaaaggaactgggatcgggaggattgggggagaacgacgagggctgccaggaaaggaagggggtcaagacgtgaatgggcgcctccgtttggccccgcacgagaatttgccgaatgtgatggagtgtggagggtgcttttccctcctttccgaatcctccaagccgtttcagcacgaatttattaaagcaaaacgaataatgaataaaagcgacgaattgatcgaattgggcgatgggacgggggaattggaggaattggtcacaggcagaccgaatatgaagcgaaggggagtggaagcaagagaagagaagagaagagaagagagcgaccccttggccgggggcgcttaaatagacaattttcgaagggggcgggcaaaaggccatgcacttagacaaattgtgagagagacaaaaaatggacagaaaattctagaagcgaattgcgaacaaaggaaatgggcgcacaaaaattgaatgtgaaatggcagatgtaaaaagtgagaaattgtgaaaggaaatctgagcacaaagttggccgaagatgagccaaccgatgagaaaagatttgaattgtgaagggatgcgatggggcaaaaatgggacaaaggaacggacaaaatgtgaatggtacgaaatggagaaatgcatatgagaaattggatggaaaaggggcaaaaattaggaatgatcaattttgaatgaattgatgaatcgggactcgccccgatcttctccaagaacatccctcattctttttgcttcgattgagtcccgtcccgttcatttgtgcaataggcggggattgacccgccttctcgtcgccaatgaaaaaattggcgacaacttagttaaaataaacaaatcaaaaacctaacgctttatcaatatataaaaaaacaataaataaatgttaacaaaaaacaacaattttcaagggttcatttgataatggtgggaaatacctcgaagaaattccaaaatagtgtgaaatttttctcaggtgacaatccagcgatcgcagaattgtatttgtggtcggcaattttctgttcacgtcgaagaacatcagtgaaatgccacaattttagtgaaaattcaatcactcataattttacgagtagtgatcagaaatgcaccagattttgcagggtaacagctgagaagaatgcttattcatataattatttaactgtcccataatgtttctttaaaaattttaaacattgcaattttgcgtacttttccaattttttgcaaaattaattcatgaatattttttcagaaagtgctctgaaacgcaccaaattttatttacatgttaataaggccctcttatgattgcattctgaaaataggtgctgaataaaaaatttaaaaatttttaattgcttttttaaatgggccaatgtttaggcttaactttttagtgaaaattcaatcactcataattttacgagtagtgatcagaaatgcaccagattttgcagg

SEQ ID NO: 2679 - DNA, 4538 bp, Heterodera glycines
cccccgacttcgtctgcctgaactgcttgaggttcgtgcgcgccaaacctatctcctccttcagatatcgtcgaattcggctgaaacttggtaggaacattgaggagacttggggccatcgaactatctcccagatattttttctcatgtctctgagccgaatgcgggcgtgccgaatttcccgcttttgattgtgccgccgaaggcacttctgccgctttttcgaaaactgccgatttctccgtcgtcgttgcgctgccatatttctcgtccgaatagtgagggccattccctcgagaattgtcgtcccgaatttgtcgatttgcctttttgtcaggctgtacatcttcaacttctcgtcctcgcttttcggcactttttccgttcctcttggtttcgtttctctcctccctccttgttgccgagggtttgttccgatccctcgtttcgctctgagtcttggctgctcgcgtttcttcttcgtgtcgttcatgtactgcttcgtcagctcggtcgtccgtttcgcccgtttttggccgcgcttctttcagcggccaaattttcttgatcggtcgtctccgagttcgtccgttggctattctgatcatggcatttctgttatgttcgctcgctccttttgtctcgactatccgtccgatgggccactttcgctgtttagggtccatttccccaattggctcctctcgagacgtaataacttcgttcgcacccgaccgatcgggaccaaactctgcaggtgagttgtggcggtctcggctaacaatccctcgcgaattgtttttccgactctttcgttttcgcttccaatttcgacgtacttctccgatttgttgtcgtttatttgttcgagtttggtggatatttccgcatggcatggttgttaggattgatgccgcgggagttaccccgctgctcgcttgtgtgccttcgccgcacaaaacttgtccaaacacggtgtcgatcacatgcgcgccactctcaattttccgaaatccgatcacgtaatcccagaactttcgaatgccgatcattatttgaggttgcgttgtctgtgtgacggttcgcggttcgctatcgggtgttgctcccgactcgatgagttctgttttgattggcgtacagatctgaggtacttcggacacctcaatgctctcccatttgccgtcggtccgtttgagtcgtaggcgataagttgctgaccgaatccgctgcttctttcctccgaacacttgaactgtaagcggccgcttgtcgataggttgcggtccgagttgttgaattagctccgtatctgcgccgtcgacatggcttcccgggtcaagcaacaaagttgtttggcactcgtcttcgccttcctctgcagctgcgatcactctgcatatcatttgctgggccgggagtcggcttccgaaagtggtaaaagctcgttgttccccggcattcatatcgaactcgtctcgattgttctgctcgtctcgtactgcagtgaagtgagttggtcgatccatcccactgatcagcgtcgcatggttctttgcccttcgttcgtgctcagtgaaggatcgggattggccacccgatatgctcttccagcacagaagccaatgatggtcgtcttttcggcatgcgttgcaccggtttactcgttggcattgtttgaataagtgattggagctcatacagcgcaagcatcgtttctgctcaatgagtctcttcctccgtgcctgtgctgtcggataggcttggcatttgcttggtcgatgtccacttcttaggcatagtgaacagttccatatctccgttgtggcaattggtccgtttgatgcgacacggggccaattcccgcctgagctctcgttctcgttggcatgtgtgatcgatcgtctggcgaaacgggcgttcgtcccgtacctctcctcgcttcgtgttccgttggattgtgcacgggttggttggctgtcccgtaccataaatgctctttgaaacggttcccgacctgcttgaacttccagtcccgtctgatcacgttctgttttgtgatcagtgcgtacttccgggtctttcattgctgccaatgctgactctgctgaccgcatgcaccgtacttgcgccgccaccgctctcctgaactcgcgcactgaccatttcgatcccatcatgctttctctgatccgcaattccgtgagcactcgcaccggcaattttgcctccagcaatgggccaaatgagtcgtcgtccacgttcgctccgagctgctcgagttggcatacgcaccgctcaaattcgtcgatcatcgtcgtcaggctgttcacgttgtcctttgccggtgccaaatgaagaagccgggcccgaattgcccgctgtaaatcgtccgtgtcgccgaatcgctcttttaaaagttgcacgaccaccgggtagttgccgtcggagggagggtagacttcgacagcccgccgggctggtgatccctcctttaagcagcgcagaagatgcaattgtttttcaaacccgggaatgggtttgtcgtccacagctcgcttgaaataggcccaaaatgttgtccaatcctcgggctttccggaaaaagtcggcggttgcagtcgaacagtctcgaatgttgtcattcccgtgatttcgtccttcccgtgcttccgatcatgttctccctcgtctcgagcatgccgtcgaatcgggtatgtctgacgctcccgatagtcgtcgttcacgtgagcctgctgcttttcgatttttggttgcatcagtgccggccgatgggctgttgctgtgggaaacgcccccatctcgtctcgatttcgattgatccattctcgcgctgggttcgtcactctcatgctggcgacggatggtactttggcacgccgctgaaaaatcccgtccaaattcgacatgacgggtgttgcgactcgtcccattggtcttcggttgtgttgcggtacaccttgtccgtcgttttgccattgtttggccgccacttggaaggatctctcccattcttccatgttccgattttccagtggaggtgggtcgtcccccaccggatggctgttgttggtcccgaatgacccgctcaatcgagaccgcgcgattgcttcttcttcattctcgagtgcctgtcgcatcgtccttaagtctccgatgtgctcgtccgcaatttgaagcagttcagctggtgttggatggtttcgcaactgcaactctttcgtcgccgccggcagtggcgctgtcagtatgtcgtagaagaagtcctggtgacctgcgggttctgctcccgttgctgccattccaatctcgaaatgtccttgaaaaatttggattgcttcctggagtcccctctccatggccaaaagtcgcgccgcttggtacgctgcctccccttcggtaaggtcttggtcgatcacttctcgagcctccgcaattcgagtagcgagagtcccggattgcgccacgcgcttgggggttggggtgggccaagctgaggcgggattggttcccgctcctctgcaccgctctcgtcccttctctttctgttcactccgctcgcgatgccgtaaagggaattgcgcccccttttgccgttagctctgatgggtctgatgctgccgaccgatcctatcggcgccaaatggggacgagaatgggagggggaggggtgacaaaatggactggtgcttgatggaattgtgcagcgatttgctgcttgcttaacggcaccaccgacaaggtttggagaagggcttgtcggacccctttgaactgctgcttcgttctcgactcgacgatcacgggtttcgactcccgcccactgcgcgcttctccggctggtgggagttgcgctgacgaacggccctgtccttcgttggacgatttggcaccgcccggctcttccttccctcactaccctgctcggacttgacgacgacgggagttcacacccgtctcttcggctgctccgactggtgggagaccgaactgctcgaatttgccgctgcttcgggcactcccgaacttccccccggcccggcccgataatgcgatgagaaaaatgggacaaaaaaatgggcagaaattgtgatgtgaaaagtgtgaacaaagaaatggcgcataaaaataaaatgtaaattggcagatgtgaaaagttaaggaatttgaaaagaaataactttgtgcaaaattgttttgcacaaagtttgggccggagattagccagcagatgagaaatgaatttgaaaagtgaagggatgcgattgggcaaaaatgagacaaagaaacgggcaaaaaatgaatggtacgaaatggagcaaaaatgcaaatgagaaattggaataagagattttatgaaaaaggcaaaaattaggactgatcaattttgaatgagttgatgaatcgggattcgccccgaccgtctccgagcacgtccctcattcttcttgctttgattggtcccagtccctttccatatcgtgcagtaggcgggagttgaccccccatcttgtcgc

SEQ ID NO: 2680 - DNA, 3707 bp, Heterodera glycines
caccaaaaatgttgaattcgataagtccgatgatcgatgtcctcaggtcgacccatcgtgccgaattgtcgccggtccaatgagtgccgtaatggcccgagctgacaaaagtcgaacgtgccaacacttggctgcgcttcccaaacaaatcgtctaaatttcatatttgactttttcgcaaatattttggccaatttcaccgagtgcttttcgtgtggccaccatttgagaccatccgtacaaattgtgcgtgttgaacattcgttgttggcctcgcattgtcatggccgacatgcaaagcgttttttcactcaaaaccgacccgtattggtacacatttatggtcttaaatgtgctaattggttatttaatcagataaattcacctcataagttggcttatcaaactgggaatccgtcccgctgagtggacattgtaacggctgaaggttgtgactttgggccgacggcttttcatttgtgccaaacgacgacggctcgttcatgtcgatccaaatgccatcaaaagggacctaaaatatttttttaataataataaaattaaacaattatcactttcttgtgaaagttttgcagctcctctgaccacctaaagcaacaaaaacataaatttgaacattaaaatattgtaccatttttgggttttgttctcggggtccaaaaagtcgggaaaggccacgtggcgtcccggccaaacgacgctgagcataatctgtcaaaggattcgtcccatttaagaacccatcaatttgcattttgcctttgtttctttggccattgggtaaagattttgcacatctttcggcacttggtcaaatcgttcccattccacaaaggaaacgtccgcttggatggcacgttggaacacttcgtaatcgacttgaattgccgggtcgaggattggtacaaatttaaggccctgccggtgcaacgcgtccacgtattcgccaagagcaccccatttctcaaaaattaagtagaacaacacaaattggcaaattttactgattgtgagatatttgcttaacattacattctttatacttccttcatctctcttctcccctctctctgtctgtcgtcctctctctctctcacgctttctctctctatctctgtgtccctttctctttctttgttttgctatcattgaactgatcaatttgatcagaatctgctctctgtgctgatcagctgacattacagtccttcttcacctgttgaccaacagtgaagtccatgtactgctccatgtgatcgatgtccacaaagacaacatccaatgggattactgcagcctgaattcttccaattgttgccttcaaatcgttcaagtctttgtagccgtatcggcaaaattggtagccgaatgcccaatatggaggcaaatagggccggccgatgaattggtggtattggcgaacgacgagttcgggggaggggccggggaagaagaacaggtccaactgaccaccgatggtactgaaaattataacttaacgaaagcgattgacaaaatgttagccccgcgtaagtcttcaatcccgcgaatcacccaaaccaaaacattgcgtttgaaaatgatctaccgaattagtcaccgctcttaacttttcaatcctcgccttacggtacttaacagttcagcaagggttctcccaatcgggcggctgattgaccgatcaatcgaattgactgaccgatagaccaaatgcggcgctgggcccgtcgttatttcctgcgggttcgagttcagaatcaaaactccgtgcgcttttccgctcggttccaaggccaaataaaagggatgaacgcctggagcaatggaattttgtttgtttttttgtcactttttgcaatttatacaaattattcaccgtaccatataaattctcgacattttccaccaacggattcggcgcttcgtcccgcgtgaacattccccacgtggtgtacttgctgaagtcgtgcttcaactgctggtgcgcattttcgccaaagccatagaccaaatcagtaggcaaataagtggcgatttgaatgaattggtcggcgaacaaaagtccgcctaaattatcgttaataattgaaagaattttcaaaaagtttctgcattaccaatggatgtgtcccaaattttttgtccgtcgcttcgctcaacggtaaaataaaacatttggtcatgtgttggttttttaggataaacattgacaaaaatctgttcatatgtcgactcaattggtgcttcgaaattaaacggaagtggtggtcgaaatctgtttaaaaatttaaatttgagagattttctttttggtcctaccgattttcggcataaatgctgacatggagagcggacccgaactgcttggtgaccaattccaacgcggcaaagtctttaccgtagggatttgctaccccattgtttaagcgtatcaaattgaaatggtggtcattcgttttgccggccaaaccataacccgtccccggtgggaaatagcacagcggaacggtaccgtggtactgtaatgaaagaaaaaagtgatcaggcaatgactacgcattggtaccttgtcataagcaccatcccaaaggcagcccctggccaaacagtcggatttgccctctccgaatttgggggcacaatccacgcgagcatttggcccaatggcagaaaaaacggagcaaaaaagcagaggaaacaaaaatgaggacaaaatgagaaagggaaactgcggcatttttatagataattattctgaaaagaatgaattattatgagtcgtacttccaggaaagtgcacaaatttataaactaaaggtttcaggagtgatattaaagcaatgactttcgatgcctttgaattgttcacaaatcatatatttttaatatttaaactacatttttatgataaatgacatttaatttgtcatcattaagcagaagagaatgttttttatcctcttacatttttcataaaaaatatcttttgctctattaatgttaaataaaaattatctgctgggaatgaaaaaagtgaaaaaaacaaatgttaaacttttttattaaatttaccgtcctttataaaatgcgaaagcatttaaaaataattaataaataaataaagaggagaaatttgcttgttttattcactgattttgattaagccatttggcgatggcactttgtcatatgaaagtgaaagaatttccgcctttgcttttgctgattttccaaccattggcagaaatcgatcggccgctttttccgttaaatcagtggcaaatgaccgacccatcggagtgttcgtcggaggccaaagattttccgaacaaagcttcaaattaaaaatatggagcaaatggtaaaaagaaaacagaaggtgtgccatgtgccggcggggcgacgaatgattaaaagttttgtttggttttgcaattttcaatcagtcggttgattaatgtggagcaatttagcgctctttttcttggaatcaaccaatttacaaccttttgaaatgttttaaaaaaatggattaaatgatgggttttggatgataatatcataaaattatgattaaaaacaaatgagtgaattggaaagaattaaatagatgaattagagattatgctttttcttttcagaacaaaggagaatttttatcctctatattaccaaaaaaaatattt

SEQ ID NO: 2681 - DNA, 4470 bp, Heterodera glycines
  unsure (1)..(4470): unsure at all n locations
gcttccgtcagaaggaattccaaagattgaactttctcaaattggaggacaacacttcctttaattggccaacatgtgttgatggaaatggccataccagaaacgaaggcagcagcaacaggtgactggccttcctggtggaatgggccggcaaacgtgggttagctttttctttttttttgcgtgggctgaggggggggggggggcaaatcgcaaaaaaagcgatcggtcggttcactcactcccatccgttcatttcgcccattttcaatcagtgaattttaaaagcataaattcatttcgaaaatcaacgcaaatgagtggctacaaaatccaccgctcccgttcctcgccaatggtcgcgtgggcttcgaattcgtcggtctgtgtaaatcattttttcataatccccctttattcagttatctcgcacatattccgtctccgacatttcggcctatgcgagtgccacggattactttaaacaacggtggtccaccgcgtacaatccgtaccataacagcagaaaggcctattattggcctcaccatcggcacacgtcgttgttcccagtgggtgaaatcaatcaatcaatttatacgcaaaagcgtgacaccgacataaataacaatataaataaatttggtcactgaatgagatgaggtggtttcaaaagtaaagaatcaacatcataggtgtcaagaagtttagcaaagtcaatggaattaagtaacctcgcctctttaggcaaacacctatagaggcgagaggtacgaataaaaaacgaatgataccgaacattggttgaacaataagcggttttaataataaaatcatttttcagttctgaatatgtttttgaaaaggaatcattatgctgaatatggatcttttccaaaattatatcatggaagagttttaaatctatttttattctgcgttttaagagggattcttgtttaaagagttgaagaagttcgttatacccgggtatatcatccttattattattacgtctaaaaacaatacgtaaaaatgttttttgaacattttcaagagcatcaatgtcttttttcatgtatggattaaaaatcggagaaccaaattccaaaatggatcgacaataaacattgaatatatttatgagaatttttgggcttttagttttaagtgacttgagtaaagcaaaagatgttcttattgcttttttagtaataaattctatatgtttttcccattttaagttatttgaaaaataaatgccaaggtctctaactggttcaccttcttcattttttaaaattggaatattatttattaagtaacattcattagggtttttaggcccaagatgtgaaactaagcatttattaggagcgattttaaggccatttaattcacaataattccgaaatttattaatgaaagaatggagtggagaaatagtattttttgatagtatagaataggccttaagatcgtcggcaaaaagcttaatttcaacgttttcagttttacaaaaattaggaagatctgaaatataaattaaaaacaaaagtggtcccaaatttgatccctgaggaacaccacttaagcaagggaattcatcagaaaacgcagaaccaactcgaacaaaaaatgtacgattttgtaaataattttgaagccatttaagcaaagtaccatttataccaacatttttgagtttagaaactaatctttcgtgtggaacagtatcaaatgcctttgctagatcaaaatatataacatcaattgattttttgttttccaaagctaaactaaagtcatcaatgacttccaaaagttgagttgtaacagagtgttttctcctaaagccatgttggcaattcggaagtacattatttgtctcaacaaaattagtgattttctgggtaatattttcttctagaatttttgaaattgagcataaaagtgaaattggccgaaaatcaacaggatttattggattgggtattttcggtactggataaataattgattttttccaaatgtttgggacttggccagtcatcattgaaaaacaaaaaatatgaaatagcggataaaccaaattttctttacaatttttgagaaaaatattcgggatgctgtcaatggaagtattattattgttttctagtttattaagagccaaataaatttcattaagtgtcattgtgaaaaagtcaatattttttttaggggtgacttcacatgaaacaggaattttttggtcagtgaagaccgagtaaaattgttcggctaataaattggatttagctttttcggaaaaggcaattttgttttcgctatttttaagagggggaatttttgtgtttttagtttttaaaaaagaaccaatatatcgaaatcgttgtttagggtctaaaccacttaaaaatttattttcacgatttgtaaggtatttctttatttcatattcaagttttttagaggtttctataaatttttctctagttttttcttttttaaggtctttccaaagttgtcgacgataaagcataatttttttaatatggtctgggaaattatgttttgaatttgatactgttaatggaacatatttcgatattaaaaaatgcaaaaatgctgcgaatttgttataaatttggtcaatttctatacagtccgaaaaaaaggtaacccaatcagtagaagagagtatggcatttatttccaagtaactagcttttttaaagttaaagtgtttaaattttctacaaggaaaaacatttagtcttaagtcgaattttacagtgttgtgatcactaagtgagaatgggggaccaactgaaatgtcttttatgagaaatttattatttgttanaattaaatccaaaaaattgcattccctggtgggttctttaatcatttgatcaagtcgtaaaccttcaacaaaaccaaggaaattactttcataatttgtcaaattattttggacagagaaagggccattttggttccagtgaatattagtaaaattaaaatctccaagaatgacaaaattttctgttgagactgttagtgacgaaattaattctacaagttgcataaaattttcgagtgtttcagtagttacaggtctataaaccaaaataagacggatttttgattctgtaatgggcgaaaaaacatcgatacaaagtatatcagaattttgtatttttggagtttttataatttcaaacggtatttcattcgaaatgacaaatgctacccctcctccctttttattttttctatcttttcttattaaagaaaaaggaaaattttctaaaatttgcgagtcgcttattttattgttcaaccagctttcggttattgcgataattttatacctattttctaaaagtaaaagcctaaactcatccattttgtttactaaacttcttgagttaaagtaaaaacaattgagaaagttttgtgacctcaaaagtttttttccattgtgcctccacgccgcgtcgtcaccatttcgttctttttgctttcttcataattcatccgcctttgttcacgtgtctcccgttcagccgccaattcttccttcgtcaaggagggcctgacgagcagtcgctgccaaccgacacgctgtttcagttccgtccggttgcgcccccattgtgccagtgcaaaacgttggaacgtcgtcgctggcaagacaactttgaccaaacgcggcccctttcgcttatcatcaatccgccgccccattctatacaccatctgtgggcaaacctccacatccaaagcgtccaacacttccgcaactgtttccgcgtcctctttggcgcgttctgatggcttttcggccacagcctccggaagtccgatcaaaacgaggctccgttttcgttctttctgcacaagtgccacggcatcgcttaatcgttccatccaatggcattggtatttgctgggctttggtggcaaatccgaagctgacaatgcttaaaaattagttttcttgaaattcgtgcataaaatgccaaaataaaatctaaaggtaattttctaaagaaatttgtgattaattttatatatttttttcaattttccttacagttgctcatttgtgaccgtaatttcatagtagaaaattccagcaacatttaatggagccgcgcattttgcgaagacagtgcgaagaccttttgaagagaaaacaatgttttatgaattaattaaagtgaaattaattaaaattcaccgtttccgactcccttataatgtaccgtaagacattcggtgccagtgatttccaggtcactgtgacaagcatcggcatcccaacaatttttggggaaattttgataaaactaaaatttattttacaattaaaattagtgatcgagtttagaaaaactaattaaaagatgaatttttttttgtcaaaatttcaattttggataaaatctgaacaagaaa

SEQ ID NO: 2682 - DNA, 524 bp, Heterodera glycines
gggggggggggggggggaatgattatcgaattttgaatcactctttttatgcgtaattttaattaatctaaaaattagggtaattaataatcattttgaaaatttgcataaaataatgcaaatcaaaaattatattttactaatctttaaaaaatcaaagttttatcagacagaaattgaaaacatattttttcaaatagataaataataagtagaagctctttttcctacttctcatacttcccatgttccaatcggtgctatatcattattaaaaatagggttgcgccccgacattttcgaggttttacgaaattcgtcaattgcactttaaatgagatggaagtgtcttttaatgagtttttaagacttttttgttctgaaactttttcttttatctttttcccgaaatctcgcccccgacaaaggtgtctgcccccgacattttttaaatttttccagccacccccgacaaatttagtcagggaattttcaccccgaaccccggcttttccaaccccgac

SEQ ID NO: 2683 - DNA, 2046 bp, Heterodera glycines
caatagtaggaacgcaagtagtacttttgacagttttaaaaatacagcgcactgattcgtgcgatttatcagttttaaaatatgtttgaagtcaatattgatgggttccgcgggttctaaattggccaggttgctgttttgaaaaactggctcatgaactccaacaataaaaatttcaatattcgtgaataattaaccctcgcatagaagtcaacatcacttttcttgcaaagcttcataggcaataatttaaattgcttgtgattatattcaatcgctggaaaagcattcttttatacgttaaacctgcaaaaagcagtccgaaattggttgctgaccattctattccctaagaaaagtctcacacggaagcaatagtaggaacgcaagtagtacttttgacagtcttaaaaatacagcgcactgattcgtgcgatttatcagttttaaaatatgtttgaagtcaatattgatgggttccgcgggttctaaattggccaggttgctgttttgaaaaactggctcatgaactccaacaataaaaatttcaatattcgtgaataattaaccctcgcatagaagtcaacatcacttttcttgcaaagcttcataggcaataatttaaattgcttgtgattatattcaatcgctggaaaagcattctttatacgttaaacctgcaaaaagcgtccgaaattggttgctgaccattctattccctaagaaaagtctcacacggaagcaatagtaggaacgcaagtagtacttttgacagtcttaaaaatacagcgcactgattcgtgcgatttatcagttttaaaatatgtttgaagtcaatattgatgggttccgcgggttctaaattggccaggttgctgttttgaaaaactggctcatgaactccaacaataaaaatttcaatattcgtgaataattaaccctcgcatagaagtcaacatcacttttcttgcaaagcttcataggcaataatttaaattgcttgtgattatattcaatcgctggaaaagcattctttatacgttaaacctgcaaaaagcgtccgaaattggttgctgaccattctattccctaagaaaagtctcacacggaagcaatagtaggaacgcaagtagtacttttgacagtcttaaaaatacagcgcactgattcgtgcgatttatcagttttaaaatatgtttgaagtcaatattgatgggttccgcgggttctaaattggccaggttgctgttttgaaaaactggctcatgaactccaacaataaaaatttcaatattcgtgaataattaaccctcgcatagaagtcaacatcacttttcttgcaaagcttcataggcaataatttaaattgcttgtgattatattcaatcgctggaaaagcattctttatacgttaaacctgcaaaaagcgtccgaaattggttgctgaccattctattccctaagaaaagtctcacacggaagcaatagtaggaacgcaagtagtacttttgacagtcttaaaaatacagcgcactgattcgtgagatttatcagttttaaaatatgtttaaagtcaatattgatgggttccgcgggttctaaattggccaggttgctgttttgaaaaactggctcatgaactccaacaataaaaatttcaatattcgtgaataattaaccctcgcatagaagtcaacatcacttttcttgcaaagcttcataggcaataatttaaattgcttgtgattatattcaatcgctggaaaagcattcttttatacgttaaacctgcaaaaagcgtccgaaattggttgctgaccattctattccctaaaaaaagtctcacacggaagcaatagtaggaacgcaagtagtacttttgacagtcttaaaaatacagcgcactgattcgtgcgatttatcagttttaaaatatgtttgaagtcaatattgatgggttccgcgggttctaaattggccaggttgctgttttgaaaaactggcacatgaactccaacaataaaaatttcaatattcgtgaataat

SEQ ID NO: 2684 - DNA, 6121 bp, Heterodera glycines
cacataatgatcgatactaagtattaacaacacaattatggtgaataaaatgtatattcacgatttttatccaaaaaaaatttacaaaacaatagggtcccccctatggtttttgataaaatacaaaatttatcactttataactagcgccaaatttgcttaataggcccaaataattgtcatgttcgtaatcaatgacctttaaaacccccgggtatttggtttcaggactttttaaacaaaaaaaaattttgaccaaaaaaaagttgaaaaaattttcaaaatacacctctttgtaaatagtgccttctaattcatttaacaactatttagtttgatgtaaaacaatgcttaaattgttaattggacaaaaatgcgcaatttgcgtcctaaatttgaccgattttaacgaatactttgcaaattttgccccgccccgactccaaaattgtacaaagttatactcgattgctgacaatccctgttattttttccactcttacacagggacaaaaccattgtttatgcgttaatttgtgtttttgtttgtgcggtttaattattggcgttttaatctattttgaatttattaaaatattttaaaaatcggaaaaatttgtaaaccaaattccaaaccaaagcaaaaactttattcatcaaattttcttctattacaatattttatccttcacaatgtcagatttaagaatggaggtaaaaataaatgatttcctttcatttattcctttcatcttaaggccagcaatgatgtgatcattcccgtcaatgttgcaattcgcatattcagttttgtcagtagagatgatttggaaaattgcaaactcacctgcaaatcatggaaagacgtgtaaggcattgaattttgttttttgcaataaaacattggcaaataaaaccgattattttaagaattgattacgcagacaaccgaaagaactcggagttgcaactgaggcacattgacgccatttgtctctcaaccaattctgaattttctatcaaaatttactacaaccaaactattcgcgagttttactacaaaaaatatttcgctgataggttaggcctttttttaaataaaatagaaacattttatcttcagggaaattgatgaaattgaagtgaaaaaagtcaggcatttaacgagtcaatttgacgagaaaaaatacgttttcccatgtggagagcatttgccaattcggcaaagtcattcctttgtttttccagcggttgatatttttcaccaacacaggtgtaaaagtaggtaattctttgggttaagggcagttcgtacaatttttttttttaattttcattaaaaccgaattttttatcaaatgatttttttaaatttttgcgacacttttgctgtttaattttttgggtggtttcgagtctctgaattctaaagaactgcgatgacatcaattcttttgattaatttgtaagctaaaaataatttcaattttttcagtggtgaggccaaccgtttaccaggaccatgtcaattacacgcgaaaactcttcacacctccgctcagtttttatgaacgccttcaacgaatgctcaaaaaatgtaaaattcgtctggtgattttccacgcgttcactttcactgatttctttgttgaaaaaatgcgtgaatttgcgtccgatgcgttttcgagggtcgtttttctttcccttcactgtaagtccaatttttcgttaattggttcattttcttccaccttcttttctcaggttgcaatctccgctgcgttagtccgaattctttccacgaatttctctcttctgtttatgctgctcattttcttttggatcgccttaggaattgtgtgccgaatcattttaacgctcttttgctgagcaaaccctccattcaaatgtaagtgcattcattgtccatcttttcgttgatagtttttaaaaatttttcaaacaaattgctaatttttgtgaactctatagggcgcgtacgttttacgttggcttttgtatcggaagacgacacacaaacagtggtgcccttcccgatcgacgacgacgacttcataaaatatgtgaaactgctcggtgccgctaaacgacgagatttttttggcattgctctctgtcgagtgacacaacaatttcgaccattttatgaaaaggcaaggaataccgtaattataagtaaattgcaatgtataaatttttagataattaccagcaacaaataccgccggttgaatttatatactcacgtattatttggggacgttcgctatttatctaatgaattcggatttacaaattcacattcagtccaacaataatgtcaatgcttttgttttgttgattgaattgtatatgaaaataattgaggattttcagtaaataaacggcagttcgatttggatccaaaagtcatgaatcaattccataaattttttttattaactacaaaaataccgttgaataggatttaaacatattgttgtcaaatagacacttaggtattataagtaaataatcaattttttagcttattaatactaaaaaagcctggatcattcctggacctgggttttcctagatttttatttagaaagtacaggttctctaactataaattgaaaattttttggcgttttatcttaattaaggatgactaatcgtaccagaccggccctaatgttttcaccaacctgtgtctacactaattaacattactaattgatccgcacagcataaatacccgttttttgttcactattattaaattgtcgtttttaaccaattatttaatttgtaacatcaattcgaatgactttcctggatcacgtcgacaaagatttcttcaaggcttggccttttggagtgttgaaaacgattcattgggttgttgaaatggcattttggcttttcccccgttcatttcacttttccgttcagttcgctcccctcgccattctcattacacttggaaatagtcgttacatttatgactccctcggttttgtccttttcacagcatggaatgcattcatcgtttcgctgatcacttggctttgttatatcttccgattaaaccgaaaggccttccaatttggtgccggttatctcttcgtccctttcgcactgattgtatgaacaaactttgcccatttttgatgatcttctttggagtttttaggacttcattgtgtctctgttggctatgctttgtttcggcatcagttcgttgatttgcgccattgcgctgcttgactcattggaatacagcttaggccacatcatctcataccttctcgccacggtcctttttatagccaaatattttagccgggttcgcaacatttaaggttttctgtcttatttctggctcggccttcggctattttgccattcttgtctaccgtctgattccgaatggccaattccgccatctgatgacgatggtaatcgaaggtcatcagaccactacgttggatggccaaggcggtgtgggcccagtaaatgccggccccccaccggggagaccgcccgtgtgaaaattcgcaatattttaatttatcattttttgcttatttgctcacttcccaaaatgcttatcagcccttcctcactttattcttcatatatgcaaccgatcctctccaaattatcatttttgcgagctccggtctcccccttcgtatcccatccttttttaatagaatatatcgctttctttttaatccaaaagcataaataaaaagaatatccgtaacggtggaagagagatcagtagataaaccattgacggaataatttgttgggttattcttgggtaattccagccaaggaaagtgtcaaattgcattccggttcttgggcaataaatattgctccatgcccatcgaaaatttcttaacattgtttaaataaaataagttttttaaagattgatttaattaactcattgttaatctggaggcaagtgcatggagtgcactaagaaaggcatgaaaattcctgatgtccaacgtaacgttaaaaaaatgctcgggctgtggtgcagtttgcgaaagacctgaacaaaggaaaggaatttaggctattgaaacatttacataacttggccactgggaccattattttttaaacatggcataaaccatttgaaaaaaaaatttttgaatctcggaaagctaaataatgagtcataccctcagctccgctgatgctctgattgtgaagcccttgagcatagacagcgacttttgcctggtcggcataaccaatgatgttgaactctccacgattgtttgcgcgaaatatcttaagaaattcaatcacaatatttttcgtttaataaactgatttaccaaatgccttccgccaatgtccttcacacccgagacaatttttgtctaaaagagtaaagaaaatgaaagaaagcggacaagacaataaatttgggcagccccactttaaaattgtgatccatttctaattgtaggtaaatatgggcccatttgttcattttcatccaatagtaactgaccaatgttttgacgtttggaagtgcaactgccaactgagaaatgcccatgtttggtgggttgaagtcgggccattgtcgtagaacaaccaaaacaatgggaatttcgttgaccagggaattggcactgagctccacgcgaaggtgcggcaccccgtcctttttggtcattttcaatttgatttgagtggcacgcgaatgcagcgaacggacgaagtcgtcggtggacaattcgaagaaaatcgcgttgttgtccagggaaaggccgtcaaagctccatgaattaaataaattatcctgaaaaatgaaagaaaatgttgggcggtcatttccattcgatagcaaatgaattcatacaaagtggcaaataatgaatcacttcccattgaacaccttgtgaatgcggaagtcgacgtgcattccctcacggacattgtacacattgacaaaactgaactcattcggcgtgattcggacgaccgctctcttccgacacaattttgaaacgaccgctgccacttcttaacaaataaaattagaagaattttaacacctaaaacatactgacgaaaatatccactgctttcccatcgccaatcaccgcaacgaaacgcatttttacgcaactttttgactttaaatgtaacagtgaaacatgtcaaacaaaataaatcaaaaacatcctcactccaatcaattttggaacggaaaaataggcatttaaaaaaccaaatggaaaggtaaaagaacgtaaagaataatttatttgttaaattttttcttaacaattgagcgaatttccaaccaaacaataaaatccaatgctttgtttaatattttttgttctgtcctccgttgctcatgaagcggacttcgccttctgtacaatcaatgggccaacattgtcccccgtctttttgttgtgctcattgtgggacccgtcacacaaaggaaactcaaaggaaattctaataatttatttgggttttatttcgttttacttttttggattgccaacagcgacaatatgcctttttctcgccaatgtcctccaattcgacagtgtccaccactttgtccttgctcaactgcactcgcgtgttgcatcgggccaattttgaagccgcggttcgccagccgagcaaatagccaatggccaaacccccggccaaaaaggacaccgcaaaggaaatgttggaacggtcgaagagagcttaataaaaatgaaatcgactcaattccgacgcacacaaattagactccatcactttttttgtttgaaagtatccaatgggagtgggaaggaagtagaaaagctcaccgggttgagttcccatcgcagacgaagacattctccagcaataaaaatattatatacctaattaaattggataaaattattttactatacaaagtagactttctgacatattttttgatcacattcgcatgtcaacaaattatgtgtaaaaaattaaacacataaaacaactaaatttaatcatcaaaaataaaaattgtaacaacaaaataatttttctgaacttaaatttttttttgattaaatcatca

SEQ ID NO: 2685 - DNA, 5750 bp, Heterodera glycines
  unsure (1)..(5750): unsure at all n locations
ctttcacgcataagaattcagattaaagaccagcaggaaaagtaccatcaccgaattatgcgacgatttgtgaggtttcaataggacatatctcccggtttaaatttgctgggattccatgaaaggcctttttgcgataaaatgttctatctgcccactgttgttgttgtcattatctgttggagggggaagtcgaaccggcgcatttggtttcgattcttcggaacttgaggacgaccttaagtttggcaaagatatgaaaagtgtaagcgaactacacaaaaagtaagtaaatattcgaagttaaccaaaggagcgataaatttattcatttaatattaaaaaaaaaacaaaacagtgagcataacatgggatatttaaacacaacaatgcggacaacactttgacctgctcgaagttatggtgttctgttcccccaacaaatatttgaaaagttcgtagacactccaactgagtgcagcggacggcatttggtaaagcacccgagcatgaagaccaactaaaaagccagcgaagccacgggttgaataaatggaggaaattgcatcgagaatgcctaaaatttatactataagaggaaaataaaatgtaaatattgaccattgtacgagcctttgagataaaggagactccgtttgtcgataaccggttgaggggattgttgggtgtttaaaacctgaaaatgtggtcttatgaatttgtggatgagttaattgattttttaagatattcgatggcttaagcgccagagaagatgaattagccaatcgaacagtaatgagatttgggcattttgagtttgaaggcacagcgcccattagaacgcctaatttctaattgtgagacacctatcccctaatattacattgggcgttgttaaaaaaaagtaatttttggaagaaaccacttaatattatacggttttgacgcagtcaagtgggtttgtaacagcggccgcaagtccaccggcaagtcctcccgaaaccaaatgcgaagttgggtcgtatttacgttcccggttaaattgctaaagcaaaggtcaattaaaaaaacaatatacggcgagatagacgacctcttgccagaattcatagcatacgaaatggacggcttggaacggaacgttcataaacaattgggtggagtaagagcgatagaaagcggccattccctcgttccgaaagatgcaacgcacacattccaacgaaccgccgtacggactgtacagcatttgcatgcgctgtttgaccacctcggccgggttcatcaccaaatcgtggaccactgttgccgccatgccggccaatgcgtacgaaaacgaattcgaatggccatgagtgttgccagtcagtgaagactaaaaacgaaatcaaattttacaccttccttatatttttgaaccgaaaacaccttgaacttttcgtagaccgtgaagtaaagggcgtgggctggcactgagccgacagcgaccgcattgactccgcgaaacgtccgccaaaatccctccctgcggaccattgaagcaacgccatggataggagtcggacacgtggactcgggacaagggcacagcgactggagacgcgttttgacactgtccaatgggaacatcacacaatgctcagccattcccgccgctgcgcccgccgccaaatgaacccaaagcgaataagtgggagccaacgattcgtactcatcggcaccgctgctctgttccggcatttcaatttgctggattataaattcttaaacggagtgtaaagcaaaaatgataacaaagaaaagataaggatggatcagacaccaaagatgcatcagacatttctacccaataacaatttattattagcaatttttgttagtatttattaattgctcatttgtatcttcgaatggcggattttcgaggcgctgaaacaccgccgcccatttatttccgctgttccgcgtcactttttgtccctcttcggtgctttcaaatagcaatggcacaacaacatcgtcggcatattctttgtcagtaagtcgtcggaacaatggaaatccttgcaggtgattgaccatccaatggtgcaactcttcaacatccgttattgtgtaaatacggcctaaaataaaacatatttaatcgaatgaaacaacaatattcatagtacaaaattagcaaaattcatctttatgatttcaaatacatctatgtttaaaaagacaactttggcaagttcaaaatccactcaccgcccggcatcagaacataagcatattcagcaagcaaatttgttgaaataatcctccatttatgctttgtctttttgaagtgtgggtcgggaaaaagaaagaacattttgctcagttgacttttgcggaaaaaattgggtaagtttttcatcgcattgcttcgcatgcaacaaatgttgtcgtaacgaccagggttttgtgcacggagtgccttcactctttcctgcacgaaatcggctacctaaataaatttttaaataaaaaaacggattagtcgtatttcaaacagaccttcacccgaatttccataccaaccattgttacgtctggaaacatcggagccaattttaccaactaacaaataagtaaattttagattgaatattctgggagttttcttaccaatccgccatagccacaaccgatgtcagcaaactcaggggaatgcccttcggcactgggcccaaacaattcgttccagtccatacttgaaaatacgaatggaaaaatatgcaaattcaaatataaatttaccaatccggcgagattgggtattttagatcatgatctgacattgggttgctatgtgctcgctgtctgtagaatcttttttgtggatatttcgtttttttactgttttcggtgatagaaaaaacatcctcaggttgcgaaagagacatgttcggtcgaacaattatattattataatctataaaataagtaataatttttttatgacatattaaatccaccaaataattttttttcgtgatgtgaggctatagctcaaaataggtcgatttttagagaattttatccagattattcaatttggattttaaaacaatttgccaatgaaattagcacaatgaattttaaaatctctgcagttttccttttgctgactgtcaattctcaaagtacagtaatattcctggaatgatttattcgtttaacagtaggaaattgctttggatcatcgcaaaatgttaattctgattgtttctcttcgatcatttttctgactttttatcacgctctttctgctcttttttttctgtggttgttgcttaatgtttcccgccttcttttgctctgttttcaatgttttgtcccaatttccccctctttctctctctcactctcactctctccctctctcaatgtctcttttctctccaaatcgtctcctttttgatcaaagcactcaattttgactatttttgccacaatcggtcatatgtaataaacattactacactttaaaataattccattttttattttacccatttgaaaattgttttgtttccccggtaactaataaatgtgagctgcctttctgttgttattaagagaatggaatatttattttctcgcggagaatgccatcaaagaaaatgatttaaatttcgttttcttttcacttcggcgcttgtttaatttgaatctccgatttatggattataatgggtaactcttactcggagctttctcgtctcgacgacaacgatgtgattatggtacagacgggacgagactttcccacgtaatttgttcaattacaaaaacccactctcacttctgaaagtaatgcagaaacagacggactgctgctgggctgtacttcccgccccgtcgaaggcatccgatcgtccggccaactgtccatttggacacggtcaattggctgtcgtcggttcggcctgagattgtgatcagctgcagttcggacaaagtccgcaaagaaggaatttctgtatcaaagacggggcaattacatttagtcaattgctttgcataacatcgacacgggcgcgtgtttgacgcggtggcgaggccatcagaaagaagtgaccaaagttgtgtacaaacgcgtcggatgcgcacatttcctcctcagcggctcaaaagatgctagtaaaagtgtcatcaaaataattaatgttaaacaaaatgccgcccattagcgatcagactttggcatttcaatgcgtccgaatgtcgcaaagttttcgccggctatcacaaattgacagtcaccggattaactgctttggatggcatgtttttttcaaaaatggctgatccttgtgacttgtaagtacactttttgctcagaattcagatttgtgtctggaggaagagacggccgaatggccctttgggatgttggagaagcggataggcccgtaagaagtgttggaaacagtcaaaatgtggtaataattcattagactaatggatgcccttgggcataaagtgactaaaatgccaaggtgacgcacatcgagcaaagttcggatgccaagacattttaccaaacggctgaagacggcactttgaggctgtgggacgcacagaatctgtcgccgatttgtcagctgtcctcctccaccagcctttgccactgcagcacatcgaatgctgagccgaacaattgcctaactgccggagggggtccccttggtgacggatgtgtcgtcgaagtgatttagacatcagcagatatttctgctggtgttgtaattggcaattgcttaagctgtgggacctccgccgacggaaacgtctccagcaattccgtggccacgaaaagtccgtccgttgtgccattttcctccaacagcaacaagtcacgaggaaaaacctaatttttgagcgttagtggcgacaaaactgtgcgactttgggaggcgaattccgcgagtgcggcgcatttcctttttgcaattaagagtntaatgatggccccttaaggatgcgttnggacagaaaccgccccccgcggcatgaattgttgcgtcggctcttccgacggaaggtggcatgttttctattttcgattgtttcttatcggcatcactttaatcgtttcagtgtcgtcgttggcggagaatgtgccacactttgcgattttcggctgtccgaaaaggcgggacggccttttcttttttgcaattcgtttcaatcgaacaatgacattaattaagcaaagctcaaaatgaattgatacaaaatgaattctgctaaatggtcatttcgctttttctttgcttcgcttaatttccctcttaattaattggctctttttttgtgtttttctctctgatagcgaagactgaacttattttgtttgaacgcggaacgatacaaaacaatcacttcgtcggattcgcttacaaaaatatttttttgaattgaatcacaaaatctgaaaaaaaattcgcggaggaattaggggaaaatgaaagttttactctaccgtactccgacagagcccaaatcgctgcgataccgtatttcgacctttgtgggaccatttcactcattagtgcttccatgcttacataagattcctgctggcacttagtctcgttgtcaacgaaatggatggagtcaatagaaacattgacccgtgtcccaagcgaaccctaaacgaaagggtactgtgggattaattaacatccattaattaatttatccgtaat

SEQ ID NO: 2686 - DNA, 1816 bp, Heterodera glycines
ggaaaaacctaattttgagcgtaagtggcgacaaaactgtgcgactttgggaggcgaattccgcgagtgcggcacatttcctttttgcaattaattaagagtgtaatgatggccccttaaggatgcgtttggacagaaaccgcccccgcggcattgaattgttgcgtcggctcttccgacggaaggtggcatgttttctattttcgattgtttcttatcggcatcactttaatcgtttcagtgtcgtcgttggcggagaatgtgccacactttgcgattttcggctgtccgaaaaggcgggacggccttttcttttttgcaattcgtttcaatcgaacaatgacattaattaagcaaagctcaaaatgaattgatacaaaatggtgaattctgctaaatggtcatttcgctttttctttgcttcgcttaatttccctcttaattaattggctctttttttgtgtttttctctctgatagcgaagactgaacttattttgtttgaacgcggaacgatacaaaacaatcacttcgtcggattcgcttacaaaaatatttttttgaattgaattacaaaatctgaaaaaaaattcgcggaggaattaggggaaaatgaaagttttactctaccgtactccgatagagcccaaatcgctgcgataccgtatttcgacctttgtgggaccatttcactcattagtgcttccatgcttacttacataagattcctgctggcacttagtctcgttgtcaacgaaatggatggagtcaatagaaacattgattgacccgtgtcccaagcgaaccctaaacgaaagggtactgtgggattaattaacatcattaattaatttatcctaattgtaagggaatgcctttatcataaaattgcatttcccgacaccgaaatgggacagcgtttgttcccggtcgattgcttgcagaagcacttccccgcaatgattgtctgttgcttccactcggtcacagaatcgtccggccaaaccattgggacagcgacaacgatcgcatgcctaaacaactgacaaattgaataattagagaagcaccgacagaagaatgacctttgggtcggtgtaccccgaacgttggcaggacaattcgaacggacaaatgccttagagggaaaagaggcgaaaaaagggggagggaacatcgtcgaattaaaggcgtactgtgacagtatgccaagttcatctttttgacgtcgttgaaggacaattggaagcgttgtccgatggtgttttggtaatttgggttcaccgtttggatggaggagagtcccctgctggaaaatgcctaaacattgtcataaacgcacgcgcaaagaaaggcaagggaaagacacgcacaaaagcatcgtaatgcatcaccgaaccaaagtcatactgtaaggaagaagcgcatgattaagggttcttagcgactgatagattatttccgaattcgatcggttcgcgaattttttgccaaatgactgaccgaaacgtcaaaggtggtctcttgggattgggaaaagcgagtgaattggttaaggaagccgagctgaatgtttttgggctgaatttggacgaatttatcacggtcaaagcgcgactgttcatggaaataccgagagaatgagctgagaaagaattgccggattaaaaaataaattttaatttgcccaccgatttcatgggacacaacgaaaggattgtcacaacgcggcccaatggacactttttgggggtgtccgtcgcgcaattggccaacagtggaatagcaactaattttgttatatttttgttaattat

SEQ ID NO: 2687 - DNA, 2810 bp, Heterodera glycines
aaggtgaataaaaaaatggatacacagaaaaataaatttggaagttctggacagaaatgaaaattaaaatataatgacaacgattagtgcgaatatgtattaagtaattaaattcacatataaattgatgaaagggagcaaatgaaatgtcaaattaaatgagagagaaacgcgaattatctatttgtctttttgttttgtctattttctttacctactctccttttctcctcactctatttctctctctttgttctgtgttatctctttttctcactgtctctttcctttacatgacagaccagacacagagcttcacctttaatattttccgctctgtcttcccctaaacgtacgaaatttttttaaatttaattagcctaattaatcttatttttgatcctttattctcctacaatacttcattatgttgttgcggataatttgttctgctgtttttctgctcccattcttcgtttccgactctttggctaaagttgtgagctgcgagggctttgtcaaaaccaaaattcccggcattgacctctccaaagttgaggttctctttctattcctaattgttgttgaaaaaaagttggtttttaccctatttttaaggctaaactcttcacgaaccacggcaatttgaagtatgagacggaatgcaatgcgcagaatggtcactttctgatcccaatttacaacaaagggcattatgtgatcaaagtgtcagggccaaccggatggatattttcaggtataatagcggaagaaatgttcgatcggatttcttaaaatttgaatttatttaatcttttctaattttttcgcaagtatatttcactaaaacaagatttaggtaaatagaattattgcttaaataattgctcaacatccaaccttttcagaaccgaacagccgagcggtggaaattgctgacgacggcacgggctgttccaacgacataatcgtcgaattggtcggctttgaaattgttggtgaagtgctaaatgagggcggtgtcaaactgtcgttgggcctttacacgacggaaaaggatggcggcgttttggtgaccaaaacggagacggacgggcgcggacattacaaatttaacgcaaaaccaggtgaaaatttggggttttttgaaaggacttttgattgggtttaaattgaactgggaagtttttgaattgttcgcccaataaatactcacaaatagcttttgaattattcgaacatgcaaatccacagccataggaacactaaacttttattcttcatcaatttcatcttttttaaaaattaagttgggcagctatttttacaatgattcaaactaaaacatgtatgcaaaaatatggaaaattttatttacaaaaaataaatgagattatagcaaaaatgacggacaattcttctagggatatacatatttatctattctgtcaggcgtttatgtgatttcgacaatgaccgacgcgggccaatgcgttgcgcgtggcaccgtttcggtggaagtgaccaacggaccggtgaaagtgcagccggacatcattttggccggacacaatgtgcgggtggtggtggtggacgaatggggcaacaaaatgacgggcgaagaggggaaagcggcggtggtggagacactcgttgaactccattcgaacagccaaattgatgtgaggaatcgcattccaatgaaaaagttctaacgtttttctaaattttataataaattactaaattttatgatgtgaggaattgcactacaataataatgaacagagcaggtcacccccactcctcccgaaaaaaaatttgaaaaagttaaaatgtttttctaattttttttcaaaaaatcggtagacaattcaaatttttattttcttgtagtttccacataaaaatttctctaaatttttttttttcatgttcctgtccagtctttaaactcaattcatttaatttgcagctaaattattatttcaaaaacttgaaaaaaatcaaaataattgccatattttgccggaaattgtgctgacatttttattttcatcaagaccctctcaattcatttagttccaacatttgccggtcaatgtgccgagaccgcaagcgaaaaacacgcgcagcactgcccagcccggcggtgccacgggcgacgatgggtggacatacgcagtggagacgcgctcgggcaccgctctgttcgcctgcctgccctccgctcgctacacattctccgccgccgcactgctccgccgcaaagacggcacccaacggattggcgtccaatttgagcgcaaacccatccaattgggcgccaacgctgttgaagtacgtccaaaccgttgatgggttatcatagtagtggtgaaaaaaaccaaaatggtggagaaataaagtactataaaaacataacgaaaaatggaatcataagtacccaccaatctttgtggcaaaaatttcgattgataactttgttgaattttcgggtttgaaccagggctgcacgaaaacttcaaaaaaaaattttcgtggacgtccttggcatccaaggacggatggcaaccggtgggcacggcggcgtcgataggcgaatactaaaaaaagtcattcttaagggtgtaaatattttcgtctttttcgtaaaattttgctctaacgaaaacgaaacacgaaacgaaaaacaaaaatttgaaaaccgaaaccgaaacgaaaaaactttagcggacgaaaacgaaacacgaaaagaaactcaaaaagtgccgaaaaaagaggacgacacgaaatttcgtgcagccctg

SEQ ID NO: 2688 - DNA, 3933 bp, Heterodera glycines
ttacagaattgccttttgcggctcagtttcgcccatggcttcggctgatgtgtcaattgaagttgcacagttgaaaaacaacgacggtggtcaaatgggcacaaatgcccctgcggttattattaagccggaacgcaatggccatttctgtcgaatgttcgcacccggcaaatacaccgctcgtgtcagtgtggccaacatgtgtttttttacattttaaggcttatttttaggggtttctgtcaaaaatgcttatttctgtcaaatttttgcattttgggtatttaaacggtctattaaaaatttgataaattgcaaaaaattttattggggtggaccatttaattgggccagttttctttttcgaactcgttgtcctgacttttcctctgtttcagatcatttctccaacggcatacacaccgaaacaacaattggtcgatttgacggaaaagcctttggtcggcgtgcaattcacacaatttttgggcaaaatttccggatggattgaatgcattggtgccaaataaatgcacttatttacatatttattaggtggtattggtcacaaaacactaaattaactatttaagggacttgtgatggcatttccttggaattgtcgtcgcacggcgggggtcactcaccggcagttgttgccaacataaagccaaatgaaagcgacgggacgtttcaatttgcggagatttccccttccatttacaaaggtgacaacatttaattgggtgcaaaaataaggaatttcataaaatttcgaaaaattgctaaatttcatgaattatatttttttaaacaattccatgaaatttcaatttttttctcgagttatgctaataaaccttttttatgtgaattatgttacagtgcgcgttgtgagcagcgaaaatgtttggtgggattcaaccgaacaatcggttcatgtggtggaaaaggacgtggacggagttcactttgtacagaagggcttcagaatggacatacaaagcacacatcccgcaaaaatggtaatttaagtgttggaatgtctatttattataatttttatacaaaattaaatgccaatcagaaaatcactgttcttccattctttttccaggaatatgcgccgatcgttcaacacaaaaagccctccactgatgccgttcagcagctcaaaatggtgcatttggtttccggcctcaacactttgttcttcccgatgccatcgtcgccaaccgaaaagagtgccgccaaaggcaaatgccaaaatcaccgcacaccgccgcaaccgttcaaatttgcgctttcctcatgccacgactttgacattgttgttgccgatggcgacggaaaagcggcggaaaatgcttttaatgaccaacaaaaggacgacaacaacagcggcaagttcactgtgcctggcacaaaacgtgttgaacttgtcgccaaagcgacacgattgcctatcagaattgagttggatggcgacagtacggggcgtgacgagttgaacttggtggacatgaagctgacttggtaaagatatgcctctttattcagaaaaaccgttagaatcacacgaagaattatttatttttccttcgccgtaaaaaaatagacctactatcttttccgggtttttaagggaaaaaagtcgcaaatattttttgtggaatatgactcatttatttttgcttttttcattgcctttttccagtgacggatgttcttcggaggaggcaaaatcgtcgcccatttccgactcgatcaatggcaccgttaggacattcgttttccgcttggaacagcagaaagttggcattaaatttgttgcgacggcatactcggctcttcacctgttcatcccggaaaccatcgcaatcaaattcaatggtgcagataatggagttttaaaaatgcaagatttaaattattaattgcattttgtaaaggtgattgtcaggaggagccgattgttttccgagcgcatttgggcaaattcatcgagggccatgtacgtccggccatttctgaagtgagtgtcaccgcaaaacgccgaaagaccatcggcgacgggaaagggacagatttgcgcacgcagacggatgccgatggaaaattcaggtggcgaagggacccaatataaaaggatttttgcggctgggagtgtgtactttttgggttttttaaatttaattttaagataaatttaaaattgtgtcaatcctctcatttttaggtttggtccggtttgggatgagcaggactttgagctgatgctggaaaaggatggcttcgagttcaagccgtacacaccaactgccgatggtataaagatacggaaggcgggtggttggggagagggactccgtttggttaacagtaaattaataactgacaatgagattcaatttggattgaatttttgtttctgggtcgcataccgttgattatgccagagttctctttcatccattcattcttttgccattgccttcaaagatggcccttcccatcgccaactccgttcgcccttcgttttctctgccaccaaattgtcgcaactgattgtccgttttgtggacaccgatttgaaaacgccgttgtcggatgtgctcgtctctgtcagcggttcgtcttcctcctccgacttccgctccaacacagtgaccgacccgaccggcactctgaacatcgtcggattggtcagtttctccggcctcgggaatcctcgcccaaaaaattagaaaatgagtccccccccccttcatcgaaatgaaaaattaatgaaaaaataacattttaatttttaaatatcattttaccacattaaaggcacccggcacgtatttcatcaggccaattctgaaggagtacaaattcacggcaaattccttctccgcccaaattgcagagggtcaaacggaagagatggttttggaggcaaagcgatacgcatacaggtgggggggggattgatggatcaacaactacaaacatccataaattatgccatactgattgtgagccaccatttagcatttatggcaaagtgtccaccatcagtagcaaaatgcttccatcgccaatttatgtcgaagcactctccgagcaatgtgaaaatcatttggttggttgttttataaaataataattttaaatattatcatgaaaacaaatccatatctggcattaaggttggttttttatttttattttttttgagtttttattgaggaataaccaaaattaagcgaatttaattgtggaaaagcatttttaagtcatattcctttcagggtatccaaaacccttcccctttcaggaggacgatgtggtcgattcgtccaccaacgaatttcgcgtccgcggcctcaagccgtcgtgccgatacaaagtgtttttgaaggctgagagtggagagcaaatcaaagcatttccgccccttttcaatgttcaggtggacgggggcaaatcaaaaattatataaagacaattaattaattatttattaccgacattttcaattgaattctgtcattgtcaagacgggcaatgaggacaggcgtgacgtgcactttgtcgtgttccccaacgaattgcccgcggcgacggttgtcagcgaattggaacttccggcaaatgccaccattggcgggggcgtcagcagcagcacttttcgtgtgcttttgaaggacagtgccaccggcaaaataattcaggaacaaaatgtgccgggcaccgtattctttttcacattacccgcctataaaaaggtggaattttattaaattaattacctaatttcattctttattgctcatagcattatgccattgaaattggtcggagtgaggcaaaaaagctgaaaattgagcccatttctgaagaattcttcgccgactctcttttcacttttgtcaggtaatcaat

SEQ ID NO: 2689 - DNA, 2694 bp, Heterodera glycines
tttaaaagcaaagaaaatagcgaatagtgagatcggtagaaacattattttaaagtgttgaagtgtctaacattaatttcccaaccccgaaaaaagatcattaaactattttagactaacaattagaaatttgaattttagacattttgctcgaacccgggttcgggaaattaatgttagattcggattctccgacccttcaaactcccaaaatactttttcaagagaaaaaaataaaaaattttgttttttttttaaaaaggggctaccagttaaactattaccgaaaaatagtagggttattaaataaattcataaacgaatcgtcagcagcagcggaatgacctcactttattattcaaaaaatgctttcaaattgaaattacacattgtaaattggatgattaaacaaattttgcaaaaagaattgggcacaaaaattcttttcttggcatttttttttatgccaccaattttgaatttcatcgccttcggcgtcgtccgaacacgcccataccgccgctgttggccatgtcaatggcaccgccattggcaatgccattcatcaaattattgttgccgttgttgaagccggtaaattcgttggctgttggcatgccaataaaattgttgttgttgctgttgccgttcgtctcctgctgctgctgacaacacgtgccacaattgcaattgccgccgccgcccattgtgccgaaggcattccccccattttgctgctgctgttggcctccgcccatgaaatttgggctaagattcactgaaagaattgaaaaaaagattgaaaattgctcgtcaggggaccctaattagccattgcaaaaagtatctaattagcgttaattgaataatgagcaagcaacccgctcaaagaggaagcgaccagttttgatcggctggcggccttaattggtgccaaaaaaccacgaggaacgtaacggatgttccgatgccgtcgatgtcccctaattagtccattccgagtgatttcaagacacaaatgatagcaatcgatcaaaaaaccaaaataactttgcgttgaatccataggtcagagtggtatcatttgttttatctctgatcaattttactttttcctacactctctaatcaatgaaaatggtcaaaaaggcctttggcaatcagcaaatgccaaacaaataattattaattaattgagattgattaccggtctggccttgcatcgatggaaattggcctccgatgcccggcggtgggggcggcggcggtgggggaaatgggcgcccaaaagcacccagcggattcagcgggcagccaaaagccggcccaaagggctgctgaaactgtgccgcggcgccgccgccgtttggctgttgcgccgcgctgataacggcgattggggaacatccgccaggggcgcccaaaagatggcacagcgaagggacggcaccgaaggcgcaaagggcgccgaggaagaggcacagaagcgttaagtgatggtggacgaaggacggcattgcgacgaatttttggcacattgtacggcaaatgaccgaaaattcttaaataatcaaagataatattttatttgaaaatggaagaaaaacggtgtcagaaaactcgtgcaaggcttaagccagacctaagctatatgcttgtgcttaggccgaagctttaggctaggctatgcctaagttttaggctttttcattgtatgagttgccattgactcgaaaaacatttcacccaaaatagaaaatgaaaaaccatttcagaaacataaattctttgctaaatctttaaaattaaaaaatttcacaaaaattaattgggagaaacagtgagaaagtggaagcattttgaggaggagcaattaaataacaactgactgatgagtgaccatttggggcggtctcttccaagcaaaatgtgcccggaaggcgctccccgccccgctcaaaaaatccccaaattgctttaatgggccgcccacccccgggggatgcgcgagacgaccgaaaaacggagagcaaatatttatttacattttcactcattgagcagccctatttgtggagagtgaaaacggaacggaagacgaagctgtcgagcagtccggaattgaatgattgcttgggatacattggacgaggtcaaccactgctaattgaacggggggggggatattagcgctgtttaatggccaacgaaaaattcattcccaattttggagaggcgacagccgacccgaggaagcggatgatggtccagtttggacaccacagcacgacaagcaaatgcagcagcatgtggggaaaagcggaaaaagttgaagagagatttacagaatccccgagggatatttcggggattaaatgaatacggtagcggagtgcaaagaacacggaaaattgttaattgaccatcaaataaatataaaaattgtaatcaatctaagaaacgaattaattaattgttaattgaccatcaaataaatataaaattgtaatcaatcaaagaaacgaattaattaagtatttaatcattttaaattttatcattcattttcataaaataaaacttcaaaaaataacataaacaaaaacaacatttgctccttttttcgtcgtccacccgccgttcgtttttgctgtccttttttttcttccgccacctgtcacggctctgattttt

SEQ ID NO: 2690 - DNA, 1466 bp, Heterodera glycines
acactgagactattttcggttcgcccctactgagactattttcggttcgaccacactgagactattttcggttcgaccacactgagactattttcggttcgaccacactgagactattttcggttcgacctagcaccaaaagtgtggggcatcggatgggacggaacgccaaacatcggacagttcaaaaatatattcttttttaaactgaaaagcaataaaatgagaagtgaaaggtccaatttcgaataaaaattcaaaacatttcaaaattcatatttgtccaacaaaatcgcttcaatcgcacgaagcataaaaagcagcaatggcaaaaaaaaattgaaccagttaaaaatgcggaaaattggaccaagtggggcccttctaacggtctacctcagttgggccccagcatattaaaaattttttcaggcttaaaaatcttttggttttttgttaggctaatagagcatgttaagagctttcgaatgataccaagattattggatttggatgccaaagaaaaaagcttaagtggaaaaacgagctggggcacaaccgtgccggcccaactgagcggttccgccttcctcgtctaaatttcgatgattggtccctgcttaaattgaaaatgcgaataacatgcaccggatatcgcgaatgccgtgcctttgggtgaatggcactttttttcctatgtgacaacgtaataaaattcaaattttaacattgaaatacccaattaaactaataaataggcttttgctgagatggactccaaaaattgacttttacgaattgaaatgaactgactgatgattagagtttttttaatcctaattgccgattgaccaaaatcggataacaatcatcagggatatatctatagatattttcatttttcataaattcatggaaatttcgtaactctccagcctctttttcacggagtatttattgttaattttaaacaattttaagtgtgtggaaattccgtgcggttaaatataaagtaaaagaaaaatgataaatccgattttaaaattaaaatggaaaatgtcgcaatgatgaaactcccaaacaaacaccaatcattcttgctcgtcatgccattcgctgttctctcattcggcctgtctcttgaacgcattgtacaacgtcaccagaactgtggttaataatttatttttgtttgaattaatgataaatgtgtggctagagaatctcggggtcaaattattggtaatgcttcgaccaagcccgtagcaagaaagcttttcgccaaaaaaagaactaatttttgtcatgttggtccaaattaaaaaaataaataaagtatgagggtccggcggtgccaatagaagtcgccgggaaaaaattcaaaattctaccaatttgataagaaaagttgataaaaaattgcttatttccctggaataacattttatttctacaaaggggggggg

SEQ ID NO: 2691 - DNA, 1261 bp, Heterodera glycines
acgcgtcgacatcttcaaaataggtattggttgtaagaaaataaatcaacaaattttctgaaaaaaaagaacttcagaacaaagaaaatgataattaatcacaagaaaacgagcgaaataatcaaggaaaaaaaagataaaaaataatacaaaggtatgcaccaatcagaggaaaagaacagaaaaggaaagagagtgatcaggcagaaaaacgaacagagtttaatgacaccttctgatcaaaagtaaatgcagacagtgattagggatcagtgaggaaagtaaatctgatcaggggaacaccggaaacgtttgtttatcatgaagacaaagcacatactgatcagggcaaaaaatgaatctgatcatggagtataagaaccacgctgatcaatgggaaatggatgcggtgtttagggttgaaatgaacaaacagatcagtgaggaaaaaggatctgatcacacatcagggaacggatatttatcatgtcaaaaggacacattgacatagagtaaaaagacatgctgatcatgtacgaaaagaggacatctaatcagcgaaaaaggaacaaaatgatcaaagaggaaagggaaaacggcataatgatcagaggggaaaatgaacaccatctgatcagaaatgatcaggctaaagaagaaaggaattccaattcaaagacaaaatatcacattaatcgtaactaaatccaagtgttaattgctccattaaagcacagtaataattaacaccgcggattgtgaaaaattgcatctaatggcaatggaatttccattgctttcccattcgttcacttttcattaaaatgcggccaacgccgtcccctcagctcccccgccccctttggccattcattcattgtcctctggccaacgttcgttttcccatccaacaacattttgttttttttctcatttggccaattgtccgtctccattttttgctcatttagtacaaatatatgcaacagttgaagcaaatgggaagagaaaaatgttgtttacaattagattttatctgatgctgcatttagcgacttttctgacattgcaaaaaataaataaaatttgccgccaattgaaactacaaaaggatgcgtacagtacttttttcaaatttattagcgctggggcgaaaaataggaattttatagcgattttgtgtctaaaaatgacacaaatttgcaatttttgtgctcaaatttccgtaaaaccgaaaaatgatggtacaattgagtccggc

SEQ ID NO: 2692 - DNA, 9460 bp, Heterodera glycines
acaagcatcgaacactccatgtctataaaataagttaacggatttttctttatttattttaatttaaaataataggatggtgaaagacaggacctgaaaaatcattaaatattgtttatattttaattttcttaaaaatttctatgaaataatcaagaatttattcaattgcattagaataaaataaaatttaaatcaaggaaatcaattcttaaaaattaatttttaagaatataaaattcagaatacaaagatcagcatgattaattttgtttaaaattattcattatgtaataagtataagtaaagtaaataaaaattaaattttttatgtggaattggtgcaacaagaagagaggcattcctgtaaaaaggacatgaaagtaaaaaaataaaacattttaaaattttgaataaatttaaatttatactaaaataatatgagacataaaatcgtaaacaaaacaaaaataaatgctaaaaggaaagtacgtccgattttgcaatgatttgaccgaaatctgtgagttagtcaaaaaaattatgcaaaaaaaaatattaaataaataaataaaacaaatacaaacgagacatttattttgtaactaaacaaatataatttctaattaacattttaaccacaataaattattaaactgcaattttatacaattagataatgttgtttctttgttagatcaattataaagaaacattgatgggcttggccagcattttttaaaagattcaaaactaaatccgtacaaaatacagcataactgatcagcgatagtctacaaaacaagagtttatttaaaaatatttttttcagtaaaaaatgacatcaaaagaaagaaaaaaaattaattaataaaataaactaatacattaaataactatatttaaaaaataaataaaattgctaaaaaactattaattaattaattctttttcataattaacttaatttaatttgaatttaagttttttaatttttaaaaattcattagatgtattaacacacagtttttcccatcaaatttatttcgttttattttgcaaaaaaaagtaaaaaatttaattttaaaacttaatgttttatgtccataaactatttattttaaaaaatatattttttaaaactcttctcgtgggttatatctatctgtactttacttcctttcaaaaagttaacatcggcttgtaatttaatttctgcctttcaataaagatgaattaagatgcatatttttattttttcaatgtggctttatttaaaaaagtaacatatttatcatttgtacgaggaagagaagatcatttaatttgttttggcgattttgacattctgtttaaatattttttttaaatcgtttcattttttttgtaccattatttttcttcgatttttgttttttgtgcacacaatttccatctttaaaaatataatttatcgcccttaaaaaataaagttatacaccaaaattgactttgtgttgctatttaaaaaattgtgaccaattatccaaattaatttcctctccatcgccggattccgacccaaatacccgaaaaatcgtacttggcgctcctggccgaaacccggactgcatcaacctttcggttaacagcgattgcaggtcgaactcaacagaaagccacaattagcaacgatggcgggcagaaatcaaggtttaaatgtggggcaaaatcagggaggacgaccaccagaagatggaaggtacaatttgcgggcaagacaaaaccggcgaaattgggctgagttcgaagcagagtacgacgcggaaattgatcgtgagctgcgaattttggaaagaaaccgctcagaaaatttggctgaacaagcaccgaatcagcaaaattcaaggaatttgcggttgaatcagaacagaacgtacgttctggcggcaagaccgccagaggatggaaatcaaggacgtgaagttgccttatggaatcgttttcaattcgaaggagtgcaaaatgagaatgcaaatttggggaggccggtagcgcaatccagttcaatttcggggaatgcaggggtacaaaatcgaattgtaatggatgaaagcccacacatttcgtatgagcataatcctagaaaccgggctggacaagcacatgaaatgagagagagacaaaatatactatacgaagaattactggaaactttggaaagacaagttctaagaaatgaaaatgaatttttgggaggacgagaagtgccggtagagcagcgaaatgagcagagaaatggacgacatgttgaaaacctgcattggtatcatagggcacaggaaaatgagcacgatggccgccacttcgaaagaaacaatcaaatttataagccgcggtatgaaatgaactggagacaagaacagtacacgaattctgaacaagggagaaaccgcagggcatatgatcgatttcaaagtcatgaagaaaattttcccaggccaaaccagtttgagagaaatcttttaatgaatcccatggtaccggtcgagaccaatccaagagctatggataatttggcttttcaaatgtaccgtatgactctggcaacacagtatgcaagtgttctcagggaaataccgacaattgaaggcaccgaagggcgagataagattcaagatttctttttaaccgtggagacgttgttaagtgactgggaacctgacaagcaaattaatgtccttaaaacgagactacgggggaaagcattgaaggcattaaatatggcacttataaaatttggtcccgttcccccctttaatatcctaaaaacggaaataatgtcaactttgagagaaactgactgcagggaggcttcagcttttactgagctcactcaattcgccaaaagaacaatgaatgaggatttaatgagttttggtgaaaaaatctatcgtttggtcaaatgctcatactcgggattaaatgcaactcaaattgacgaaatcgcaaaaaagtttttcattatgaacataaacgacggggaactggcgagatttttggagtgccaaaataaaccggagcaaacatttgatgagattttgatgctggcaaaccgcatacatttggcagaccccgaaaaagtcaaagagagaattgagtctaggatgagaaacgaacaacaaaccagaccatttcagagcagatcaaattggaacagtagaactgagtggaatcctgaccgaaatcgaccaccgaataccggaaacttttggggaaataggaggaatgaatttcgtcgagacaatcaaaatcagaattggagaatccatcaaacgaatcagttctcagggtctaatgccacgccattaaattctgtccaaccgaataggcaaactgctgaaagagctaacccgagaagcacaaactcgatttttcttagacaagaagaaaaacaggtaaaagaagcaacagaagtgaatattggccgtcttggagtatcggagcatgaaaaatttttcgattctctgatccttcatacaaaagcattcccggctgagaacccggccattccccaaatttcggaatgcttaactttgcatttgtctgtgattggagtcacatcgaaggcgcttaccgattccggtgccgaaactgcaattgttaatccgattttcttgcacactttggcgaaggagaaaggtgtaaatttgttggattgtgggtttaacccaaattcgggaaacagcaagttgccatttgaagtttcatcgttcactgacacaaaaattaatgtaattggagtgatcaatgtcccggtacaaatgaaatcggttgagtgtcaaattccttgcctcataacacgtgaaccatttgcctatgaccttattttgggcactacagctctacacaaccttggattttacattggaaatacattatccggggaaatttttaattttccctcacaaaaaacggataaaaaatacggtcaaatgcatgaagttaaagtgcttaattctcattacattccgcctttctcctcccattttgttagtgcttacataaacaattttcattgtttagaaaaagaaaattttctaattatggaaaaaaaggacacggagtcactgctcgactatgacgaggacgaccaagaaaagtcgacggagcagctaaaaaaatgagcggagaggaagagcagttggctttggagaaattgggcgtggtcgaaagtggagacaaagaaaatgctggacggacggacaaaagtgacaaaattgtggtggagactggagtcgtggaggccggggagaaaggtttgttgcacattttggtacataataaatcctctaatacattgatgttggagagtggcgataaaattggtacggcagaagtggttgaaaaaattttcaaacctggaactgaaatcatttctaatgaatttgatggtatttttcggtcaaaaattttgacagtaaacacgaatcaaaaaggaaacaatgaaaaattttctgaattattgtcagtcttgaagcatgatgttggtccgcttaaagaaaatgaacaggagttaattgagaaattttggtcccaattttgtgacgttttggttttgagtgaagcggaattaacccagactgagttagccgagcataaaattgacacgggtgatgcatccccaataaaatgttccccccgcccaattccatttggaattcgtactaaagttactgaaatgttggaggattatttgagtaaaggggtcataaggccgtcaaatagtccttgggctgctccagtggtattggtaaataaaaaagatggaagtctgagaatgtgtgtggactaccgaaaattaaactcggttacccgaaaggacagctatccaattccaaacattgaagaaatgttaatgtatcttggcgagagaaaaattttttcatgccttgatttaatcagtggttactggcaaatcaaagttcaccctgaagacattccaaaaacagcatttgctgtccaaaacggcttgtttgaatttgttgtgatgccatttgggttaagcaatgctcccgcaacctttcaaagagtaatgaacaaagtactggagggtttaataaacaaaagcgtttttgtttatctcgatgacattttggtggccagctcaacattcgaagaacacattcaagatttgagtcaagtttttgaacgaatcagacagtatgggttgaaagtcaaagcaaaaaagtgcaagtttgcgcaactaactgtaccatttttagggcatattctcacaagcgaaggccttaaaaaggaccccgagaaattcatgccaattttggatttcccaagaccaattaccctaaaggaactacagagattccttggcatgctgaattggcaccgaaaatttattaaggattttgccaaaattgcaggaccactaacccgacttatgaaaaaatcggaggatcacaaaaaattgggatggaatgagccagctgaaaacgcatttcaaaccgtgaaaaaactaattgttgaagacgtcgtcctaaaatatccgaatttcgaaatggcagagaaaaacctggattttcgttttcacatttatacagatgcaagtgcaactggactcggcgcagtccattgtcaaaaagacaattccgaaaaaatgcgcccaatttgttatgcatcgcgtcgttgtagtgatgctgagaagaaatacggtccgacagtgcttgaatgtcttggaataaaatttgctgtttcaaaatttaaacattatattgcttggctgcctactgttgtcataactgatcataaagcacttcccgcgatgtttaggtcaaaaaaatcagtagggaatgcaagggttgatcggtggattatggaattgggggcaccattcgaattggaagtgatttattcccccggaaaatttaattatgttgcggatgccctttcacgggcttatcaccctgaaaatgaccaagaaatggacacgaagaagaatcgattaagatttcaaatgtaaatgtccaagagaaacgcccaaaacttccaaacagtgtcactctcgaagaatggattagtgctactgaaaaatcagaattatctttcattatggaatttctttcgaaaagaaaaattccagaagacacaaaactaaaagaaaaattgatcaaatcattggcgaacttcatgctgatggatggagtgctttatcggttaaatggaaaaggggagcccgaaatttttgtaccagaacaatttcgaaaacaattgttcaaagaacatcacatcggaatttgtgcctcgcatcagagcggaaagaaagtttatgggcgtttaaaatcccttggatttttctggcctaatcttctcggagattgtatgcattggacccgttcttgccgtgtttgtgcgcacaaccgaattccaacacggaatcatccaggcttgaaccctatagtcacaattcgtccaaatgaattgttgtgcatggacattttgaaattagggccaacccgaaatggaaataaatatacattaacaatgatagaccattttactcggtttgcggaagcaatcccgattccggacaaaaaagcagaaacagttgcacaaaatctcattgagaaatggatcttaaaatttggggccccggaacggattcacacagatttgggtaccgaattcgtgaacgaaactttaaaagaaatttcagaaaaaatgttaattgctcggtccacaacatcaggttatgatcccgcatgtaacggaatgtgtgaacgtttgaacagatcaattgttgagatgatgagaaaatgcataacatcgccctgggaatgggacacacgaattggatttattgtcttttcatacaatattactccaaatgagtccactgggtttcctccttttactctcttttttgggagaacagccaacttcccgacgaacctcacagtaccaaaacgaccaaatccggtttatttggttgatcacgatgattatcttcagcattttcgagaaaattttgaaaatatcctaaatgaggcaaaacaaaatatggttaaggctcgggagtcccaaaaaacccaatttaatgaaaaatcgcacgtgcgtttgaataagtatgctttgggagagaaagttatggtgttttttcgaccacgagcgcagggtgaacacaaaaaactgtaatggcgttattttggaccatttattatcacacaaatctctcccacttccgcctgggttgtgccaatcgataaaagacacgttgaaccaatgaaagtgccattggaacatttaactcatgtgccaaaagaaatccccgacaaagtgtttttacccaggcaacagcgcaaaaaactcttagaaaacccattttctgatttagtgatcaatgaccagcataacaatcgaattcggattaatccgatcagtttaaaaaattgttataattcagagccgacgccaaacagtgccatttcatggtcgaccgaatgcaacggagaaggacacgccaattgctgccggattacgcttggcaaaatttttaaggatttgccaagcaatgaccctctgcgtcggttgccaatttcaaagctcagcgagctcatctgccttcactttgcctccgatgtcctccatggccaattaagggaatgggcatccaaaaaagacagagaccctacggcactgattcgattcgtctcagagccgcagaggaaaattcgtggaattgaagaaaccatggaaaaatggctgaataactgcagcaaagcttttccagaactgaaggcatcgaaattcaagccgatcattttcgaaattccaccagggccattggaaaaatttggcaccgaaattgcgaaggcattcgagaatatccgcgccgtaaaaattcacggattacaccgaacgatccgaactccgcacatcatcgcaggggacagaacagccgaagaaattggaaagagatgtgaagcggaaataatcctggctgaaaactgcattggattaagtgatttattgggaaagacggcctttggacgggaagtgaaagaagtgattgtatgtgttggcacttccgacttggacattgacactccattggaatggtgtgaaaaggctgtcaaaaaactgctcactcaccttggacaatttgccataaaaatttgggtcgttccgcccccattttatcggcaaaaggctgttaagcatgaagaattcctaaaaatgctggtggagacggtaccaaaagaagacctttgcttaatgaagggatttcggtcaatcattgaagtcacgatgtggggaaatcaagaggagaagcgatatgtggatgagcggggccgattgaaattctcaggtgtcactgcaacacttaagcatttaaaagaagtgttcggtctggaagttccggtaaaaaaagtgccatattcgtttgcgccggagggtcagaataccgaaaaagtggagaaaatgcggtctgtagtggtcccggttaaattcggaaggctggaaaacgcaaattcgaattcgggaggaaaaaatttcccggtgtcccgcccaagtcacagtcgttggtcggagacaaagccaagaaatgaccacaaacagcagccgccgcataagaaaggaaggtttgattaggccggaaaattatgcctaaatgacgcctctgacctcaaataattaaaagatatttattttacactgtttatttatttctcattttttcgaccatgaatttattttaaattgtaataaaattgtgtgtgcttaaatgaggctttgaataatcaaaacgcaattaatcgccaattcaatgtcttgcctttgatcggaaagattgttcaaacctaaatccactcacttatgattggttgaaataacaaatccattttccactctcttgttaaagctgctaatcagaatggaaaccccatggctgtaacagcaatttacaatattttaactcaattcgatccgtttcccatcttccctccctcttttcaaaacccccccccttcctctcccctctctatccttttcagattaagaaacttcaactggacaaaatgagcgaatttccaaaatatgcgccgggacgtcgctttagtcggtgccgggggagcagtgctttcagaattggggaccaattcttgagcgaacgggggcatgtacgaggaagagaagatcatttaatttgttttggcgattttgacattctgtttaaatatttttttaaatcgtttcatttttttttgtaccattcttttttttcgatttttgtttttttgtgcacacaatttccatctttacaaatataatttatcgcccttaaaaaataaagttatacaccaaaattgactttgtgttgctatttaaaaaattgtgaccaattatccaaattaatttcctctccatcgccggattccgacccaaatacccgaaaaatcgtact

SEQ ID NO: 2693 - DNA, 1493 bp, Heterodera glycines
  unsure (1)..(1493): unsure at all n locations
aatgaatagatgcaattattaataanacataaatttcaaaaatgaatttttaaatatgaaattaaaaaagaattgtntaattatacaatgtgcaaatttatttaatttttcattaattataggaatcagagaaataaaaatgcagttattaatataaaaacagttttttatatttcgatccaaactatgactttataccccacattctacaattcatatgttggtatcaataaaaagaaataatatcatacatcgcataatgaaaaaattatatcccataattatctttacaatatatctaaatatatcaaaaatcgtataataaataaaataaaattatattaataatatgaaaaagcttaataaaattattcgacaatcgaagccaaatggttaagagcattaaacccttttaaaattaaaaatattataaatttttcttagtaagataggaaaaaaccaaaattaaaatttttaaaacctaaaataatgcttttaaaagaaaaaggattaaaaatgaatttaatcacgatttaaaaaataagccaaaaggtattcctttatttcaaatatgtcaaataaactataaaaagaattaaaataaactaaaaataattattatcataaaatttctagcagatatttgctattatttgaacatatttaaatggaaaacctcttaaataatatttaaaaagagcacaacgaaaattaaagatacaaggatcggagtttaaaaagatatttatatctagaataaaaattaaaagactaagtcataattcattattgtaaaaataataattaatattctaatggattgacaatgaatttcttatttgatcaaaaaccttaaccttgctatatttattttaaataaatctaaataatgataagtaatcattaaataatgtaattttcaagtagaccactctctatttcttgactaagtcgagagaatacttaaacttgaactaatgaagattaaaaaagacatagatactaattttattgtaaaaactaaatagtatatctcatataacgacttctactttcttatttattcaaaaaacaaaggaaagaaatttttgttataatttaataatcaagaaacacttcaaatgcgcaatgaaaatttgagacaaagaaaggataaaaacaataaacattttaaatttcaaatttcaaataaaaaatgaaaaattatagaaaatgaatgcaaaatgaattaatgaataaaattcgcaatcaaataataatattatgtagaaagacaagttcgagacgaaacgcattgcttacgcctggacaatttgaaaataaataaatttttaattttacatattattgtaactaaacaaataatggcaatgaataaaatagattttcatacataaaaaacatgcgcaaaataaaaaaaaaatttttgaaaaaatgaattaaggagaattgagagggaaaattaaatttttttttgcttaaaataaaattaa

SEQ ID NO: 2694 - DNA, 2952 bp, Heterodera glycines
tgctgcttcatttgcctgaaatgccaacgctggctaaaaaaaccaagggtcagttttttttggggggggggaaacaaaggggtaaaaagaaaaagctgagaatggacaaaaataagaacatgagaaagtgcattttaattatataaaattattttgttaaaattgaaaaaaaataattttcgttaggacatgtttttttaactaacaaattaaaatatgaattaaatctttttttaggttccctttttcactgggcttttgtaaattttaatgaactctttcctaattgcctttaaagtgcctttgcccatttccttccttttgttatccgttcgttgcccacggcaccaaaaatcgattgacccctttttccccttcccctttttccccttcccctttttcctcccatcccttttccctttaccttttcccgacacaatgtttaagccatggcttttcctattttttttaactttttccgttcaaccgaaaaccaaatgttacaatgagaaaagaagggaattaaaatgaagaaagaaatggcggagaaagagaagaaaagagatcaatgggagagaagggaagggaattaatattaattgcatttcttttcgtttcgtttcgccttttctttctttcaattattttcttcaaaaacaatagtccgttttaatcggactttttcaattttcctttttaattaaattaaaatccctccccttttttcccttttttaaacttttgccaattttccccctcagaaaggcttccccccgagttggagatgacttggcccaactttttgctgcccgtctttctctcctccgttttaatgtgcgcatgttgggccgtcggccatttccaattgtccttcctttggattgtcctcttcaccgttctttatgtggtcggttttgtcgtttttcgtctcgtcacttttttccccacttattttgccccgacggattttcccttttttcgttttgtttttgacttatttattttgaaagaatcgattttcgcgtgctgctgcaaatatttcccctcgcattttcccctctgtcactaattaatattgatgcgatttttaggttttaactaaattttttgctcaattgatttgaagaaaggagctaaaaaaacgcatttctgcattaaaaattttcgattctgatgtcactatcggtcactagaaatcgctattttgggggtcggggccattttggcgcagacaagtttaaagattcataacttcgaccaaataaaataatgttgatattaatcaataggtctaaatgttccttattagtctgcaaaatttcaaaaaattatattgggttttaaaaaagatatggcgcgctgcgccaaaatggccaggaaaatgcaattttttgaggttttttggccataacttttttgtttctcagctaaattttttgaaactttgcaggttaataggcactatcagtagttaaccccccgggaccgtaacaagcttggttgaccatccctttgaagcatgcgccgcggtgggaggggtggggctaattaaaatattaattgaggtaattaattagtgaaggcagattggggacagtaagtagatagttttagtggaggcagagtgagagaggaggcatcgatttgaaaatagtgtttgaactattgatgagttaagtattgatcgctctgttattgctgagattttgacttgcagtgctatttaattaaccattggacagtggagatgaatgaatggcaaatcagcataacatagaagaaatttttagtcaatcccaaagagtctgttctaattttttgtcattattaattttattatagctcttatcgtaaggagattgttcaaattttcttgctaattggactaggtctcagattacgaggtgtatgggtgcttctcactcaaattgttatccctattgagatctggagtagaattattaatatcaagcatagaatggcaactcatacataattttacagtataaactaagccaatgcccaaggaagcataatcctaggccaaagctttagccattaccaccacaatcgaaagcttgcaatcaatgtttaaaaagggtgttggtttgtttcagttttataaaatcaatattttattattattactaataaaaattataattcattaataattttaaagattttaaattaaatgatttaaatatggtaaaattcaaaaatactgaagaggatgaaacatcttttttcaaaaaactaatcactaaacttctaaaaactcccctctttctttagtactaggcttttctttgcatagtgggatggatccatattataaagttattatttatttaccttctttttggaagatgcatctatattatttaggcctaaacctggattccttgcttatgtgttaagatattgatatcatacattttaatacgaaatagtcataattatctagagaacactatgtaattactctcgtttcttttccagcaaaatctcttcagcttctacactctatcattggtttagttctgcttcttttccttatgtgtattttttttgtgaaagtttaatctatccccatagaatttttactttaatcaacccgtccgcttttcagtaatataaatctattaatctgttaacaacgaaaagccctctcccctctttctcttcctctctctttctctctctgtttctcattttatttctctctcactctcgttctctttatccatttcattctctctgttgtccctctctccccctctctttctctctctcgcctttctcctctatttcctctctctctctttctttctctttcactcttgctctatcttttctctttcactttctccctctttcctctctctctctcctctgttgtccctttctcctctctctttctctctctgttactcactctctttctctctc

SEQ ID NO: 2695 - DNA, 6420 bp, Heterodera glycines
ctttctcctctctctttctctctctgtttctttctcttctatatctctctctacccctctctctcgtctttctctctctatttcctctctctctctctcactctcgttctctctatccatttctttctctcttcctctctctcccctctgttgtacctctctcccccctctctttctctctctcgcctttctcctctatttcctctctctctctttctttctctttcactcttgctctatcttttctctttcactttctccctctttcccctctctctcctctcttcccctttctcctctctctttctctctctgtttctcattttatttctctctcactctcctctctctttctctctctctcgttctctctctgtttctttctcttctatatctctctctacccctctctctcgtttttctcctctatttcctctctctctctcactctttctctttcactctctatctttcactttctttctccctctttcctctctctcccctctgttgtccctttctcctctctctttctctctctgtttctttctcttctatatctctctctacccctctctctcgtctttctcctctatttcctctctctctttctctctttctttctctttcactttctccctctttcctcactctcctttgttgtccctttctcctctctctctctctatttctttctcctctcccccttcctctctatactcgctctctctctcactctcttgtttctctctctccacccaacggcaaaaatgttttttttcacggtttttaaaaatgcattgtttattttgatctgtcttaaatcggttaatcaccaactaaactggacaattctagtatcgctctaaactttcaattttcatgtccctataggcatgcaaaatttgatttgaataacatgcagaaaaagagttatacaagtacgtcaaattgagagaaatgacaaagaaaaagagaaacgaggagatattatcgaatgaatccatagtgtatagttcatattctcctgaaagacccctctttatcatttaggcctaagcctggattccttgctcatatattattttttaatcgaaaattattaaagaaacaagagcatttcatttaaaattactcttgtttcttttccagcaaaatctcttcagcttctacactctatcgttggtttatttctgcttcttttccttatgaggtttttttttttaaatttaatctatacccatagaatttttactttaatttacccgtccgcttttcagtaatattaaatttatattgtatcaatggaaagccactcaactaaacactcttctaactcccctattgaccatattctccccaaaaagccacgacaagggatcgttcaacaaggagaaggagggacagaatcttcaaaaagagatgcagaagcttacgtgaagaagttatacagctccattgaacatgtggtcaaataccattacgccaaagtcaaatcgcagttcagcattgaggatgtccccgctgatcccgagggtcttttggttggaatatttcaatattgcatagataacggaataaaggatagccgtgagcgtgggattgagcctactcatgttggatgtgtgataagcagctctctgttggatggtggagacatcccaattcccttacggaaaatcaacgacaacacaataaactccatccttaatctgtttctcaaggtggcacaaagtaaacaacagcaaaaagttacgctatggggtgagcctttcatggtgactataacaacagttgatcgttatgggcttccatctaaacgacatgtcaaagggggccaacgacggaagctcgcgactgtgcgacatcaaattaacgatcaatgcttgataaaaataagtaatccagatgacttaaactactgtttgttttacgctctccaagcaacaatggttgctaaaacgcgaggatggccccgaatgaagtttcaccgctatttgaataacaaacacggacaaaagggacaacttcaatgtgacacggttcaactcatgcaacaaattgaagccccaatgaatttggagggttatgatgcagagactttcgttccacgtgttgtgaatcattggaaccaggcacaacagcagcatcgttttgcagtgttcatcttcggctcttcgggacagtacaaaccactctacaaatacattgacaacagctacgatacaccactcctcttgtactacagcaataaccattttgatggtgtccagaagcagggtggattgttcgggaaaccatattgcttggagtgtgaacgaccatatgataaagcatcggaacacagcaaatcttgtaaagcccgctgcgtgttgtgctcaaggatgggtcctgaatttccatgttcttcgactcccggattctataaggaatgctccggctgttataaaagattccgaaacaacgattgttaccattaccatcttcattcaaacttctgcatgcggtcaaagaagtgcaaaaactgtggtgttatctgggacgttttggacaacaacaagaaagggagaaaaggacatcaatgtggcgaaaacttctgtcgtctttgcaataattatcacaacaccgaaagaggctgctttattcaaccgtttgagcctaaacaacagaacgttccctatcgcatcgttgcgttcgacctggaaacgatgcagcaccaagcgatggacccccgtcagccagagaagaaacaacatcagcctaacttcatcgcagcgagagttgcgtgccccgattgcatagacaatggcaaaagaaataaggcgacagcggtctgccagatctgcggaccatatcgtaccgtcgccttctgccaacgccgattcatggacacacaagtgaataaacaagtggtgacagagaacccactgaaggcatttgtggactggctagtctttcaacttccaaagaaatacgacacctatgcctattcacattttggaggacgcttcgatatggtgcttgtcttccgcgagctcttccggattggctttaacccaaacatgctaagaaaaggaaacaagctttatgagatgaaggtgcaccagaagaaaaatagtaaccccaacataatttttcgcgactcgtataatttgatgccctgctcattgggtgagcttataccatcatacggtttggatgtcgacgacaagccgttcttcccacatttggctaacagacccgaaaactatggccgtgagatatttccaactcccaatgactacttggctagcggaatgatgccagagaagagaaaaaagtttgatgaatggtacgccgagcaccgccacgagccatttcttttggatgaagcgctagcaagctattgtaccaacgacgttgaaattttaatggcagctctggtggcatttcgacgcgaattcttcgaagtgtcacgaagaaatgaaggaattgtcgcgaaacgcgctgcttcagatgagcatcacaatggtatcgacgttctgagagagtgtatgacaattgctggagcctgtatgcgtcacttccgcatgaatcatcttccttccgggcacttggcaattgttccagaacggggatatgacaatgcacaaaatcaaagcgagctctctcggcgtttcttacattggtacatggaacaacacaaagtccaagtgcgaatggccaactcacctggcggagagaaaagaattggacaatactttgtcgatggatgggtggaggcagagagaagagcaatcgaagtaaatggatgtgtatggcatgcatgcacagcttgttatcccgacgatgagatgctgatgccaaacggaaagacagccggagcagtgagggagcgcaatgtcaaaaggatggaattcatacggaaccaagttgacaaattggatgtgtattgggaatgcgagattgagcgcatgttggcgaaagataaacaaatgaagatgagatttgaagaatacccagatgatggaccgctgagaattcgcgacgcttttatgggaggaagaacgggaccattgaaactacttcataatgtgggcgcggatgaaaaaatttcttactttgacttcacttctctctacccttacatcaactgcactactcgttacccggtgggtcatcccaaagtgcacgtgctcaattttgaagtggagtggagaagtgccgcggacaacccatacccattggcgctgctcaaagtgtgggtcgtgccgccacgacaaatcgatgtgcccgttctaccggtgaaagtggatgaccgactgtgctttcctctgtgcatcgcctgtgccaaagaatatccaactggaggcgtggacaacgactaccactgtcagcacactgatcaacaacgcggatgggtcagcacctgcacatcgattgagctcaacgtcgcgctcgacgagggttaccgcgtcacgagggtgttccgcgttctggagtacgaacagagcgacgacaagctattccgcccctacattgcggaattcatggctcaaaaaatccaggctagcggctttgacagcagcatcagagggaatgcggagaaggaacaacagtttgtccgagagtgtgccgaacagttcgacatcacgatcgatccaacaaaaatggccgccaataagggaaagcgatcgatagcaaagctttgtcttaacaatttgtggggccgattttctttgcgcaattacggcttgtcgcaaacattaataacggatgacccagctgttctaggagactttttggataatcgctcaatcgacgtcatgactatagatgaactcgaagaagaacatattttgatcacctacgaaaaaaagaaggagtgggtgactgagcatggatgctcaaatattgttatttcgttgtggacaacttcggctgcgcgtttattgttgctcaaggctatgcagaaagtagtgagatcgtggggatgtcaacttctctacaccgacaccgacagtcttgttttatcacatccacttgatttttgccctctcaagacgggacaacaccttggcgaattcaccgatgagtaccccgaccatgaaatacgtgagttctgcagtggtggagccaaacaatatggattagtgcttcggcgcaaaaacacttcatctgatgcagaattggaatatgtactgaaagtccgaggaatgacgctgaattacgacgtcattaacaatcaaggtctccgctatgagacgttcaaacaacaggtgatgcgttatgcgagaactggagagattgagcagataaggatcgaatacccaaactttcttcaaccaaatattcgaagtggtggatcagtgacatcgactcaaatgcaaaaatgttaccgtccatatgttgggaagggaattataggcaacgatttcaatgtgaagaattttggccacactttgtaatgtttttgttttctgatgtatctctctttctcatcaatacaccataaattgtctctctttctctctttgtttctctcacacgtacacacatgtgctcttttatctaaattatgtaatttatcatattttgttattttgtttaatattaaataaaaaaatatatacataattaagaacggaagatgaactttggaactaattaatcattagaagatgtcgtttttaggtggaaaaatgcataattaagcgaaagaagaaataatttgtgaaaaattaagacatggaagttgaaattcaaaataattaagcatttcaacatgtcatttttaggtagaaaaaagcaaaattaaccatttgaagcagaaattactcgaaattcactaaaaatatgccaaaatacagcaatttcaggttttgtgcgcgtgagtgcgtgcgtgcgtgcgtgtgtgcgtgcgtacgtgcgtgtgagtgtgtgcgtgcgttgtctgtatgtgtgtgtgttagaagttagttggatttgtctgtgatgtagttaacgaagtaaatctaatacatcatataattttagttagtttccctttagttcacccttttaagtttccaaatttctcgacttaaatcctattgtctttatctcactcgtctacaacatcacctttaagccggcctcattttcttctctcactttcttaccctcctcctccccttttccaatgtgcgccaaaatctaccgcactgaactttcccatatccctcttagactttccgcactattcctcccctttccgcagccctccaaattttaccgcactattcaaacttagcgcacaacttttccatccttaaaaaatgtacggcacccaatttaccctacttctacaaggcttaccgcactcttcctatcaactttaaacggtccgccaaagtttactgcactattccaagtcacagcaaaacgttctctattcttcta

SEQ ID NO: 2696 - DNA, 1402 bp, Heterodera glycines
  unsure (1)..(1402): unsure at all n locations
atataaatntctccggtaaaaattaaaattctcaattcgtgcatcatttactgtacgaaatttcttgaaacacgtgaattataaatggaaaatgattgtgcatcgatccgcgcttatcttcggtcgtgtcatttcgaatcaaatgaaattttgggcattttaaactcaagaaaatgaaaaaaaatatttttttcaaaattaattaattcaagtattcgcttcataaaaaaattatatcaaaatagtaatttaaattttgtattttcaaatcgaaaaataagcacgtaatgctgaaataagcatacttgggaactctgaactaaattgttgtctaaaaggaacagacaaaaatcttaaatattctcgatggccactcgtccgaagtgaacagaatatctcaaaaatgggctgaaaattatgaaatccttctcgaaacatgatttagtaacccaacctaacaatttaaattagtacaaatttttccatctccaaaaaatggtgctgaatcgttaagaaaaaccatcaaaaagggcgttatataaaaaaccatcaaatgaaaattttcaacataaaattttggtcaagtttgagccaagttatggctaaaagtacacaagcaaccaggttttcacacatttttggccataacttttttgaaacttagccaaattttttgaaattttgcaggctaatagaggacagacacttagggttttcgaatgatatcaagttttcttaattttgttgtttctgagaaagttttgaagataaaaaaccatgataattttttatccggggttttaaaggtcgctaatcacgaatctgacatgtattttgactaatttctaatccctaacccgaactcgaataaaaatcgaaattttgaatttttcaaattatgattttttgttcaaatttagattaggaaatcggaattgatcaaaataattgaaggattcgtgatcggggaccccaaaaaccccagagaataaatttttatgactatcacaaaaaaaattttgcaaaacaaaagggtccccccttttgaaaaaaatttcaaaaacggccactttccatatagtgccgaatttttgatgatcaaaataattttatttttaatttaaaaattttagttagaaaatatttttattttcttgttattattcgatagccacacgtgtcctctattaatctgcaaaatttcaaaaaatttcgttgggttaaaaaaaagttatggcctaaaatgtgtgaaaacctggccacatgtatacttttggccataactttgctcaacctcgaccgaattttttcaaatttaggtgagctaatagagaactattagccctatcgaatgatactaagaatgtcaaatttggttgactttggaaaaaattatagacag

SEQ ID NO: 2697 - DNA, 1738 bp, Heterodera glycines
tattgatatttgtgccaaaaaatgaaatgggacaacacttttgatcactatattttgatccaattgtggatatggtaaaataaatcaaataaatggtttagtcaaaatgcaaaatatgggtatcctttgagaagccccataaaaaaatgctatttccattgtatgcttcttttttttttttttgaatggaaaatgacaattttatacgcaattatttttttcaaagcatgatgggacaacacttatgaccatgactgtatttttttttttgtgaattttaatatgccgccttcaactattttgcgagataataaattagaagaaattttagaattttgcttttcgtttataatgcttcacaatacactgagttgcaaggccaaaatctcagtagacaccataatatctattgaaaaatttctcaatcgagatataactactcgaaattcagcgcagaaaaaaggtgagcacagtttatacataattttctttattgcagtttttgcttcttattatagataagcacatgaataccttagtaacagaattcaattttgttttcgaattaggcaaaaaagagttattcaattgttcaatttttattttggaataattcagatgatcaacgaaagaacctcaacgaatcattgttatattcaccggaagacttgaatgagtacagttttgagacagaggacgaagacgaaagagaaggcgaaggaagcgcaagtgtggaactgctcaattgggtagataaatacgaaccgataaatattgttactataatacaaattaagggtaatttcgctgatgaattcgaagggacaaattttgagatggtacggaaacgatggctacgcaaatcgctgatctccatgagcatgaacatggacattctggtgatttgcactgcgcaaaagttcgtgatattggaatgctccaaacggccaaccgatgggttaaattcgatggaaatggctgcgagggttgagattgaacgtgtcgatgaccggtctttcattttgtcattagccgtctttggagtacagccgcctcagtccaactcctccagccaatcattgacgacagattggacttgcatttgcattgtatataatcattccgccaaatactaccaaaatgtgagacatttgcttctctaagggcttgagcactggcgaattgatgttttacaccgagcggggaactctcattttcacggaaaggtgcgcaaactgtcccattctatcgttgcgactcggccattcaattctgcctgggaatcaaggttggccattcgtgtcgccttttcctctcaattccccgaagaactcgtcgcacttacttccgctgccaaactcgtcatcatcgagggcctttctctttacacaactcttcgtacggcgagggcacagattgcccgtggggatcgctcattcagcgaaatttgcgggaatttgcaacttaacgcgcaccaactgaagctggacagatatgagcatgttggcgattttcagtccattggattaacgagacccggcacttttgaccagtatatgagtgcgttttattcagccggaagaagtgtgagttttaaaaatcgggttttcatatttctattttaaaaattattaaatatttcctcgcgcgtgcctatacaccaattttttcctaaactttttgaaaaaagaatgttaagtggaagcaatctttttttacgagaatcagttttgttaat

SEQ ID NO: 2698 - DNA, 1843 bp, Heterodera glycines
  unsure (1)..(1843): unsure at all n locations
aaaacgggggctatccatgattatgtttttgaaaatcattaaaacccttacggggaaattctatgatgatttcaagtcggaaaaggtgttaaacaaaacacntgctaactcgtctaaatttgtgtttcagatcaccaacaatattcncttcttttggcttccgttctttcactggtattggcacttctcgtaaggaccgttatgtcaagaaatctgctgccgatgtgcgtacaaattgggtgccgattaagagtattctcagggatggaaaaagaagtgccgatcggacatttattgcgccaactcccgggtggccatttgtcgctgtttccgataactatggacggattgtgctcatcaatacgcgcactagacgtatcattcgaatttggaaagggtacgactgccaagagggtagcagcccttgtcttacaattagggaggggttcgaaatttttaaatgcgctattcaacaaaacaaaaaaacatcgaaagtctggtgtggtgggtacccgcagagaaagaaaactttccatgttttgttaaaaacgtctccgaggaggggggggggggttacacccctcattgtttgtttatcctggcctacgcctatgcccttgacgatgtgcttccttcgtttcctattttcacgatttgtttttcagttaccgtcaagcgaggtgcgcatggattgagacagtcagcacttcacgaacgacgccaatgaaaaaagctctttttctagcaatttttgctccaaaaagagggcttttggaaatatggtcgatgctggtgagggttttttacaccgtttcaaacaaggcgaccagactatggtttcagaggagcccaaattcctaattagtgaggggaactcgcagcgtagcaggacagaacgtcgccggaacaaaacagcgccgggacataacgtcgctacaaaaaataaatatattagaaaaattcaaaaaaaaaattaagaaacaaacgttctcatggattttttttggttttctggcaatttattgttagcaatttattatataatatctaattttaaatatttcaaatgttttggttttttgcgccgctttatgtctcggtggccggcgatgtttttgggggcactggaatccgaaaatttattaatttatcttcgtctcaaaagtttattttctagaatggaccacgcgttttggcttttcaagttgaggagggcagtcggttgctctcattgcctgttgttcacggtggcattttatttgggggctctgatgttcgtgagactgaatcgcaggaagcgggtggtcgagcgggggccgtttttctgacgcctgacggactcctttatgtgatgaaaatttatttgtgaatctgaattcattttttacagtccgtcgatgtgcccttttatctctccgcactttcgacgagtgcgacatcgatttatgacgaacatttgataaaagatgttgggtttcattttcctaattaattaaaatgtatcatttcagttcagtctcgaacattttatgattaaaactgagaatgctgacaatgaatcggacgttgacttagaaaaactggctgaatttgcgcttcgaattaaaaccaacctggcaagacaaagatttctggaagctttaattgtttcatcgagggggacttcgaccaaaaagagcgatgccgggaataagaaattgcgaactttgatatcagttcgatcgttgcgcgaacttgtgaaccgaatggttggaaaatgtgagctacttattcgtaaagaataataagttacgctaaaacaacaaatttttcaggataaagttgcaacggataaatctgaatc

SEQ ID NO: 2699 - DNA, 6604 bp, Heterodera glycines
tcccctatttgttggctttgcattctgccatcgatttttactcaattttggatgaaaaatttaccgattgtatatcgactgacgaccaaccaattgctgagattgaagcgtgtgtgaagcatctgtctcaaattcaatgtgatcgtactaatccgttgttggcaaaggctttgtcaatactcgaattcgtctatgacaataggtgggtttcttctaattttccgaagcattgcttttcaattttaagcggttcttcggccattgcttcatctctattaaatatcgccaagtgtcgtttggaattaaacgatttcgttggctttttcaatttgaatctgtatcaaacttttgacaataatgctcaagttggaacgccaataactgccaaatatgatgaaaataatttatcgacaaaaattcccacaaaccttttggcaaaattgggtgcaactttatttgctccgttcctcgtgaattctttttcggacttcgaaccatttctgaagagtctgacatcaaaatttcggctgagaaaggtagggttgtgttgccatcaaatttactctatatcaaaattgctgattgaatttgcttaacttttaggatttcttcgtcacttctctctgcgctttttggctttacccgccgtgtaactttaaattggactgtttttcggctcattttgctgaatttatgctcggtcttttcaatttgctcgtcgaagactctgacaacagcaattggaccacatcctttaaagaaacactcaaaacaattgaacaaatggtaattgaaaggtacacagtttcgttaaatttatgtataaagcttttcttttattttgtaatttcgtggaaactgagaaaagcctttcaattcttggatttgatttggaatttctaattcagcactaatgtgccggctgctctgatggtcgctgtgcaaatgggcgatttgtgtcaaaaaatgtcagttacgctcaatgaaagaaaggccagtcgaggaagcggtgattttttaaattaggttcggttgtaatttcacacaattttatccaatttagaacagaaaactccaacggaagatggcgatgcttttattgttttcgataaacccgaattggagctttattcggagctgtgcaacgaattgccatccttttgggcacttttgtcattgcatttgagcgttttacaccttttgcaatggctttcacagcaaatgacagatgaatcgctttcgtcgcaattgtcgacatcaaatttctccgttgccaaactcctccaaaagggtgttagtttctatcgggaacaggttggttggtcggttgtcgttgttttcaacccattcttttagttgggtctttgggtttctaatctcccgactttttctgcccatggcattgtgtcgcttttttcttcgaatgtccacattgaaaaaaataccgatgagattcattttaacgcaaaaaccttccacgctcttcggttgctttgcaaagggacacttccgcacaatttgcgattggaattgatactttgcgactgcgtctgggaatgcgccagtgcttggtacaaggacgaatcgcgaagagtcacaaaactgaaggttgttttttggcgttgcattcattgcttctcatttcggccaattccctcgtcagcgttctatcgacctgctccaattccttagttcggttccaaagttgcaaaatggcatggctttgctcctttgggacactttcattgcgtccagcttcaagaagtgtttccttttgattgaggaacagatgggttctgctgggcccggaaggtcagacggcggaactttgccattgatgggcaaagaccgactgctgcgaagggatgtcttaatcgtggagagggatttggtgatgcattttaaagtacaatctcatgattactgtaaatttaagcctgactacacgagttgcatacgcaaattcctcgaaatgttggccgagtcgtgctgtcacctctgttcgagacaagacattgcctacggcccattggcgggatccttgcattcggaggaccgcgaacttactgattttatctgtcaccacaagttcaaacaacactcatcactctctgaaaggtcaactttttattgtcattttttaatttattttaattttttatttctagaaaattcgctggaaacttaactggccaaactttgattcagttgattgactgtcaaaagtcagtcaattatcacttggctttgcatatgtctcatctcgctgcagtcattgaacttcaggtgaatttttagtagaatattttagtttattttgctactgcgctcttctttttgttccccaatttctgccaaattgcacagattaatcttgcaacgaatgcttatccgaagcccagctcactgttcgattccaatggcaaacgcgcgtttttcaaccctttccacacccatccgcttcttcccatgggacgagtcgacgatcggacaaaaacccgaaggcaacgctttattgagcaatgcatggaggcacatgggagagagaatgagaggacgggacagagcagcgaacgctgtcgagaattgcgaaaagtgatcgatcggctgacgaaggaatgggcgttgaatgtgaccacgctccaagtcaatgtgagggcgggggagagcgtttcccaatgaaatcactcgtttttcaatttatttattatgggaattttgttggttttaggaggtcacgcggctttacctcaacggggcagacgaagaagcagaagttaaatgtgataagctttctggaaatcgtcaaaaactggcactcgagctcgtcccggttatttccggtcggataaaactactaaatgagaagagccgctcggcattgtttgacaaaattggccaatcttcggctgcttctccggggttaattgaatgggaaagtgcgaatgttcactttgttgtttcagcacaatgactttcatcaacgacacacccgatgagtatttgccaaatttcgaccaaatcgattcaaaacgaatacggcgcttagtggcgctttcgagttcttgtctcgttggaaagagtggaagaagccagcagatgaacagaagggatgaaaatcaaaccatggaattttcaaaatgccaacaacttttgcgtgaatttaatgaaatttgcaatgttatcgactggatggagaacagaaagtgaccttaaaaccagaaatagaatatcccaacgagaccaacatgttcatgtgatacaaataatttaattcgaatttatgtttaattattgtgacgtctttcttacagattaaaaaaatgcatttcaacaaaaaaaagtagaatttttgtgtagcgtccgctgagatatgctcacaaaaatattcgcttacatcgtatatttacatccaataatatggactcattttttagaaataaaagccaattttacgtaaaagggattaatggaagatgccagcagcagcagtttattgggcgagaataaaactatcgagcttaatgaagaagcggattttagcgcgccaatgattatccgaaatgaaagcgaagacaatttgccgattaccgaaagccttgcggaaacaaatgattcgcttcagcaggagaccgattctctgttgtcattgtcgcaatcggaaagtaaacagaattcctccgcctctttaaaccttcattaattgtcaattaggcgatgttgcctctaagccaaagtcaaaaacgccgagccgcgctgttttggcaccggacgttactcacgtgccaattcaggcggcggacattgtcgaatacgaatggccaagcaaatcgggcgacaaattcttcctccaggcaaaaaacgggaaaaaataaatcgttttttttgggtgtaacatggcatttgttcaggagcaaatatcggaactgctcggcattaactctttcaagcgcaaataccccgaattggtgcgcagaacggtggagccagcggaacgcgactatttgctgaaggaactgagggcgaacatcgcactgcccgcccaccacctcaccgcactgcaagcggcggatgtgcacgaactgatggcatcggagtaccctttcgaatacgccgaataccaaaaagtgtgcaatgagcgcgtgaaacggacacttttggagaaacaaaaagaaatggaaacggtgggcaacaaaaattgggtgagagcttacacatatttggcagattaaattggatgcacgaaaaatggccgaaattaggcaaaaagccgtgaaaagtgcgagcgaattcaattccgagttgcaatttgtacgccgaacggagagacaacagttttgggagatgaacacaaatgtgtgactgttgggcttttgggaaaggatccatcggatgccaattcctttcagttgattcattctccgctcaacaaatggatgcgattgtccgccgaacacacaaaaccgtcggattatcccgtggttttgatgcccggacagtacgccacattttacaaaaagttgccgcttttccaattaaactaaccgttccaccgttgccttcacaatattgcaggttcgattcttcgctgctccgttcgtttccttttggttcggtggttaaaagcgacgaattgttccgcccgaaaagggacgcttctccgcctgcgatttccatctccgaaaacgaattggaagcagcgaaaaataacagtgacaaaagcggacaaaacagcggacggagagaagtgaataaaaagtgaaagaaacaaaatgattggacagtttagcacggttttgttgacattgaccaattggaaaggaacaatttgcccaaaatgacagaacagccccaggcgaagacacggaaaatgtcggcgacatcaaactcagccaagtttagtcgaaattggccaacaaattgcaggcgagggaagaggaaaacgaaacgacaaacattttaggtgtcaatttcatggacaacgaccgcaccaaaaatggcaccgcaaaaagcaaatggaacggacatggcgaaaccacggggatatgtacaacagcagcagcccaaacaagccgaacgtgacgaacagaagcccagcatttgttcgatgtgccaatcggccgacccgagcccggcgcaccgggcttctctgctcgtccaatgttccgcttgtcaacaccaaatgcattcgttggtcacttccccaacaattgttcaatttccctttgtttaagctcgtgcattgacatgccgttgaacatggtcgaagtgatccgcaaatacgattggctgtgcattgaatgcaaacggtgctcagtgtgtgagcagcccgaccaggaggtgaccgggggggcggaataagcaaaatgtgggcacctccctccctctccaggcggcgatgatgtgctgcgacgcgtgcgaccgcggctaccacaccttttgcatcggccttgaaatgccgccgaatgggacttggcactgtcccaagtgcaaaggttgctgatactgctcactcactgtccaccgcccgttcggccgaccttccgtcgctgcttaattaatgtttataaggcctcactgaattccttcctatccctttttttgcgttcattaggggggggggggcggaggtgcggcaattgaccgatggtcggtcgctcttcccaaattacgccatggagtgaattaggttcgcaacatttccaactgtttaaggcactgtcatggacgaacaattgaagaaacggtatctgagtgtaaaggaacccgaaacaccgaccgaaggacaacaaaagatggtgtacatggacttgggaagcaaaagtcagggagaaattgacggagcatttgaaatgcctccaaagaggcggaaaggaaggccaccgaacaaaaaggcataggaaagttcagtcgaattgtacaattgttggtccgaatctgacaacgataatcccatcttttacatttgtttttttgtccatttttctattccaaatttttgttcgatttttttgaatgttaaattgctttttattctccatttttaaatgtaattttaattgaattgatttgcttttacttttatctttcacttcaccttttttctgttgttcgtccctctcgaacgatgtcgagcatttccagcggcgtcgacttaaccacaaaataccagcgactcgccgttgaatatgttaaggtgtcagtcaaaccgttcacctaaacatgcaaaggggctttgaacagttaaggtgcggaaccaagtggcggtgcttaagtcggctttggtggaagaacagtcgaaaagggccgatttgggcaaggaaatggcacagagagagacgaaactgttcaaattggagggcgaaagggactcgctgctattccgcaacgaacagttgctgaaacgggtggagggactgcaggagagcatggacgcccaacaagcgacctttggcatggccaaaggtaaaaaggtgggaaaagggcgaacggacggactgtcgaatggcaaaaatcgaaaaaataaaacatttattgtcagggaattacacattttatgagagtgtcgaatttgatcaatctctccctttttctgattcctttt

SEQ ID NO: 2700 - DNA, 592 bp, Heterodera glycines
aaaattattacgtgtatccagccatgcaattcacttcctcgtcatcatcgtccaaatcgtcttgataactagcggagactggatgacgactaatcaaaaacagcacgatcggcaatagacaaaatggaataatcaaaaacgtctacatttttctattaatatagcaaaaatgttttttattccataaaaagtattttattttagtatttattaaaataaattaaaaagtgtattattaaaatattaatagaatcaaaaagtttgtgaaaatgtattattggtgatatttgggggggggggcattcatcgacgagcgaagggtcaaaaacggacggaacaaattctgatgagagatggaggggaattttcaaatggaaaagaaaggaaatggggagcagacgaaacgccaatgcccttaccctggccaatgccaatgcccttaccctggccaatgccctccaattcgtattcatcgcttgttgaatgttcgggattggcaagaattgagccgattgggtcaacggcaattatctaagataatgagtgcttaattacacaaagactacgtacgcggccacaaattggcactaat

SEQ ID NO: 2701 - DNA, 3683 bp, Heterodera glycines
  unsure (1)..(3683): unsure at all n locations
aaacaattattaataaattcgataaattgtttttcccttttttcttaaagtcaaataattcaacccttcacttttttattggatttttttgcctaatgttagccatttttgtgatgacatctgattgatgaatcactaaaccaaacattactgctcagaataattaattccaaatagttttggttactaaaagaaaaaaataaaattgaaattttgaactataaattaattaattaaaaaaataatttaaatgtttttgaatgacaatgtaaagttatgaataacacatttgtcaccccagtagttagccccgtattttttggcccctaaagttcgagtcctcttgactgcaaatcattttttgggaattaaatttttggtgcattttaatgggtctggggagtgtttttcttctatgtccgcttggctgcaacaattttttagtaatcaaaccaaaaggttttggtgtatttttaatgggtctggggagttttttttgctgtaactcatttttttgaattaaatcctaaggtctagggcatttttttaaaatgcaatccattggttttggtgtgtataaaaatgacaataaattttttcccatgtcaaaacctattgttttttgttcatccatgaccggcccattctacagtacgggtacaaatgtccaaaataatacatctcgaactcggtgatgtcataattttacagtggagcgttaattattttcacaaataaattatgaatgtattttaatttatttttagatgaccactgtattgtatgactgaaaaaaagtttaaggatttttaatggtgaaaaatcccaaaaataattaactaaattggcaaaatatagtgtcgttacaaatgaccagtttttgtgctttgtatgaaactaaactgtaaagaaaatgctaaaaaaaattaaccgacaaaaaagcgcaaaaataaaaggatttncggttctttgacgaaagtacctctaaattttagaaaaatttcggtgcttgtctctttgaaaaattcatagaaaaaaacaaccgatttgaataaaagatttccctactgcattgcttttaataaaatttttgtttttccctttgatctccttgggaatcgacatgtttctttggaatctacatgtctttttagaaacggtactcagccgatgagaactttatattgtaatataaactttttaaatttcagtcaattaaatgttttttccacttactgcaattgttgttaaatattattgaaaaatttgttaaaatattttaaaattaatgaaaatcattggtgacccattggtccaaattttttatgtttcacagttggagcccatatggggcatcgccgtttagtgcaaaagctccgaaatgcgcacactaattaatttttgtgcattttaggggttgacttacgacgatgaacaatctttttctcgttgtaggataattaattatcacgagacgaaaaaccttttaggaatcgagaataaaatgatcttttagtttgccgaaaaagtaattaataattaaatatggtgagaaaaaagcggcaacttgaaaaaaaggtttcctaaatttcatgaatgcaaaaatgcaaaaaaaaaatcaagctgagaaaaaggggcaaaggggcaatatttaaggcagatgccgttttggcctgccattagtcttaaatccccatctccatttttctcaccacatcattctgtccatgccacaaattttagcactagattgaaaatttaagaattttctgaagcatttacacatccattttagcctttttcccacatcccgtcctaggtaatatttttgttcctaatttttttaccaaaaaaaacttaccactatctttatttgaaaaggacgtccttaaaattcgaattctgtttgagttgttccttaattttttgcagaactttagtattttaaccaatttttaacaaattcacacaaaaaataatttttcatggcgacgcctatcggcgaatcctgactaaaatttcttttaaatttctgcccaaaatctgcaaaaatgctcaaaaaaattgtcaaaaattgcaaaatgaaagaatttttaaagacaaaatttctaaaaaatttttttcccaggcggcgcctatcggcatctccggtgctaaaatatgggagaaacttcattttggagaaaaaaaaaacaactgaattgaataaaaaatgttaccctttttattgatttaataaattttttttgagttatctctgaaaattacacaattcctccattatgtccttgaaacccgacatatttgtcttttcaaaccaaactaagtagatacacctgttttactttaaaaatagaaaaaagttttttagtgtgattgagttatatttttaattattttgtgcctatttctccctattataatattttcaataaatttattataatttccaataaatttaatatattttttcctttagaaccaaaatgtctgacaatatattcgccatgttggatgattttgacatcgaaaacagtaattaaaaaacaaatcattacatatacatatacatttataaatatatattatattattttttagtcgacccgactctaaatttttcaaatgatgcgtggatggaggaagtcggtgaaaccgtcacggtaaataattgtttaaaaatgtttaaataaattaaatacaaacaaatgattttgttctaatttttcttcagaaggcattttttgattcatttttttgattacttatttagaaggtctgaaaaaaacttaaaaattctaaaaaagttttcactgaatagttatgtttactaatttacttattttgcgagattttattacttagggtgtaacataagttttgaacctattttttataaaatttttattttaaaatgtaaaaaataaaataaagatacgataatacattccattattatctataatgagttgccatttttttggcaagagagtaatcccaccggcattaaattagaagttataaatctaaaaaccaaaaattgtcatttttcagtacatattttttgagggtgaggttctcggtcatatggaaaaatttaatgataacctaaatatgtattgatagaggacagttaatactacaaatgccatctgagaaatattttttgtacataattataaaaatttttaaggagtcgagttttaaaatggcacaagaagttgaccattttttaagaccacatttggtacaatttttctattaagtggttttgtattgacccaaaatctatttaaaacatagcaaatttgaaattctgaatccgaatctggcctctgattcgaaccttgacttctcattggtctctgtactgcttgaactttgtgcacggagttgaagcagtacaagcaattatagaaaaaatagacaaaaactaaaaccagattcagattctatggactgatttggtcttaaaatatatggataatagggatttgtgaaggttttgtgttagttagtctaagtgtacaattaatgtgttgatgtacatttttggcatggttaggaaaggagcaggaaaaaccaataaagaaaggaaacaattaaagaatggtatgaaatgaaagagaagactttaacaattaaaataaaaaaaaaaaaaaagaattattaaaaatatgtgc

SEQ ID NO: 2702 - DNA, 3824 bp, Heterodera glycines
  unsure (1)..(3824): unsure at all n locations
attttttttgaatcttaaaaattttttatgctctaattctatggtacacccttaagtaaaatataagattttgaagcgatttttatgaggtgattttatggtgaaatagaataatagattttttaaaaatataatcatttcttttttcagttacacgagcttaagcccatgcgaagagaggaaagccatgttagtttttttactctataacctaaaacaaatttgaaatttccaggaatggttgcaagaaaaagttatcaacatcgaaaaaacacaatttgaaatggagaaacaactccaaatgttaaaacaacaacaacaacaacaacagcaccaacaacaacagcaccaaccgcaacaacaacaacaacaaccacaacagcagaatgctgagatatttgaagtggaacgcatcgttgacgtccgaaaagcacgagatgggaaatcagagtataaggtattaaaaaatgtttttaaacaatcataaattagcaattttaaggtaatttggacgggctacacggagtcgtcctgggagcctctatcaaacctttggggcgccacagaagaactctacaatttaaactgtttcattgttgcggaattattgagttaataaatgataataatctccgatttacaatttcctttagcaaatgtaggcagacatatttagaggaaaatgagctgaaattgtgaaaatttcacaaaaataatcatgaaaataataaatcggagattattagcgctatcaactcgatatttccacaacactgttacagtttacatttagaggataatgagctgaaattttgaggatttcacaagggtgatcgtgaaaataataaatcggagaatattattaacacgatccttctacaacactgatgcagtttatatttagagattaagtcgctgaaattgtgagattctctatctactattttcaagaacaatttttgaaattcttgtaatttcataaatatatactgtaaatataggttgtctcgtcgttgcagaaggattgagttgataagcgccaataaccatcaatttactatttatttttatggctttgtataattcttgcactttcagctccttatcctcttcaaataaactgtttcagtgttgcggaaggattgagttaataaacgataataatctccgatttacaatttcctttcgcaaatgtaggcagacatatttagaggaaaatgagctgaaattgtgaaaatttcacaaagataatcatgaaaataataaatcggagattattagcgctatcaactcgatatttccacaacactgttacagtttatatttagaggataatgagctgaaattttgaggatttaacaagggtgatcgtgaaaataataaatcggagaatattattaacacgatccgtctacaacactgatgcagtttatatttagagattaagtcgctgaaattgtgagattctctatctactattttcaagaacaatttttgaaattcttgtaatttcataaatatatactgtaaatataggttgtctcgtcgttgcagaaggattgagttgataagcgccaataaccatcaatttactatttatttttatggctttgtataattcttgcacttttagctccttatcctcttcaaataaactgtttcattgttgcggaattattgagttaataaatgatactaatctccgatttacaatttcctttagcaaatgtaggcagacatatttagagaaaactgagctgaaattgtgaaacactcaccacgatactcatgtaaataatagatcggaaacgcttaaaccaaatcaccgtgtatccttcctcatgcacctcctcacttttggagcgattatgttggataaatgtgaatttcgaaaaatttgagttttcgatttttgttcgaattcggatcaggggttcggaattgggtgaaatggatgccatattcgtgctcagcgaccccgaaaaccttataataaatatttttaacttttgaaattttttaaaaaaatttcaaaaaaggtgtgataccatcggtactattaccgaaaaaagatataagcgtttgaaattttgttttttgaataattttagatcggagcgtaaaaaaataaaactcgagcgttaaaaatattcataatatttttctctatcgctatgcaaaatttagtacatattgtatgagtagaaaaaaagttatatggagagaagtaaattcggtttttctctattaacagagataaaaaaatagtacgccaaaatgagagatgtttttttctctgcactctctctttattgacacatgtctcgttttttgactcggtgtgtgaattgaatgccaaactctgcaaaaatgactaatttaattaactgaatccaaattctgtaaaaattgcgagtcccgggacgacccccgtttttatcgataatgcacttgatttcgaaattttttggtggcaaaataaattttcattgaacaaaagttgaggccgagttgggatgggcaaaatgggaaaatgtccattcaaaatttcattacatacaatgctgaaatgttaaaaaaaaaaattacgaaagccaaaaaatgattatggatatttttaaataaaaacattttttgcaaaagaaaaaaacaaaggcattgatgaatttaatagatacttgtctcagcaaaaaaaaatttgcggcttcagaattataaacagaaataaaaacaccagtgattataaaatgtacaacaatgattataaaaggtacaacagtgattggaaaagttataagagtaattagaagaggtacaaaagtgattagaaaaagtacaaaaattgtgaaatggtacaaccatggttaacagggtaaaatcatgatttcaaaattaaacaaataaggaaatggtttatgaaaaaatataattaaaaaatgtattaataatttttaaaaaattattaaaaaatgctttcttttattaattaaaaataaactttgaatttacaatgattgagtattattgtattgaaaataaatttttgacaaattataattaaaaaaacaaataaattctttaatttaaaaataaaaaataattaattttaaattaatacatttatttaccaaaattatttacttcaaattaaaaaattttatttattattaataaaagaaatctattttttattaataaaaacattgaaaataatgaaaaaatgcacagaaaaataatgttacaccgcccggattcgaacttcccctcccccctcctcaaaatgatgcctcagaatccccaatcacacagggattctgaggtcttaacgatgtcaaaagtaaaatgtgatcacgtattcgtgatcagcgtcataaactacccctaaagacatgtttttggaagatttttgtcgaaaaaattttttcactcaaaaaccatgtgcacccccctttggtcccgaaaccaaaaatcacttttatttttataacaattcgcaaaaaagagataaaaatgtaaaataaaatttatattatagagaaaaaaaattgcggatttttgtagtatattacttttacagaatgacttttcagaagggagttatgaatttttttctgaaaaatcgaaaattttcagaaattctggaataactttttttctttttaagatagaaatcccaaataaatctcataaaattctcccgattttttgctatttttanagctttattgtatgaaaattgaccctctctgaggtgagttatgaatttccaatattcgcccnaaatccgaggncaaaaattgaaaaatatttttgaattttaaaaa

SEQ ID NO: 2703 - DNA, 1509 bp, Heterodera glycines
aaaaaattgcggattttgttattatattacttttcaagaaggcttttcagaagggagtttataatttttttctgaaaaatggaaaatttcagaaattctggatacacttttttcctttttaagatagaaatttcaaataaagtccataaaattctcctgatttttacctatttttacaaatataatagcatgaaaattgatccacccttcgatttgttatgaattttcgaaaattaacccaaaatcccgaaggccaaaaaattgacgaattttcaaaaattttggaaaaattccaaaaaatctgaaacgaaaaacaaaggtcatattcgtgctcagcacctcaaaataccccagaaaaaaaattttcacccccattttcgtccgaaaaaaaatttccgaaaatttctagggggcctagctcgaaaatttttgaaaattttacatcatgtagtacaccgttcgatagcatttaaaatgctctacaaaaatgttctaagacaatttttcgctaaaatcaacccctgacgagttatgggcccaggactcaaatgtcccgctcaggccaaaatttttttctatttccgggaaaaaaccgaaatttttccaaaaaaattaccagtcgatagaactcgaaaaatgatgttttggaagttgtctccgtttttcccagaaaaatcgttaaaaaatcataaaattcaaaaaccaaaaaaacgttttttaggcctaactcgaaaatttttgaaaattttcgaaattttaaaatttggaaaaatcaagctcattatgctctacaataagtccgctggccaccctgcgctcaggtcaaagcctaatgagttattcaacggggactgaactggacaaatttggtactgaatttttgtagaagcacacaggccatggggttagagatagaggcctggaattttttttaacttttagccaacacttcaacttagggccctcacagcgggaattttttgatccgagttttagaaaaaaagttacgggccctgaactgcaagaaaaagtgagaaatcggtccccgggactcagtcgtccgcgcagaatttttctctatatttttcccggatgcgccgtgaaaagttgtaagaccaatgcacaactttcaaacccgtcccgttagccattcccgagaaatcggttttaaggatgaaaccccttgtcaatataacgtatatactagccggtgtgtgcttatatgtttcttgggtgcttaaagcgcttcgcgctttgggagcttcgctacctaggccttgtgttagggtctttgcgtcagccgacatgcacttggtttcaccttgacacactgcatttttcaatgcaatggaaaccggaagtgccctaactcgcacgtcattggcccacctgcctccttcagtccagctggcagcacttttttgaatatgtgtccgttttaagtgcagatgagaacggagtgacatcaaaaagtgcgcacgcgctggacctaactcgtttgctttattg

SEQ ID NO: 2704 - DNA, 1880 bp, Heterodera glycines
  unsure (1)..(1880): unsure at all n locations
attttgaatttttcctcagtaaaacaaaaatttnagctttcacggtgaaaaaaaaaaacggaaatcccatccctgctgctgaaggcaggggnagagaaccttttcagctgggaacactgatcctagagcacattttttgaaaaatatatattcctgactaattcccgaaaaaatggggcattttaatcatgaaactcgatctgctaatggttacagtttccgacttttgctgattggctatgagcctgggtttttcaaaaattccagattcttctacgaggatttgaaatcccagtaatttttcatttcatatttcgcctcacttactttttaatgaattttccccaatttttggaaccatttaatgatcaaaattttccataaaaaaattactttgcacataaaaaaagaaaatccatcccgactcccactaggcttgaatttttctagaaaatttcagaaaatgaacccgacctactaggcctaaaatttttcgaaaatccaaatcctacgccgattttaaatcccagcctttgattgcttttcgttttttcagttttcatttctcatcaagctaaaatatgtatgcctttgatcagtgatgagtgagtgaactttgatcaatcctttatctccccctaatctccacgtacatttctattttacacactcacacattttgtcatatctcttcgtcgtatgttccaatcggtcgattgctgctgctctgatcgcctccaaatgttctcccccccccctccactctttggcggtttcaaatttcgccgctttcgcgtcaaacctttggcgttttgtcgtttgtggtggcatcaatcacttttctatttttatatgtatatgaatgttatgccagggattaaatgtgtgcaatgaacatatgtgtacattcttttgccttacgacaaattgggtaaattccaaacaaatttaaaaggtaaatttttaattttttatgaggtacaaagtgcagtcatcaattatcgactaatgaccccttttagcgatcgtttctttattggcaaaatgtccctaatacaccgagattttaacccctgggctcaaggcttgccctgtgcccccgagagttgagacgacctaaaccgagacttgacacctgaaaaacttaaactgagactgacccctcatttaaatgagaccagacctgataatctcgagaccaaaatggggagtttaatcgcccgaaaaatcaaaagctactcgagactaaccccctcccccgaaagtcgagaccaaaaccgagacttggctcctgctgaaacttgagactgcgactccaaaaaaaccaagtttctcattagatgaaaccgagactttaagcattattactagccttttttttgtttttgctaatgtacaatgacaaaccattttatctcatcggctaaaaatatttttgtaaattgcccaataatctttggcctttttattcaaaggttgagacatcttttttcagtctgctggcttttgttgtgtaaattgaacaaatgtgagatgattggacacggaaaacattcaaatgaattcacatttctttacacataaaatgagcaatttaaatttattttcatcgcttaaaaaatattatttttttttggaatttttagggcggtcgctaagaaaaatttacataaaaaaatttacattagtgatgacaggccgagaaaatcttggcgatattgcctggaatgatgcagttaattgagttcttaatgataggtagaatattatgactgaataagcctcaaatttaaatatttgaaattttaattttaaaattattttgttgaaattctaaaaagaaattatatttttttgttaaaaatctatttatacaattt

SEQ ID NO: 2705 - DNA, 1763 bp, Heterodera glycines
  unsure (1)..(1763): unsure at all n locations
ttatttttagaatttttggcacttttacatagttttttatgatttttgactggcgcgcagcttgngcactttcaattcctttggcactttgttttttaccatttactttttcttggcatttcattttaccatctttctcgacattttggcactcgcaattcctttggcactttgatttttgcctatttcatgtttgttatattttgaatatataaaacatttgattttacaattttggttagctgattttggcactctcatcaatttccattggcactttgtaggtgccagttacctttatatttattatcattccattttgttaaattcttttggttttggcacttttatttttcctttttaaaaaatgttaaatttatatcctgttttggcatttttatcattttatataattaaattcacaaaaatgcgttccaatttaaattttatttccaatttcttttttacccaacacaaaaaaaaatctcatcacaaaaagtgccgaacacggaagcaaaatttggcatccattttaaggcttcttctcttccatgaaaatgttatgccctcagaggcgaaggcattacttgcatttcaaatgcttctcgaccgaaggaatttagtctcgagactcaatttaataaatggtttttttttaatcaggatttagaatttatttttgggattaagattagctggcggatttttggcctgggatatgtatcagttgggttgagtttttgcctatagaaagctatgataaaatactaaaaatttcgaaaaaatgtaaaaacctaatagccacttaagggaatatttgtgtaattttttttaaaacattttttccccaaaatttcaaaaatttaatttatggaatttatgttaaggcatttaattaaattttgaaatttaatgcatcgggactctcgagaatcgtgctgataaataaatgtcgaatgatacttatttgtctcgagaagcattagactctcgagaacagagctattacagaaaatccgttttacctgccatgttttgaaaaataaaattatttttaaaatcataaattaacaataattattttttcttttctctttttaaatttattctcacccccgccggggttaatgttgtgttattcttcccatcgcattggtctcacccattgatctgccgggagataataatatcacataatacgtattataattgatcttttattacttattttgctgtttcaacgccgggggtaaatttattttatttttaaattatttttatataattaaaattatttttatataattaaatctaattagcgtcgctaattcctaatcagctaatcactattatcacttaatttgtttgctctcacaaatcagcgggggatgaaatgatttggcatatcgttctttgtttatccgtctggagtaattacactaataatgaaacatttcaattaccctaattaatctataattaaccctcatcatcattaaatttatttgagggatcatttgtcactgcttttttgttcgtctccgtcaccctttttagtcactaactttaatagtcccgctaacctctcattaatttgtttgtttgcacggcgaacggataattttgcccatttgtgttcgttcgccgccccgcccctttttcatctctaatatatatttttaattcctttttgtttctccatccggtataattacatataatacacaattaagtttaattaatatttaatgccccccccctaa

SEQ ID NO: 2706 - DNA, 4004 bp, Heterodera glycines
attttgcttttgcctcttttgtgttccgttcgttcgccgccgccgcccctttttcgtcccccgaggggccatccatcgattggctttctttctcggtttttcttcttttctctcttcacacatccgtccccgaccctttttctctcttctttctctctcttctgctgctgcagggggcaaaaaaaaatgatgaagaaaaaaaaacaaaatatattttgtttatgctcttttcgcgaaacacatttttgaggctgcaaattcagcgcgggacaaattgaggcctaggaaaatatttcaaaattttgatttttttttttttgtacaaggccaaagaattttgaaataatttggccaattcaataagtgatgaattgaggcctagcaaaatatttcaaaattttgatttttttttctttgtacaaggccaaagaatcttcaaaaatttggccaatttagcgctggacaaattgaggcctatggcaatttaaaaatttcatttttctttaatttaaatacacactaattgcaactgaagaatcttgactaatttgtggccaattctgtgcaattgtggcctaggaaattcattttttttaaattccaaaattgaggtctaattttaaattacctttctgtttgtttgtgagcagaaaatgtttgtttgttttctttgcccctgcggtggaacagcgaacactttgccatttcagcgcgcctaggctaattgatgctcagggaatttcaaatgcttgttttcataattagcctcattccaaattcctaacaatgttttcccaatgaaaagaggccaaaacaaaacaaaaaatctctgttggatatataaaattgccctcattaaactgctgctggcaaaagagtcacgagtcgcgaaaaattcaaaaaaaatttttctaggaattatttttggaatgcccttaagtttttgtcgttgaatgaatgacttggaatgtgtttttcttgcaaattatgtaattgattccttttttctatatttatgtgtatatatttgtataatcccattttttcaaggactgtccttgcaattttcggcgctttccgcggatgttctttaaaaggataaaaatcaagaaaatatttttcgcattttttaaccacgtttaaaaattacctttattgttctgctggaatataagcacccacttttcaagtacatttctcaaggactgaccttgccatttttatagcagcattcccagcgcaatacgatttgtttttgttcattttcaaaatgattgtcgtccacctttatctcccaacccccgccggccaaagagccaaaaattagcatcgaatttgcattttacacccatttttttttaaaattttctctgctttctcaacccacgccttccttctctgcctaccgtccgccggtggaaaaagccgcccgcccacgccaataaaaaattagcattaaatttcaatttttacgccgcccattttaacaccactcccccccccaagacattccgcctctaatgggcgttggatttcaaataaatttgatttatatagttaaacccccacctgctttaaccccacacatataattagcgctaaattttcattattcaattctgaaatttatcatttttctagttctccgattctcgcttttttaatttaattcattttttgatttttaaaattttgatttttttttcagatttcttagctcgctttgttcagaaaagggttttcaatttttttatcatttttttttaaattcataagttttccgattttcttacctcgccaattttacaaaaaaataataaacaaaacaaaacccattcccttatttcgtaattacgccttttaaattcactaattttcaccatctcattcagcaaacatattatattgactttatttaattgtccccggggtcatggcagttcgtacaatgggactttcatacaatgttccaattgcggatttcgtacaaaaaaaaaatatatattaaagtcgattttttctttaaaaactcttttaactacttgtttttattgcaatttttgtgaatgtttgattaacacaataaattgtatttcctttcttaaaagcaagtatttaagttatgaaatcattgtcgaaaactttcattggccactttcagttgaagtgagcaaatcctccgaaaaagcccgaatgaattattattgtttacgtattaatattgttatttttggtacccattagtttcattacttttttataatttgctttatttttgtcattttgatgaaaagtatgtgtcgctgtcactatcacttattttttaaaatttaatattgtacgaaacgtcaaattgaaacgttgtacgaaaccccattgtacgaactgcccattgtacgaactgcccattgtacgaaccgcctattgtacgaactgcccattgtacgaaccgcctattgtacgaactgccattgtacgaactgctattgacccaattgtccctcccaccttcacaatctcccaagcatttttccaaaatttcaaaatccattaatccctcatccattaatttgcaaatcttttattttctcccatttctcactttgcgttttcttcatttaataatttatttttgattctcatcttcctttttaaattcataatttctccgtttttcgtactttcagcctccaaaataatttttgtaaaaaatttcctcaagcatttgtaaatctttcaaattttcacaatttccgaacgccctctcccctcaaattttcaccgatttcttaactccccctggccccatctctcccccaattttctgcattaatattattatccaatttgtcatcatcattatactaattacccccggattaccccacccaccattaattacaccaccacccccacccacccaccacatgtgaccggggccggccggtgaacgtacccaacgcctcctcctctccaaaacggcccaacaaagctgagcaaacacaataaaataaaatttgtcccccaaggggtggggggcgtggtcgttggcgttttggttttgtgtttggcgaaatatccaatggcaaaaaaaaaattttttttgtgcgttggacggatgacgtaggaaaacgggggcagaggagcggacagagaagaaaaattaggaattccatacattttattgagtattataaagtgtgtttgttcactctactataacatatgatgttgacaaaattgaaaaagttttggaaaacttttatttttttacgaaaattttatattttcttatttttaaccctagttttgtatgaatcattttttcattttcctttttttaattttatataacgattcccactttttacccattttaattctttaatttaatattttaatttatgtagtgactccaacttcacccatttttataaaatatttttattacctaattaaattacatttttaatttaattttcgctttcattttttcacattttcaaaataaaagttcatcttgtgaaaaatcacatgctttttttcaaattagcatcttcatttttgacatttacacctacgtaagaaaaggattaacaccccgggcgcgatgcgcaaagtaattagtgcgatttgtcaataagcggcgcgacggcattcatctctttttttcaaatgttgtactctgtcttggcattctgtgctttaagcccctttttagggacccacgcgtttcggcgctcccgtttcggcgctcgcgtttcggcgctcccgtttcggcgctcgcgtttcggcgccagctcgtttttccacttaagcttttttctttggcatccaaatccaacaatcttggtatcattcgaaagctcttaacatgctctattagccttatcaaaaacgaaaagtttttcaagcctgtaaaaattttattaagaaaaaacttcaaaaatttcgacttttcgcaattttcaatgtataactgttttgataattgtctaatcgca

SEQ ID NO: 2707 - DNA, 1715 bp, Heterodera glycines
ttcgcaattttcaatgtataactgttttgataattgtctaatcgcaaagcaatagcttagaaaaagcttctaaatagattaagctttcgaacgacaccaacaatgttggatttggtttacaaagaaaaaagttatagccaaaaacatgctggcgccgaaacgggagcgccgaaacgcagtggacccccattttattatttgacatagatcaggttttttaaaaaaaggaaaattattgaaattcattttaactatttaataaaattgattgactaagaaaatggatgtatttttgggttaaattttgaaaaaaaaaacttaggaaattggtggccagccgatgagcgctgccggaaagatatctatctatccgagaaaacagagttagccgacatttgagtcgtgacgcttgaggcacagactattgcggcgctgatatttgcagcgcccacttttcaggcgcccacttttgcggcgcccagttataagcgacatttgcggcgccacacacgcggcgccgacatttgagtcgtgacgttaaggcgccgactattgcggcgccgacactcgcggtgccgacatttgagtcgtgacgcttgaggcgcagactattgcggcgccgacactcgcggtgccgacatttgagtcgtgacgcttgaggcacagactatgtattgcggcgcggctgggcggtaaaaaaacgcgtgatttttcggtgatgcaacatttgcggggatggtgccgcaaatttcggcacagatttaaaaagttctttttaatctgtttttatttgtttaaaactaattttcaatttttaattattaaaatacaaaaatagcgaaaaataaaattgttctttttgcagaatacaaaaacaaaaatttcttttgccattatggccaatccttcaaaaaatattgccatgctgcgcgaagcgcgctcctccccgtacattggcggcggcggaagcggcggcactttgccacctgacgcgctgcctgtttcaggcccgatgcacacgcgcctgcaacgcaatcgtcgaccggattcggccaccgcgccctacactgcacgactgcagaacgctgcaagcgctgaacattttgagcaggtgggggagaattgctaaatggttgggtgaacaatttggggagggggggggcaaatgatcaaccaaacttgaacaaatgatcaccccgaatgttgtaatttatcacccaaataaggcaactgatcacacacaggggacgattgaccaattaatctccaaaaaatggaggacaaatggccccaaatggaacaaatgagcacccgaagttgggcaacgggacacatgatcactccaaagtggtgtaattcatcacccaaacagtgcaaccgatcacccgcaagggataattgatcaatttttattgatcaagctcggagagttttattttcagttgaaggaactcatccagttcagcgctggctcgtcctcttcaacctctctgattgctgctggacgccattttggcactgaacaatccattgaaaattatggtaaacattttatttgaaaaatctttttaccgtatccctacaatactgtactctcccctcacaaaatttgagccccaacccctcctaaattagccacaatttcgagctcaggaactactttttccccggatcccgacagtaaccccattcccgaacccaatattcgggaacat

SEQ ID NO: 2708 - DNA, 2867 bp, Heterodera glycines
tggggggggggggggggtgacgggggcggggtccgaatcctagtattgaggaatcagtgtgtgttaccacaaaaaaaggaaggtcggattgtttgagggggacagccccctggaaaaccagggatttttttggtggaaatcgcaatgccaggcttaatccacatggcttagctggtatggaccagggatgtatcggcatgccgatttccgaatttagttggccgtcggaattattgccgaaatttttttgatggcgtcaggatgccgatgtctgattgctgaaaaattttctgggtcgtcggaattgcgatttccgaaattttttgagggcgtcgacacacatccctgttattaatgggaaacaaaaatctccttagtttctggcgcctattggcaaaatccaacacctagttcgcgggatttaaattaaaattatcgattattaattagatttccgagaaatttttgaattcctttctaattaaaaaaaatttccattttaaggattttattttttgaatttcttaaacaattcatagaaaaatgctgttctgtggagctgtcgccggcaaaagtgatgattccgccgtcgcgcttggcgcgtacaaaggtcgccggaaaaaaaatccccaaaaattttaaaatttaccgaaaattttttcaggaaatgcccaatatcatggacattgatgacaacgaatacatttcttgaaggactttgaattaatttattttgttggagcaattttttaggcggatcgttcgcggatttattgaggctcaacggacggacaaacgaaaaatccgttttttaaaataaaaataaaatttatttttttcaattatttatactagagtagagcgggaccgggaccaaaacacggacaactgagtacaactgagtaccgaggtcccggttttgaccgggacgggaccagtcccgggttttttcccggttttcccagccaaaaattcccggtttttcaccccgaaaaggtcccggtcccgggtttgcccaaaattcccggtcccgctctactctaatttatacacttacacatataacctatttttgtgttctatatttgtgtcacatcgtatgaataaatataaggcaaacaattttggataggtaatatttgggtacgctaacgtgaaaatcccgatatcccgattgaaaatccaggtcctctcgtttcggctttctgatcccggcaagtcccagtctcggttttttaagctgctcgttacaagcctatttttattatcctattaattattttcaaagaatttagctaagtttcttaccatggggttctattttttttctattttttaataatccatttttaagagaaatatttaaaaataaattaaaaatgtaatcatttgtttttgtgtaattcaataattgccaacctgctaatggtgtcatacaacactcggatatgcgtaaaatgtataatataggaagtaaaaaattgattaatattatcaattattattattattataaaaaagtagaaactgtcagaataaaaggcaactctcaaatacgactttgatcatcatttttttttgggttttatttctttttatttacaataaaaattctaaattaattttcaatctttctatttttcattgcattttttaaataataatacatacattttaaaaaagtcacgggaacaatattcgaaaattcattcatctttggttgctttttaaaaatatggcctcctatctgtaaaattgtcgagagtattttaaaatatatattttttgtcatttctttttagataaacaaaaaatgtatgccaattttccgggcacttgccgtgccgcttcatcatcattttcggcacaccgccttcgtctgctgctgattgtggtgatttttgttgtgctatcagtggtagctgatgttgcccatgcgatgggaagtatgttctcaaaaaatcaatccgacgtgatgatcggaagagatttatccgatgtggtgatcgggcacgctatgtggcaactttgtatgaaccaatgcggaaaacacaatgccaatttggctctgtgcgaagcgggcttcggctttattataaacaggaagatatgcagatgcaaaatactggaggaaaaatgcgttccattttcatttggtgaaccattgccggatgtaccagtggatgatgacgatgaatatatcaattgttttcgcaactcataaaaaggaattgtggttgttgcatttattattgctttatttagatagaaatatatatttgctatccgttcattaaaatgtagaataaaaaaaaaattaatttttatttttggatttagatttgtcaattttcatcaaatcacataccgtatttcctgaaatataactcccgggggttctatttttcaacccccctcaaaaggggggctataattcaaggtgggtactaattcagaggggggggggggggtatattacagaaatacggtatttcatttcatgtaattctataaaatcaaatcaagataacacatactatttttgaaacaattttgtgcttgcttgttaattctattgtagacaaaaattgtagccattgaatttacaacaaaaatcgaaaataattattttttcataatttttaaaatttactgtcaaaatcaaccattgtcgacagaagaaacactgtcgaaaactttaacaacactatttgttagcctaagttgactaagccccgccatcccttggttgaatttttagctttttatttttaaaaattctaaaaaaaatttctcccggaaattcgcgggacaatttacccaaattaccagaaaattcatttagtatttttatttgatgaagctct

SEQ ID NO: 2709 - DNA, 1021 bp, Heterodera glycines
cgacaacgccgggcggcacacgcggcccggccgtttccttttgtctggactttcgtccacaaagccatccgcgcatgtgcagttgtagccctgtaattttgcatgcgtgtgccgttgaatttaaaaaaaaaattgccatgtttctcgaaatttttttaaccccatgccgacttcgtccgtgtcctgacagttggcgttcggcgaacagtcgctcagcccctgcacgttacactcgttgacgcgcaacagacagcgccggcccggccgcttggccgagtccggcgacacgtccaaatggttgggcggacacgcgcacgtgtacgagtcctccgtgtcggtgcacagtgcgcccggaaaacagtcgttctggccggacgcacactcgtcgatcagccgcttgcagttgcggcccggccgattctttcggtccagcgacacgtcaaggaagttggccgcacagcgacacgtgtacgaatctgtaagacagttaagccattctcggatttctatgatcacttcgtcattcctgaatatatcccatcccttcccaaagcgcttcaattctccaatttttgtgttatttgaagccgattacagtcgagcaagatgctaatgtcgtccacaggcactcaccgggtgtgtcctcgcaaattccgccgtctcgcgcacagtcgtgcgacccctttacgcattcgttctccaacgatttgcacaaccggcccggctttatcgtgatgtttggcgaaatgtccaggaagccttggcgacaccggcacatgtagccttcgtcagtgtcggtgcaaatggcgcggtcgggcgaatcgcaatcgttcagtgtcgggttgtcgcactcggggatcactgacggcggaagggagaaggtggatattagcaggaccgttggtcactgatcggataaattgagacccatattccccgaatgatcaaaccaagaagggagattattggcaggaccgttggtcactgatcagataaatgagatccccatattccccaaaat

SEQ ID NO: 2710 - DNA, 2115 bp, Heterodera glycines
tcctcgcaaattgcgtccggcgagcagcgatgttggcccagcgcacattcgttgacctcggccacacagaggcgccccggcttgttcattgggtccggcgattggtccaaaaagccctgagggcatgcgcaaatgtaccttaattgacgcgtaatgaatgggcatcattttgcgagactctcgaaaaagtaaactctgatgcaaatactcacgattcatctgtgtcaatgcattttgctgatcggtcacaatcgttttctcgtttgtccaagcattcgttgcgcactaagaaatatgttttttagaaaaaaattcttttttttttgaaaaatttctaatttaaaaattaaaaaaaaatttaaagggaaaagtcgctgggtaaatgaagtgcatatcttatacatatgagcttagtttagctcaaatttgcaatgttgtgattgccaaaaaatcaaatccaaaaggcacgccacgcgtcgtacaaaacattgaaaacttacggcatatttccgtcgctgggtgccgcttctcgccatgcaagcattggcacgcgtggaactggccggtcgagtgcagcaaacacttctcacgcttgcgcacatcgcacggctgctcctccgctgggtcgcacgagccgggcaccgcgcatttgccggtccgcgggttcggcacagtgccggccgcacatggcgggaatttgccgccgttgccggcgctgttgttggtgccgccaccggcggtcgattgagtggacacgtggtgctgttggggtgccggtttctgattggtgccaccgctgacaaaagttgtgccaaagttggcattggtcgaggagttcgagaagttcgactgctgttgttgatgttgttggttttgtcgttgttggacactgctcaaacagatgcccagttggtggtcacggctgtgctgcgcggggcacacgcaacggaaattgcctgaaagattttattttttatttctggtatttttcaagattttacgcagcgggagaaaattgcatttttagcagatttaataatgtatctacaatatcaattttaatggttaaaattttgggagtgcattatgctttctcccttatcgtttctatcgtttctgcccaaccagaaagaaaattccaaaaaaaaagataacactttcagctattttttggaaaatttttttgaaatacttattgtttaataattcatgaaaaatttgaaaaatcactagaataggaatgtatttttttcaaattttcatataaaaattttcgaagattttttggaaaaacttctgtttgaaaattttaaagaaatcggggggaggggggggggggataagctgctcccaactccatttttttaatcaaattttcttaaaaaataaatattcatttcattagggaaaacaattgttctcccttctgaattgtttttgatcattcatcattaattaatttttttgatttgcccttttgggtgtgccatacggtaatcatcccaatacagtagtaacaaattgttacgctcgcgtactgaatggcgtcttggcgcacagttcgggatgcgggcatgaggttggcaattccgggttgcacaggtcgccgccgcagacgccggtctgcggatggcgtgcgaatgggcccggacagcggcaggtcggcttgccgttgaccaactcgcagtgctcgttacgcgtccggtcacagccgatctgcgactgcacggaacaaccgccgggcgaagggggcggacgcggcggctgcgggcaggtcagcttttggacaatggaacgcagtcgcatgtccaaatcctatgcgaatcagtgggattggatgtgtctcgcgacagtggcttagtggaaaagctgtccatggaacgggtggaggcgcgggttcgacccccacctgacgccaaacatctttcccatcgcttttgcttggatttggccacaaaaaattgccttgaagcggtccacgtagaaccagcgttgcgcggagtcggaaattgcctccagctcggatgccaacacgtgatcagtgactccgatcgagaacatgttgacgcgcatgtgccgcgccgccttaagcgtctcctgcacattgtcctgact

SEQ ID NO: 2711 - DNA, 2050 bp, Heterodera glycines
  unsure (1)..(2050): unsure at all n locations
gatggcggcacccgtcctaatttatagacagggagagataattttggcacgggattttntaggtcggaggggagatttaggcataagacattctgaaacgagatttttgaataaaaaaattctctcgntattatgactcgggaatttccgatttttttagtcccgacccccaacctcaatacaggagctctcgtcctgcgtaaagttcggataccatttcgaactccctgatctattcctgtcctatactctgggattttgggtcaatcctactgatctgggcctaatcaatcgattgcctttaatctgtataaagagtttctgtagacaccgccttcttccgctacctggtcaatccggtcaagtactgtgtttgcgcgatggcctgcagcagtgacggtttgtccacgtactggttgaggtcaaattcgtgccggatttggtccgagtattggatcagcccaacgcgggtgttctccagaccgatatcgaacagttccacaaagtcgcgcacaaatcgaaggacctatttttgctcggtatttgctctattctcgcattatatttgaccagtggcacctaagtttagtttttctgatcagtagtaattaattagtcattattcgatcaatgccaataaattttcacataaattatgttcgacgtttcattcttttatccactttgtgacaaaattatgggtaaaaaatgatcagacaaattgctccgatcagttataaatatagctgatcaaatgaatcccatgaaacggacctcgttgcggaacacggccgacccaatggagccggatccgtcgatgaggaacatcaggtcagtcttctgtttggggcacgtggtcacaaccgtacacactcggcccggcggcaaattggcgctggaggacacgtccacgtagccggggatgcatttgcagctgtagccggccggcgtgtccacacagtcggcattctcatcgcacgtattcagcgaccgatcagtgcattcgttgctcgctgattggggggatgtggacacgtgccaactccgagacggccatcccagcccatttaattatatggttaagcccattttggccacacccatccgaatgccatttttttatttatggcggtggtgattggaagttatggctttccattaccaaaagcgtcaattaaacttttttttaaattaccgtttgaacattttctgcccggcagcaattcgtactgcgacgacgaatcgacaaagccatcacgacaaacacacgcgtagccatcctgtggaaaatacataccggatgtaattgcccgtaatcagattttgccaatttgtccaatcacttgccaaaatgcgaatgccaatgtctgtctgtttgatcgcttaccgttgcatcaacacattcggcaaatggcgaacagtcgtgcgaatcggttgcgcattcgttgatcactgcaaattttagtaaaatatgtaataattcatcaagaatttcaacgatcattaaaaacgcacattctttgcacgctcggccaggctttgtctccgggtcgggcgacatgtcccaatagccgggtttgcattggcaccggaacgagtcgaacacgttgacgcaaatggcatctgacaaatttaaggtgattagtaaaataggtgcctatttaatcgggtgcttatatccccccccccccccccaaagaattctttttaaaattttctaactaaatttaatcatagaaaatatttataattttttttaggaattatttcaagatttgtgatgaaatactaagtcttttctaaaaaatcttttcaaaaattgctgaatcaacaaaattattttttttaattcttataatttttaacattccaagtttgaaaacttaaaaaaaaatcgttggctggaacgaactgctcccatttaaatcgatcttgtccgatcagtagctgagggtcataggcctcagaataataatagttcactggtctaattggtcaatcaataccaacaattaatgaatctttagttaattagtgtttgctacagtgt

SEQ ID NO: 2712 - DNA, 3794 bp, Heterodera glycines
ttgtcgcattcgcgctgacgcatgccgtcgccaggcgacaggtgccgtccgtgtacaggaattggccctcgggacatgcgcacacgaaagtgcccggttgcattcggtcggtgcactgtaagccgcctttgcacgccgacgctttcagtttggggtcgcacgtgtcgtgcgcgaactcgaaggcggacgacgcgctgccgcccgacaaattgcgatcggatttgatgcacacgcggcctgggtactgaaaatgccaaccccaagttttgagtctatgatggtttttggcaaaatgccaaattttgtgcttgcttttgcagtcaatttggaaaccgagagaatggtcatattttgggttgtatatatttaattttggttcgggttcgaacttcgactctctgactgttctcgatggcaaaacgtcaatcctcgagttccggactaagaatcttcgacttacgaggtttcggtttcgggatgaccccaatttctcggctcctcataatgggtaaatgtcggagtctcaaaaaaacgagctcgacattgttgcttttcatttctaatttttggcttcattctcataaaaaatcttagtcgattactcacttttccggcattttccgaagcatccaagaagccggcccggcatttacacgtatacccctccttggagtcctcgcactgcgcattatcggaacagtcattcaacttccggtccagacactcattgaccgcctccacacagcgacggcccggcaatttgttgaactgctcggaaatgtcggcaaagccgggccgacaacggcacgagaaggactcctccgtgtcaatgcaaatcttgggaatcattaaacagatcagttcgagaaactaatttatcaatgccatttttaaaaactccgatcaagtccaaaatccgacagattaaatcaacaaattgataatattggccaaacaattggatttccaaaattttaccctcaaaagataatcaaatttcatgttcaaaataatttttgaacacttaccgcattcgcgtcacagtccacgtcaaaagcctgaggttgagcacattcgttgatgcgttgtcggcacaatgtgcccggtttgccctgcggcgagatgtcggcgaagccgcttttgcacttgcatgtgtatgcttcggccttaattggacaaaaatagttgtaaagtgatcaaaagtaattagtgtcctaagctaagaccaatccatgatcagcagttgataatttgaaaaatcgaattttatatacatagccaaatcaattttaaatggaccgaaatctgaacagatcagcagttattttattagttcatttttaatcaaattttgatggttctagtacagatcattgagtcatttcctatgatttattgccaatttgctcatcagtcaattaatgattgaattttccgattagccccccccccccaatgggtgagcattttcagtgtgtgtgccgttgctgatcacctgatcaatgcattccgcgtcctctgaacactcgttgagtcgtgcgtcttcacattcgttgatggccaagcagcgtccgtccggcaggcgcccgtagcccatgggacatgagcagtgataagagccgctgatgaacaaacacgccttgatttgataaagcatttttggcaaaccaaacaatcaaaatcccctaactgaagtcacgcttactaaatcatccgatcattgaaaatcttttttataatctgctgaatacactttaatccttttttatgcttttggtcatctaagtgtccaaactctgggttttaccatcctgatcattttaaatcatccactagtaattgttgatcaatcaatcattctttcccatttaaagtcatgctaatcatttcatcacttttccattatttatcattcatgccatttctgcacactgtttatcacctcgtgttttcccttgtcacaactcatcgggtcgttcacgtcgcattccggcgagtcgggcacttccgctgaattaaattatgaaactaaatttctccataatcttgccgctgtttaattagcgcctaattacttcgagtgcacacccttcccggcttctcccggcttggactgtcgtcgcgaaagcctctgaacagaaaatagtggggataaaacctgatcatttgttaattgggcgattttaaacataagcaattcaaattattggcctcaaattctcgaaaagcttaaattttactctttgcagcgacatgtgaatgcgtcagcggtgtcaatgcaattggcgtcccgtgaacaatcgctaaattcaaatacataattatcaaccgaatagaaaaataacgtaaatttggactaattttcgaattaaataatttaatcaattgtgccatgccgacaggcggattattattttttctttcggtgggggatatgctctccccgcgccccttggatacggtcctgggtcgatcagttacttcgatcaaaatcttaaatgggataaactgactgttttccggcattgcattcgttttgaattaatcggcacactttgcccgggcccttcccgtgttgtgccgaaacatccaagaaaccggccaaacaccgacacactgggccctgcggcccttcgttgcattccgcctccggcgcacagttcgcatttcggcactgctcaccttagtggagttgagacggtgatgatgtgataagcagcaaagcatggatcggtatggaaacaagctttcatcaatccaattacaatctttgtttagaaattgaataattgttgaaaatcccataaaatttttcaatttttcaaaagattgaattaaaaaattgtaaaaaaaaaatcaaattttgtttaattttgtccttttggaccataatgactagggattggatttttaggcaaatgcctaaatttttgtgtgcaaatgtaacggtgagaaaagcataaaaaaataacacacttaatttgaggctttaggatcaattttacaatgcctaattgcctataaaatcctttaaaaatgcattaaataacgaaaaatacacccctaagaaatgacccgaaagtttcagaaaatacacccttaagaattgaaaaattccaaccaaaaattcattcctaaaataaattttttttttactgataaaaatttttgttttaaaaattgtccttatttgaaaaaaactttaaatatttaataatttgatgttcaaattaaattataacgaaagtaaagttttatattttttgctacctaaaaatttaaattaaaaaaatcttatttgcttattttagtgtctattcgtaggttttaatgcctattttgcaattttttgtgcctaaaaatcccatcactaataaatgatatttgtgctacagaaccttaaatttactgtataactgaatttggtgttcccgattttcaatcattaatttcttttgatcatttcgatcacccccccccgcagcggccccgtaagtgtgcagcattcattagaggcaattaatttcacaaaattggggcgacagttgggctaggcgctaaatagctaagtgcaggtcgaacaaggctatgacgtagtaacccagcgctaatctagggaagctatagccatacatttttatggcatttttgcgtgggcaaaacggattttatatatgaaaattatgaatttttccaaatttgatttgggcacaggggttaaacggaaatgaaaaaaataaatagcggatttttcgataaaacaaatttttctggggcattttgaccataatcaa

SEQ ID NO: 2713 - DNA, 1309 bp, Heterodera glycines
cccccccccccccctccgcccccatacatacttcgtcggcaacttcggcccgggaaatttgcctgaattcacataaccaattagtgattagtgaaattcttctgatcaaaatcaatgggctctaatcaatcactttgtcctcactgacgtccgtccatccggatttgcaccggcaggtgaacccttccgcggtgtccacacattccgcgttcgcgtcacaattgtgccgccccagcgcgcactcattttcttctgtgccggagagagaatttgtattatttttaaatttttaaattggaagggtcagtttttaaatttaatgaaaatttaaacgaatgaaacaataattattatttcaaaaatgatcatatgtaatggtgcgaaaagataatttatcatgagatgagtttatattcgagagcgagaatttgcaacaattcaaattatggcagcgaccccaaacaattctatgttgatttttgtagacttttaaactttaaataaaaaggaaagggtccattcaggatgaaaaataaaataattgttaaagaaaggagttactattattcaatgaaagaattttaagaaattcttacgatttataaaaccaacaaaatcgaatattataaaactcggtctttatttaaacttttaattaatgaattcattttttcttcataaacatttaaagaagagttaaaaatgattaaagccaaaatttaaaaaattgtcttaaataatttaaagcggaaaaagtttaaaagatattttaatgtaattttaattcttattttaaaatgtattaagcaaagcttcagaaaattccaataaaaaattattccatatatttttagtcacggaattaattttgaataaaaaaaattaaaaatgtttaatcaataaaagaatttaaaaaatcgaagcatcgttttggttgagcccgatttttaaaaatcatgaaaatttgttaaaattcggaaagaaaaaaattatttattaaattaatatgtaattttatttccacaattcattctcgagccgaaacaaacgaaaaagacacccgaaaggccccacttttctcgtacatttttatctcttatgcttcaattgttcaccccactcttctttgacctcatgctgatgaattaaattagcagtgatcatttgtccatttgtccgtcgtcgcccatttggtcaattccatgcccatttgttcaattccatgcccatttggtcaattccatgcccatttgttcaattccatgcccatttgttcaattccatgcccatttgttcaattccatgccca

SEQ ID NO: 2714 - DNA, 1839 bp, Heterodera glycines
aatcaacagtttttatatatttttttattttgttctcaataatttagaataatctggctttaagagaccaagacccaaaaacttgagactttttcaaaaaattttcttattctctaaaaatcgcttaaaaatcgcttaaaaagaacctattttagtcttttttatgattttttcaattaggaacattatcaatccaaaaatacacaaaacaaaatatttgtaaattttttctcttcgtaaattgaatttttcactgcagcattggtgcgactgtttgcttttattagaattttctacatatcttcaaataaaaaagttattactggggccgtgattttagtgaaaaaatatatttttttgctcaattgattaaagaaaggagttcaaaaaacgcatttctgcattaaaaattttcgattctgatgacatttttcgtcactagaaatcattattttggcgtttcttcactaaaatagtgaaaattcactttttttgacattttggcactatttttacactatttcaatttttttttttggaaaaaatttctcaataaaaatgcagtaaaaacgaaaaaaacacccctaattatcacttaagaaatttcagaaaaattcacccataaaaaactacacaaaaatttacaaaaaaaaaacacttctaagaaatgaaaaattttctcaaaaattcattttcttggcaagaatttttaattttaaaattatttttacgtacctttttggggtttttttcccttaaaaatcctagtctactcatttgcaactgcaattagggaatgaaaattatttttgatcaatttttgggcactttttgccactattttgtcattattttggcatttttactcactattttagttaattatttcgatatttttagttactaaaagcgcagccctaagaagtcggacacgcttcaccgaaaaatcgcatccccgcataaattttcttaaaatttaaaataaagaatatcaattttttaagattctgtggaagatggttcagcagttaaaacaggcgaggtttgagaaaatactggttttaatgagatttgataattgattacaaataaccttttgaaaaataggaaaataaatgaataaataaatgaaattcatagaatggtaaaatttgatcataaatttaaaatgagtgaataaaattgaattaaaaaaacaacacagcaaaacattattcattgaaaaatccggtcgcggcagcaatgagcacgcctaaaaaaatggaagaaaatgaaaaaaatgtttttcaattcatcaaatgctaaatgatttttatttttacccacccaaaacgactccaatcatttgaaccaaaagcacaaaaaatgctttattgccggacactttcatctgttcttttactttaacactcatttccggcaacatgctgacctaagaagagggggaggggaaaaatttaaaatgaattttattgtttaatgaacaagagactaaaacatttttataatcatgaattccggcctcaaaaatcccttggaatttgcgcttttttttgtctatataagcaaaaaatcatttaaacttcaagaaatagcacaataaaattcccgcttaaattgcggaatggtgaacttttagttttaaaattaattttaagaatttacagcagcagccataagtcttaagaaataataaaaaaaacaaacataccgaggggatgtaaatgaacctgaaaaagaaagcgggaaagtaaaaatagtaaaaaaacgtttttttatgggtgccagcatttggggtggaattgttcaaaattattatttcagaactcacattccgct

SEQ ID NO: 2715 - DNA, 3435 bp, Heterodera glycines
  unsure (1)..(3435): unsure at all n locations
ttattttaatgggaaaacggtaaattcataatcataaactcttcaatattttaacaaaagaaaaaatcgatcgcttccaaaaccaatcaatcgccgtcaccgttgttgtcttcctcgtctctcttggcacgatatgacgttttgtatatcaaatctgtaaagttaaaatattaagaataaataaggatagagctaagggtacttatgtttttgttttgacaaaacccaattatactaaataataagtaagaataggaattatatgtaaaaaaatcatgaagttgaaaagctgattttttcagatgacttgaaactttgcaggaaagcatttaatatgtataagggctaacaatctaagaatttaatattcaaaatttttaacaatgaataattaaaaagaaagagtctcttttacaattttgcaggagattagcttatgctaacgattttccttgaaaattttagttaattctgacaacaacgaaatgaataaaaaaatcagattttttactaacaataagtgctttttatttacatataattttcccacgaaaataataagtctcaatcacaattaaagacatcgctgtccattttaagtacaaaaacctcaaattaggttgtttttaaagtgttatttaatgttttattttacaaaaaatagtcatttcattttttatggggatgggatttttgtgaatttgtaaaagttggatttacaagcgcaatgttttatttatgtttttgtttactanattctaaaatttgaagaatgaaaaaaaaatctgaaatatgcactgaaaatgatgttataaaatctcttggaaaaattctgacataacgcaccattttttgctgcggcggtactggtcgacggctgcattgggtccaagtcaatgttttcattgtgctgctgcgaacgcccatggcggatctgacatatttttaacattaaaaataaaagagaaaatatagaaatatttaaataaatatttgaatttagggacaggaacggaactaaataaactcatttagggttttcagagtcgagaaaaccatccatattgtgccaattcgaaccatgaacccggagccgaacaaagtcaaaaacatttttttgtttaccaaaatccaaatttattgcacataatcgctttaattttttaaacaattgactatggcatgaagggaataatcagtcacattgtattaagcattttagcgattttggtaaaaatgtgaattttggtgaaaaatgaattctcgacttttgaaatttgtacaaaaaatctggggtagatgacagacaagtaccaaaattttttaaggaaaaaattgaatttccaaattatataatttaattattgttctcagtgaaaatcttaataatcaacttcaatttaaatagtttttattgaatggactaaaaatttttgttcaaaaaataagtccgtaacaaattttcaccactgccgataaaaatggtaatttaggataaaatttttgctgaaaatttttcaattcaacatttccttggttatttttccagctttttaaactgttttacaaaaagaaaaatttttttttaaacttagagtaatcagcttttgatgaataacttggaaaatttgcttttacatttttactaatcaacttgtaataataaagtatcatgatttctataaaaaattaaaaaacttaagcactttttaaaaattttatttttgtttttaaggccacaaaatgtgcggattgcgatcaaagatacattttgtaaaatgattgattttgtctatgatttttcatcaagtccatgtgttaatatgaattttgaaaaaaaaaattggattttcctattactaacccaaaaaaaaatcaaacttgtaaaaaatttacaaaaatcaatgatatttaaaatgctaaccagctaaaataaatattaaaaatgtcgttttcccatttatttaaatcacctcttcatctgctgctggcttttcttcttcaacattttcaaagcgctgtgcaggcggttcaggttcttcgttttcgtcatcaaccttaaaatcacagcacatttgactagggtccaaaagtctatcattttttgatagcgtggaaaaaaaaattatgtcgttttactgactgaattaaaaaaaacaaagaaaatattaaaatttaaaaattgttttatttttaaatattccaaaatgcaaaaaaaaacagaaataacaacttagtggtggtctttaatgcattttaagaaaatatggaatttgttatccagaaacggggacgtccaaaaaggaattggtcgattatatttgccagaattaatgcccctcatatttttaatttactcaatgtaagcatgttattagactgacctcaggcatgcgccaaactgccagtgcgaaggcccaagctgctcctgcagcaattgccaaaattttaacggcatttccagtcgttgatgaagaagattttcgcttttcttcttcatcttcaaaacaatcgtccattttggcggcactcggagcgacattccactcaggcgctgtaaaattaaaaaatttttaactcaagtcttttaacaaaaattaattgtctttcctcttatttagagcatgaaaaatgtgggtaaaatttttttttttttttttgcgttttttttacctattttgaaattttttttgtcgttttaacccattaccggctgtttttgttgatgttgttggttgtggtgcctgcaacggttgaattggccgcgcaaaaacttaaaagcaaaaaattttctggagtaaaaattttccataacatttgtttacagccccccccccctttttcggtttttaccaaaaaaaggtggatgtggcggcaatgatgataaaagcccgaaggaaaaacattttcaaataaaaaattgggcttttaaaatgcttaaaaaagcaatgacaatttttacataaattgaaatggggcgaaaatggtaaaaagggatataaattgacttttttcaatgaaaataaattataagcgatgtaaatagcatattcagcatttataattacaaaagcatttaatttatttttgaataaatactaaaaagtttttcttatagaaaattccattttcgatttgtttttacattttatgtcaatattaaaaagaaatttttatttgttttttctccaaaaattttaaagaaattttgatacttttttgcaaattttcgaaaagctttcaagaggtcggtatttatgggtgcatttttaattgcattttgctaagaaattatataaaaatgcgaaaatagggattcgaagatttaaaaggagcgataagacgaagattttcgcgcatttctacttgaacgaaggcaggtggtggaaacagaaacataatgcatggggggaagtgcttttgtgacgtaatttg

SEQ ID NO: 2716 - DNA, 6481 bp, Heterodera glycines
atggtttcagattaattttattattttaactcattttattacaaaaagcgaattttttaaatcttgaatttttgttcgaattcaggtctggggttagaaataggacaaaataaatgccatattcgtgatcagcgaccacaaaaactcttagaagtatgttttcaaagtttttaaaagaaaaaattttctataaaaaaagggggtaccatcggtaatataaccataatattgattgggaatgcaaatagctcaacaaaattatccggttttcatgcaaataatattttaaaaattcattgaaaaaactcacagcttcctcctgttgttcgtccatctcattgcctgctgtttcttcgtcgtttttgcgcattttgagcgcaattttgatggcattggcagaaaaaaaggacacgtaaatggtggcgatgacgaaaagcgacagaccaaaattgggattgcaaatggaaaatgcctaaaaaggaaggcaaatgcattaatccatttacgtacataaaaagccaaattatttcaaaatttagagccataatttaaaggaaatttccccactcgggatgattctctcagggactcgattgatgtgactcataccttcctcgctcatctcttttcttgacttccaattcccgacttagcattaaccacttaattaattattctctccatttataaaattagtacaatttacagtagttttttctaagcttttttcatttatgaattccctctgttggtaagaagcacatccaaaaaggcaaaattcgttaggaaatttttagatttttttaaattaccaccccacccctccctccacaaagggtaggaaaatgatgccacacttttggcagcagatggaaggtggcggagccagacaaagaaccaagtgcaaaactgaacatgaagtcggagaaccgatggcgcaaacacttcttcagagcggaaataagcagtgcgagcactgaaaatgtttagaatacatagaaagactaatgatcggggcagtcaaaaatatgcacgaaaaatggccaaaatatgcatataaatatgcaaataaagtcgtgaaatatgcaccaaatatgcagaaagcgtgaaattaggggtgcaaattaataaaaaaaaaaattatccctataaattttatatgctgtttttgcaatgcaagtttaaaattctcaaggttttcggcagtaaagctcgctgttgacccactcgcgcacccattcaaatttgaatttagtttttggcataagctaattttttttgctaagggatttccaaatcggaaaatatttaatgaaaaatggcaaaatatgcaaaaaaattttaaatattataaaaaatgacaaatatgcatgaatagggattccatttttatgtaagaaaaatcgcgaaatatgtaaataaaatgtataaaaaattctaaaaatatgtacaaaaatccccaaatatgtactataatatgtaaataaaatttttttaatgattattttttggaaaaaaattcttggtagtgttaaataggcacaaaatgccataaaaatgatcaaaataggcttagaatcacattttttatatcaaaaattaatcactgagaagcaattttaaaaaacaatgacaactcaccagtgcttgtcagcgcaatgacatattggccgaacggaattggtggcacccaattgtccgttgtctcctgcagaacaataactggcacacttgtgccctcatcgtttgcggcaacaatgcgaaattcgtacatggttgtggtgcctgcaacggttgaattggccgcgcaaaaacttaaaagcaaaaaattttctggagtaaaaatttttccataacatttgtttacagccccccccccctttttcggtttttaccaaaaaaaggtggatgtggcggcaatgatgataaaagcccgaaggaaaaacattttcaaataaaaaattgggcttttaaaatgcttaaaaaagcaatgacaatttttacataaattgaaatggggcgaaaatggtaaaaagggatataaattgacttttttcaatgaaaataaattataagcgatgtaaatagcatattcagcatttataattacaaaagcatttaatttatttttgaataaatactaaaaagtttttcttatagaaaattccattttcgatttgtttttacattttatgtcaatattaaaaagaaatttttatttgttttttctccaaaaattttaaagaaattttgatacttttttccaaattttcgaaaagctttcaagaggtcggtatttatgggtgcatttttaattgcattttggtaagaaatatataaaaatgcgaaaatagggattcgaagatttaaaaggggcgataagacgaagattttcgcgcatttctacttgaacgaaggcaggtggtggaaacagaaacagaatgaatggggggaagtgcttttgtgagggaatttgtcggtatttatgcgcctttctctgcacttgcacagcagcagtacagtatgatgctcattttgaatggcgcgaaatttgaattacggaatgaagagcccattccagacaaattagcactcttaacaaagctcgaacttaacgattaattttatatgtaaacacagacatttgcatattttacgaccactttaattgataaaattttattaaataaaatactaactattttactgtaaattattgaatattttcaactttgaccaataaatatcttttgaattagctaaaaaaattttggaagttggcgactaaattagttttttgccaatattttggcgtttcgccactattcttgacttttcttgctcaattttgctaagaaatattgaaagaaaatgtacctcatttgcactgctgtaagtgaataaaaattatttttgataatttttgctgaaaattatgtcactattttggaattttattttgccactaaaaatccgtgccttagtgattagaagtgaggaatgatctgatctgttatgtaaaagacttgatcaggatattaagttatattaaaaaaaaattttggggttcaggtatgacttttttaaggcaacccacagccgaattttggtttttaatggttaaattcacatttccaagttaattatgttattaaatagaaaccagtttatgaattctgtgccaaatttgtgttttaactttttcttttaagactatggaaaacaatgaaaacattaataatagaatatttttatttaaaaaaataaatcaacagtttttaatatatttttttattttgttcttaaaaatttagaataatctggctttaagagaccaagacccaaaaacatgagactttttcaaaaaattttcttattctctaaaaatcgcttaaaaatcgcttaaaaagaacctattttagtcttttttatgattttttcaattaggaacattatcaatccaaaaatacacaaaacaaaatatttgtaaattttttctcttcgtaaattgaatttttcactgcagcattggtgcgactgtttgcttttattagaattttctacatatcttcaaataaaaaagttattactggggccgtgattttagtgaaaaaatatatttttttgctcaattgattaaagaaaggagttcaaaaaacgcatttctgcattaaaaattttcgattctgatgacatttttcgtcactagaaatcattattttggcgcttcttcactaaaatagtgaaaattcactttgacattttgtcactatttttacactatttcaatttttttttttggaaaaaatttctcaataaaaatgcagtaaaaacgaaaaaaacacccaacttcaattatggaatgaaaattatttttgatcaatttttggacactttttgccactattttgtcattattttggcatttttactcactattttagttaaatacgcataaattttcttaaaataaagaatatcaattttttaagattctgtggaagatggttcagcagttaaaacaggcgaggtttgagaaaatacttgttttaatgagatttgataattgattacaaataaccttttgaaaaataggaaaataaatgaataaataataaatgaaattcatacaatggtaaaatttgatcaaaatttaaaatgagtgaataaaattgaattaaaaaaacaacacagcaaaacattattcattgaaaaatccggtcgcggcagcaatgagcacgcctaaaaaaatggaagaaaatgaaaaaaatgtttttcaattcatcaaatgctaaatgatttttatttttacccacccaaaacgactccaatcatttgaaccaaaagcacaaaaaatgctttattgccggacactttcatctgttcttttactttaacactcatttccggcaacatgctgacctaagaagagggggaggggaaaaatttaaaatgaattttattgtttaatgaacaagagactaaaacatttttataatcatgaattccggcctcaaaaatcccttggaatttgcgcttttttttgtctatataagcaaaaaatcatttaaacttcaagaaatagcacaataaaattcccgcttaaattgcggaatggtgaacttttagttttaaaattaattttaagaatttcacccagcagcccaaagtcttaagaaataatttaaaaaaacaaacataccgcggagatgtaaatgaacctgaaaaagaaagtgggaaagtaaaaatagtaaaaaaacgttttttatgggtgccagcatttggggtggaattgttcaaaattattatttcagaactcacattccgcttcccaacgcatagccgtacttgaccaccgtgtcataaagcagcaggtcaatgagcagcccgcttgaaaacccaatggcacacgtcagggcactaaccaaatgaagcaccaagttcatcttcattgactttccagggcgcactataaggaaaagagtgacaaattaatcgttatttatgaattactcatcacattccttctttgccccgttatttaatattttaaaaaaacattgaatttttcattcagaaaaaccttgcataagaaggtgatcaaattattttttatcatttttcaaaaatcacatggaataaaatgttgcaattaacagtttttttcatcatttttttggcaatttatcaaaattcttaactttaattgggtatttttttgcttacaatttttagcgtttttggaaatgtatttttgagcattattttatgtttattggcactataaattagtattttcgctactcacattttttggatcgcttgcacagcaacgccaccgaaatgctcaggcaggaaagcggtgccctcgccgatgagccgatcaggaatccatcaaacacgttgtggaaaatggtcaaaagctgaaattgaacaaagataatattagaaatcaaaatgaagtggccaaaaatttatatgtttgtgtttttacagtcgttttgatcgtcgaattgtgctcagtttgtccggtacggtcgcgctcatcaaactcaggacgctaaacaagcaataaataattaacaaaaaaaatggcattttcttttctgttgcgtaacacctgctgctgcgggtgttgcgtgttgctgaccaaaccaccaagccacgtcaaaacatctgtcaaaagttgtggaataaaaataaaaatgataattcttttatttgaaaaattattaatatttttaaaattttaatttttgccattgttatttttgttcttttccaaaatagttgtaaaaaaatgaaaggaaattgaaattattagatttctcaaaaattgtatgtgtatgtgttaaacaaaagaaaatcatctttttgagtttgcaaaatttattttattttataatgaaataaattatttctcaaaaacttactgttccaaattcgacggattatgctcaaattattttcggctggcaaagggatggtgggcgcgccgtgctaaattgtgggcaccatttttaaatgcgcaaaaaaattagtcataataaaacataaatcgcataaaattaaatcaattatttttcataattccaatggcccatttccgttagaataattgctaaatgactgaattaaaatacaattttttatttttttgggtgcggttgtattcaggggaaaacacatacaattttggcaatactaccgatgatgccctcccccttttggcagaaatttttacaaagcattgaaaacatgcttctaaaggtttttggggtcgctgatcacgaatatgtgatttatttcggcttatttcgaatcaccggatctgaattggaacaaaaattcgaaaacccaatattttcaaaactcacttttatgctcaaagctctattcataatgaatattttttggtctttcaatggtttcagattaattttattattttacctcattttagaacaaaaagcgaattttt

SEQ ID NO: 2717 - DNA, 3225 bp, Heterodera glycines
  unsure (1)..(3225): unsure at all n locations
atttgttgatccagcaacattantgatggttgttcttctggcaaagaaaaggacagcaaattatgcataaaagttgaaaatagatcaaaacgggtagagggggggggggaggggattgggatcacttccatttattttgccacatgcagtggtttcccttcatctgcagtgaatgtgaaccggggttggtatgctaccatcccggtaactaccgtaaacccatcctctgtttacattccagtattaacaacctaaccgagtttttgagggagggcaagactgaaacgacatgtccaaccgagactacagaaacgaccagcagcacaatcatctgtcctccgcctccaccaacgacaattcacagcattctactgttgttcatcacttctctgcttcttttggtctttttcgcgcaggtccaccccccccccccctcccccgtctaatcattaattattttttaaattttttttttcaatttacaggctttcaaaatgggcattgtggcgcggcgtctgctcaaaaaccgggccattcaaaagcagttggaccgtcgacaaaaaagtcggttgaattatgtggaaaaatttaaaaagataatatttttttttaaagatatgaaaacgcttcgccgtcaacaggcggcagctggtcggtcgcccattgttgtgcattcggcgggcattggtttgccaaggaccgagccggttcatcaagtaaaaagttttacacattcttttttgtttattgaaaacactttttttttttagcgccaggaaatctgcacagtgcccgcccatgaagtcatctacgacgtgccttttgatgggcaaagagaggaagaagacgaggactcattctgatggccttttgaatttaatcccataatcatttaactcatttttcatttgccttttaaatttaactcaataatcatttaactttttttcatttggcttttaattacatacttatatggaaaataaaaaggataataaggagaggtttaaaataacgatttattttattgtacacagactatggtaacaaattaggcgaaatgttaggcttggattttacaaaaatttgaattcgtcatgcatatttaattaggaggaatatttgatcatacaaattaggacagatgttaggaccaatatttgaattcgttgtccaattattgcatatttaattcgtatgaatattaaatcatacgaattaggtcaaattcgcggcttggatttgccaaaatttaaattcagcgaccgatttgtacatatttaattatcaaatgcgtggcttgggttgatctaaatttgaattcgtcgtccgatcggtgcatagataattagggaatttttaattttgcatatacatcaaaattttgtcggtattaagtaaagcaaaaattcaaatttaccgacaacactaaacaattaaaatgggtcaagaattgtgattaattagattttttggatataaaaggcagtacgaaggttttccgttcataaaccaaattcataattcccttcaaatattgtttttatgcaaaaataaaatatattttaaattgactcatttgccccccccccaccctgctcttttcgtttcttaaaatttttcacatttactgtttacattttaccatattgcattattccaataaatttaaaaataaaattttgtttagcatttatccatatacatttatttattccaaattttaaaaatgtctacatcggaatcaaaaaatggtaaaaatctcaattcctcccttaacattaacaatctttcacctacagcaccggacgaaggcgactgcgaaatgcccgatgaacgtgttctacacctcgagtgctttgagagcggtgattatgatgtaaataattgttgaaaattccatttgtttccctcaattttaatcatttcagatgatggaattgtacggactggaccgtgctaaagaaatgctgatcgacttgcgcgactatgcagaggcgcacggaatggcatgtaaacatgtgaagatgctgttgtacaaactggacaaaggactgatcaaatggaagggaaccaagccatgaaatggatgatgagtgatcagatattttggtgacaggacgaaggggggatgattgaactcattggtgatggatgtgatttaaaaaaaaataaataaaatttgagaagaaatatttggaaaggaaataattgttacttcccctgatcggtcacacggggttcatttatgagcgcccatctcgccaaaattatcgttataaaatgggcgtggcacctggcccgacttttttgcgtataaatacgggctcaccgggtggcatttttcatttggcgtcccttttcaaattcacaattcctatggcgatcaacatctccgacaaaaaatcgttgtgcaaccaaatcctcggccaaacggacctcaccgtgacctcgagtggtataaccatcagcggtccccgcctctcgacaccccgtttcattccttttgatgaagcgggtcgttgtaggtgttgtaagggaacggagtccgaaattgacactgtgatcacgaaagaaggcatcacgctttggtgcacccgcatagagaagacccaattcattccattcgatgttgtgtatgatttgccagggcattgttttttccgtctgaaaaataagtctcgtgtgttcaacataccctatggcgacataccctcttctgacacgcacaccactaaacgacggacacacaccaatgaccatcagcatgaactgaagcgcaaagcaaaggtagctcttgacttagtggaggccggactaatggcagatgccatgcaggacggcgcacgttggaagaaggcgaaaacagcaatcaatgtgctcggcaacctccttttggcggaatcgctggacaacacttccgctaatgacactccgctgaaaaatgataccgtagacatcaaaaaagaagaagcaaatgtggaggaagaaaaggtgcaggaagagcccaaagaaaaagaggaaaacaaggaggaccttggagacattgacaaaacgctcgatgagttcttcaacagtattaaagcatccacttcaaacatgtagaccatcattgtgtngtaaaaatgttaaacacccaagcattcaacgataaagacattggctttaattaccatttggtcaaattatttcgggcccatcgtcgtcgggaaaactcaatttctg

SEQ ID NO: 2718 - DNA, 3172 bp, Heterodera glycines
cttgcctatagctgccctacaatgctcaacgtgaaattgagcagatggacactgctcagcagaggattgccatcagaagaaaattaaaaaaggacgaagcatatgatgatgattcggaacacaaaaaatacagggttcattacccaccttcacctccccggcttccgctcccgcctcgtgcgaaagcaaaaattgaaccaccaccatcgcgtcctaccgccaagagagagcctaaacaacaaaagccaacaaagtttgaactaaaaccatcaaaatttgactccgatttacgaccaaaagtcgcaccgccgcctcggccgaaaaaagaacctgaattcccgcttgaccctcggccatccacatccaggcaggctggacacttgcctcccccagcacccaaaattataccaaaacctgaaccgacaaagaggcctgtaccataccgtatcccgaaaagagagccaaaaatagttgaacaacagccacagccgctgcaacaaccccttcctgcttctgccgtcgaagaagaaatgcccaccgttcctccgcctaggcgggggaccaaacgccactaccccgtaaatggtgagaatgatggtgaggtgcgcattagaaaacgcgtgaggcaagcgcgaagggtgagagtacagtactcgcccgaactgggcccatcaacttctgcacaaagtgatgaacaacagcaacaacaacaacgtgaactgtttgccattccatcaaatcagctgaccatgactcagcgggtggaacgactgtacatcaaatgcaaccgttacgctgatcgtatgggcgttcgaggaaatacaattaacacagcaaacggcaaaccgttggcgcatagcaatttgcgaatggccctcaagtatataatagaccggagagcgggccgccccaccattaagccacctggagcggccatattggaagagaggcttaggcaagacccaattttgtattcatggacggctccgtcaaagaggccatcccaaagcaaaacaacccggacgccgcagacaatcaagaaggaatttcgcccgaaaaagtggagttgatcaacaccacacttgacaaactgtacaatgacccatcctccccagcagcattcgccggtgttaccgcactgtggaaagaggcgcgaaaaaagttgaaaaatttacggaaaagggatgtgcagcactatttggagggacaccgcacgtacactctgatgcgcccccgcagggtgcactttccaagggcccgaaccgttgcggcggggttcatgaccgatgttcaagtggatttggctgactttcaggcgctttcgcgccacaatcggggtcaccgatacctgctcgttgcggttgacgtgctctcaaaacgcttgtttgttgttccgctgaaaaacaagagagccgaggagatgttggaggcattcaagcaactcatcgaccaaatgcccatggtcccgcatcgcattttttcagacaagggcaccgaattcaagaacagattgctgaaggaattcttcgatgagcaggaaattaagaaacatgagccagtgcattcatctgtcaaggcatccgttgctgagcgggccatccgcaatattaagcagagattgtaccgctattttgcggaaaaggagacgctgaattgggtggatgcagtacagaaaattgtggatggaattaacagcgctccgtctcgtgttcacggaatgcgccccaacgatgtcaacttttcaaatgcgcaaaaggtgtggaagcgactgtacggacaccctgctcttcaaaagcggacgccacgcttccgtaacgaccagtttgtacgcatgagcagagagaaggggcaatttgagaagggatatttgccaaattacggggacgaaatcctggagattgacgaggtgttgaaagcggtgcgcccgattcggtacaaactgagggatgaacacggggagaaattcaagggcagcttctatgagcaggagctggcgcgcgtcagaaaggatgcagagacgagctaccgcatcgagaaggtttacagaaagagaaaactgtcggatgggtccaccgagatgcttgtgaaatttataggatatcccaatcgggaatggattaatgagtctcagcttgtataaaagcatatgtattttttcattttgttgaaaaaataaataatcatgtcgaacagtttctttgtgtttttgcccagcaatgtgacggattatccggacaatcagcccaacaaatttcgtgttcggctcccaaagcctttgcattttaatggcacatgggtgtgcgggctgcacagtatcagttacccttactcatggtcaaccattggcacattggatgcgcagtggattgacattcacttcatcgaccgacacgctttcgatgaggaaaaacagcgggtgatccgagtaccggtacctaaggcatcgcatagcagggttgaacagctcagggactttttggcagtcacattgcgaaaccgtagcggagcaaaactgttgccaacaccccgtgaggtggaagcgaacaggaaccgaacaaagcttcttgattctccaccaccactgaaaagagagaaaagggatgcgtcatcaccgccagtgtttgacgcgggtggaaaacgcctccaggactctcctcctttgtataatataaatgaagacgaacgacttgaggagtcaccgcctccttttgaagaaacaaaaatttcggcgacacctccaccgcctgtcacaacccccgttaagccaacaacagcagtcaaaacgcccgctgctcctgctgtagcaccttccgcaactgcaaaaccaacaacgcagtctacagtaacaaaacaggcaccccaatcaccaaaaccagcaactaagtctactaccgccgcccctgttaagtctacaacagcccctccgccaactgtaaaggcaacaacagcccctccgccaactgtaaaggcaacaacagctcctccgccagctgaaaagacaacaacagcccctccgccaactgtaaagacaacaaccgcccctccgccgccaaagacaacaacacctgtaacacctgaggtacagagaccatctgttaagccgacaatttcggcaccaccagctcagctaatatcgacagctcatgcgacacctccagcttcggtttccgct

SEQ ID NO: 2719 - DNA, 1550 bp, Heterodera glycines
ctcatcggtaagtcccttctttttgggagtttttagttctaaattttggtagttttttggtcttaaatgcttaagcattcatagttctagcataatttccattttaaatttgtattgtaattaattacgtaaaaaacagaccgctcgttggaacaccacagtaatgggctgtttgatgccctcctcgtgcactttcttcagcagttgcattgtgtcgcggaagtgttcgtccgttttgaccaaatcgctgtacgctctctccaaaaaatcgaagtcagtgccaacgcgaaagtacagctcgttcagcgccttttaatttggaaagtaaaacttttgaaaaatcattgatttttactaagatttcgggcctggcccgtggcgattccctctgacccagccaaagtgccaatgcaagtggagctgggcggagggcttttggtggcaaagcaaattttaacaacaaatttctcccatgtcttttagcaacaccatcataagcccatattttctccacatttccaagtaaaatataattttttcgaggcgtcaaaaagataatgagggctattaattggccttgtaaaggtcgttgaaataagctattgcaataatttaattgctagaaattgcccaattaattccttttaatttttcaattaaattatttaattgttttttggccaattttcaccttttgtatggaaagtgcatgctcaaaaggatgtcgtggaaacggcgacgggaaaagtgaaacgggcgcaaacactgacacatcgctactgcaaaaaaagaaagcatttaattttatttatatattaatttatttttattattggtattaattacccaattaccgtttagggctttctttatttctgaaaatcagcgcattattatgtgcccattcaacagcaaattcccgcattgaactcaaatgattctcatccttcaccaatttgtgaacgtaattccttgtcactttgtccacttaaaaatttgtaaaataaatttatttattttaaaattttaaatttaaaaaatgctgcccgaaatgtttatttaattggttaccgttttgtgagtttggttcattgtcttcttcattgtcgtgttccacgggatggccaaaaatgctgaaaaaatttgccaatgctaatgcaaatgagagcaccaacaaattttgtgtaaattttcgattcattttggaggatgtaatttatttggcagaaaatttatgattttttgataggcatatcacatttatatatgcatggcaaatcattatttgttacattatatatttcatttcctgttttgtattattttttgcggacttccgtttgtaatggcataaacaaatcattagaaaatcacgtggtactactgatcgtcattttcgaattattcactttgatttttaatgaaatgtaatcgttttcataaccatgaattagactgtaactgacgcatttttataaaaaaaattaaaaaataattaatatttaaaatccaaaattgtggtgtcattcgatagccctatgtatcctcta

SEQ ID NO: 2720 - DNA, 4034 bp, Heterodera glycines
  unsure (1)..(4034): unsure at all n locations
tcattcgatagccctatgtatccctctattagcgtgcaaaatttcgaaanaattcgttnaaggttcaaaaaaagttatgccagaaagaattcaaaaaaanccaaatttttccanncttttgggctcgaactttttttgaacttgacgaaattttttggaattttgcaggctaatagagcatctaaataaagagctttcgaatgataccaacaatgttggatttggttggcaaagaaaaaagttatagtccaaaaacatgtgttcgtacgaaaacggcctggcccccgcatctcgtggtttaatcgtttttagattttttaaaatcttatttgtaatgaaaggggccgggcaaatgggttttatggggtggcgagtgaatcgaggcgcaagtgaagcggctcaaatgtcggtacacctttttcgagaatgacttttataacgcctatttcggcattttgtgccttgtgccggaatcacctattttgtgcttattccagcattttaaaattttaccgctttaaagcgttaatttgcttattttatgcctgtttttggggttcataattgtaatttttcttgccttaaaaaggaggaatccctctttatttcaactgtgaaataattaacttttttatcatttatctattcaattaataagtttcattataacttccagattattgttttgtttttttcccaattatcaattcaaaataaatgtttaacagattattgctaattagttatgctcaggggtgccatcgccaaaactcaaaaacccggcaaaccagttgaaaaacccggcaaaaacccggcaaaaattttcaaaaacccaccaaaaacccggcaaaaacccggcaacttcaaaaacccggcaaggacccccaaaacccggcaaatgccgggttttccaggtaaaatggcacccctggttatgctgtggaaatccttaaatatgtcaaaatattgaagaaattcgtcttcttctcatcattattatcccatgcttaatttaatgaaaaatgacgaaataattcccataaggaaagtgggtctacgtttccttaaatacaaaatggttttagactgaaaattcataaaaattgcattttgattgaaaataactcgtgcactgatggactggaggataaagtaaaaccacgaaactgttaaaagcaatgaaaatcatcatacagacagtttgcacataaaatattaaaaaacaaatacggaaatatgtacaaatatctttgaaatatatcaaaatatgcaaataaaaattttgattatgattttttaggctaacatttcttagaaaagaggtggataagaacaaaaggtcaaaaatacccaatggctttttcgaaattttcatgtgcaattcctgtaattctctaaaattcaaaatttgtaaaaaaaaaaagtaaatgttttccataaatatgtatttatctgtgtttattcccagtgaataataacaagaaatatcaatgaaaataatatttgaatttaatttttaaatttagaattgccaaaacttcaaattaaataacaaataccctttatatgtttatatagacaaaagatttttaattaaaaaaattattattaagttttctaacaaattcgggacaaattatttagtcggatttttagaatttttggttttaaaagttttggtaaaatttttgctaaattttttaaaacaataagatagtagaggacacatagagaggagctatcgctaaagatttcaagattgcttaattataataaagtttgagctaaattatgatttattaatctgaaaataaaataaaaataataaatgaatttaactattactttgatgaacatttttaggttcgccacattgatactttttaggttcaacttagcaccaaaaataattttattggccatttataaaatttggataagaatacttttcaaaaatgaatgcctaaaatatttttgatgaaaaccttttattcagttgtatttgttgttttattcttttattttgaaaggttaaatcataaaaacacataaaaatgcataaaatcgaattatcactgctttaaagaagcgaaagccataaaataaaaagcaaattgaaaatttacatcaattattttttctaaaaatgccactgtttcatcatccaattgttaattatcagaaaagaattggcgagtcgtgcaccgcaaatcccgccgaaatgccgccctcgtccgaagtggccaatttggtcttcagcaaatggccctgctgcacattgtggctcacctgaagaaaacggaattttaaatttaaaaattctaatttttttaaaattgaattttagtagtttcgctaaagcttcatttgcgtaggtttacagtgaaaattggaaattggtagcccaaagcaatactttgaattcgaattatgaatttttttaaaattttcaatgtccaaaaaatctttggcaatgaaaaaccctcaggtacaaaaaaaaaaattatttgaaatttgaattctatccatttagtcaccctatcccaacccaaataatcacctctccggtgcgcatgttgcccatcaaaactccgtacacgcccaactcgctggccattgtgtcaattttcgacactttgtctggttggaccatgatattcttaaaaaattaattatttaaaaaacaaaatgtcaaatatataatatttaattaattttttttgaaattaccctcgttcccagccaaaatgggctgatcagatcaccatgaaggagtgatctgatcaacttggtgttgctacctttatgaccaccccaaaagggagtgcagttggtaaaatggtttgtaactaataataacatttgacaggggatagtgaatggtatcattataaagcccacaaaaaatgctacaagaaatataaaacatatatacacaatatagtcatattgagattttataatcaatttaaatcaaatttggtagaaaattttgagtgttgttaaacatatgaccatgactgtatgtaaaattatcttctaatacgggtttttggtctcggagtagaatctcggtctcgagtctttttatattattttttttctttttaaattaacatacaaaaattgataattaaaattttgttgaaatttttctcaaaaataacgactttgtttgattttaaaaaagggattgaaaagtgatattctttctcaccgttaccgggaaatgcgtgagtggaaaatgcgtcagtgatacaaatatttaaaaaaaagcactgtgcaagtataaaagtaaaattccaaatgaaaatcattttgaatagcgaacccccccccccccccccgcacccgaattcgaacagaaaatcgaaattccaattttcgaaattagcctttttggttaaaaatcaatttaaatacacggaaataaactgaaagcatcaacccatcaataaaagatcatttatgccgcttttaaaccaaaattgcaaattcgaaaatttggactttcgactttttgaacgaattcaggtctgggaaatcggaattgggtgaaatgtataccggatccgtaatcagagtgacctcgaaaacccaatgaacttgtttttatgacattaaaattttcactggcgtattttccgtgagccttcctcactattagaatccatttcagtcctataaaatgatgttctattttctgaaaaaagcaaaagatttcagacaggcttatgtaatcacggaatagggtgtcttcaaaacaaaacttgcaaaaatgcattgaaatttaaattattcaaaatcatttattcaaaacgcgacagatttatgaatgtttaaaaatcaaataaagaaaagaagcgggggattaaatgagtttcgatcgcgcgattaaacatttcaattatcaaaaaaattagcatggttattataacttttttntctggttncnnttagcccaancgttcaatgaatgagctgcaataaatctggcaccttgtttgactattggctggactctagaggtcccc

SEQ ID NO: 2721 - DNA, 5152 bp, Heterodera glycines
cgagaaattttggcgaaaaaatgattttttgaaaaattttcggtttttgggctcaaaaaggctaatttagctgatgggggccgttctaatagaggtttttttgaaaaatgccaaaatatggacataaaatatggaccaaaatgccaaaatatggaaaaatatggaaatatggacataaatcgcgaaatatggaaaaatatggaaaatatggatatagaaatccatcctagaagcttcaaaccaagctaaaaacatgtttttcgtgcgtttcaggccttccacagtccaggaaaaaaatatggatttccatataattcccagccctactgatgacatttccaaggatttgtttaattgctgcagtgtttattagaaataaaaataaaaaaatcatttttaatgtttcaaaatgaaagaaaataataataaataatttattcaatattcaatttatttattcatttagaaatggtgtggcacttgtttttatcatatattgttattgaaaattattgcgcaaacggaaatgaataaaactattctatgatcgatttgaatatgccaaataaattttgggtttccattttttaaataattttctaaaatctccccccattgaggttaaaaaattcctcggagcttcactctatgaaaatataggatatttgttttcactagagacggacgggaccggggcctcgtcagggtttttgccagaataccggaccgagcagacgggctaataaataacagaatccaaatttttaaaaaatgcacaaaaaggacattttttgtacgaaatcttttagccaagtctcactatgagagcaaaactgaaccccaaaatcctaaaaattgatcatttttgataaattctgtaaaaaatttcaactatttttctggataaagtgctaagcataagtatctttgaaaagcaaagcaaaaaaaaagaaagaaaagttttgagttgtaaacagacaaatatttgcaaaaaggtgccacttccggcggcgggtccttcctttccaattttgataatttttgaaaaaatctcggtcttgtacgggactctcgaccctaaaatttgaccgacaccgtgagtcccaaaacggattttagtcccaatgccgcttcaagtccctcaaggtctcgttcatttcaaaatttcaatcttttgttttaaaaaagcttcaaaataaaaaacattattactcataatattttcaataagtttcacaaatttggtgttctgaattcttttgttatcactagggcaaaaaataaaattttcacttaattttttagtattcattggatgttaatttgttggtgccattacttcattttgagcagttgtgccagctggtccccggtcagcttcatgtccacgcacggcaaattgccaagtgatgggcccacttcgatgcgtgacagtgccattggcaaagtgacaactgacttccgtgccgtgtgtcgttggcgttgtaatggcaatggtgctgctgttttgcacgccatttgtttgccatgaccccgtgccaaatttttgccattttgcaccaaattagcccaccaatctccgtcatatttgcatttttcattcccacagagacagggacaagctttggaaagccaccagcgttcacctgttacgaaattacacatataaatgaaatgctaattgaaagacaaaagcgccaaatttggagaaacgcttgtgccattattaattttttttaaataattaaaatgaattccaagatgcaaaaaaaaaaaattgaaaaaagcccccacccccagagacccccaaaaaaaattttccccccaaatttgggcccccaccgcccccaaaagaaaaagggtaaacctttcccaaatccccccttttttttcccccgaaaaataccccggggggaaaaaaaacacccgcggcctttttttcccccctttgtttttttttccccccaaaaaagggttttgcttttcccgggggggggggtaaaaaaaccccacacttttttttgggcgaggttggtaaaagggccccaaatttttttcaccccccccccattttttttttccttcccaaaaaaaaaaaaaaaatattttttttttttttttttggggaaaggaaaaaaaaatttttttttttccaaaaaaaaaaaaaaaaatttttttttattttaaaacccctttttttttccccccgcccccccccaaaaaaaaaaaaagaaaaaaaaaaaaaaaaaaaaaaaaaaaaaaaatattttttttttttttttttttttttcccccgcgcgcgcgcgggttttttaaaaataaaaaaaaaatttatttttttctccccccccgccccccccaaaaaaaaaaaatataaaaaataaaaaaaaaaaaaaaaaaaaaaaaaaaatttttatttttttttttttttttttttttttttttgtgtggggggggggggtgtttttttttctcttttccacaacaaaaaaaaaacaaaaaaaaccccccctctccccacccaaatttaattttctcttttttttgtggggtggggggagaagaaaaaaaaaagaagaaaaaaaagcgtggtttttatatttatttgtggttgttttttattaataatttattttaaacaaaaaaaaccttctctcccggcgcccccccgcccacaaaaccgcgggggggtgtttttgtttataaaaaaacgcgcgggcgggggggggggggggggaatttttttttgtgggggaaaacccctctgggggaaaaaatttaggaaaaagggggggggggaggaggcgggggggggggttcttttttggggagggaaaatttgggggaggccccccaggggcggggtaaaaacaatttaagggttttaattttaaaatataaaaaaaaaaattttgtccccctttttcccttcaaaatttttccaattccgggggagggaaaaagcgaaaaattttccccccctgggaaaggaaaatccttggaatttattgggggccaaacccaatttaatggttttttttccattttaatttaggcccagggaattggccattgtcgggtaccttttgggcaaatccaaaacaatggcccccattgccaatggcaagggtggccatatgctgccctggaaggcgccgagggcgcggaggggcgcgttgggatcggcattgttctacgcgactcgccctatctgttctgatcagtgccctcgcccgatctgttctaaacgactcgccctatctgttctgatcagtgccctcgcccgatctgttctaaactttgttccaaactggttttctgatttgtaaaagtataaagaaaaatatttattcaaatgtccaattcgaaaaaatatgttaaattgtcaccactgatcacttctgccagctaaccttttttaagaaattctttcaaaagttatttcagattttcatcttttcgtgaagattagccaatgtattgttcaggggtggaatgctagcgcgatcaacaattcgtggcatatttttcgcaactgcgacaatttaaactcgcgatttgagtccgcaatccgcggcttttttggaaccaaattatttataaagaaaatttatctaaatgaaaaaatgggttcaaaatcgcaaattggtaatttttgataaaatctattaataaattgtctcaaatttttaaaaattttccggcggcgcctgtcggactgtcggtcaccttatgaaaatgaaaaaaggcttaaagatataaatgtttgaaaagatggaaaactgagcttttaaggcaatttgaatccgcgaccgctgggtttttctgtccgcgtctcgccactgttatttattggtcgtcatccggacgaattatcactttttgctggacggacgaatcgaccgacacccgacggacgaattgtcatagcacctcgacgaaattataattatttataaatatcattcatattcatttcctttttaatttattgaataataaattttaaattaaaaatattttttataattcaatcaatttaattcaatgctaatacaatataaaattgcatatcatagaaacaccatatttgattgtcgtgtgaaaacgtgcaaaaatgtgactctttcaattgcctttgtcaggagaaatgccacattcgaatgccaacgaaacattacacttttttttttattaatttgtgaattattttcttactattcacatctcattctgctctttcggaatgtcgtttagctttgttttgctaattttctgcttgttttatggaggtttgtcatagggatttttaaattaattagtgtttttgttcaattatttgcgcattcatttcttcccagtcgaagtttttgggagtcgaaatggtgggaaatgatctaatgactccttttttaaagattaattaacttggcgaatataaattaaatattttcagttggagaaatgactgatttagcaaaggaaggccaaacgcccaattttgacttttcacaaccgcagccaatggcacaaatggcacaaattgccaatgcaatggcagcgaatggaaacggaaattacggaatgggcaataaattcaacagcgaaggcgaagaaaacatctgtaaaaccagttaattacatagtaaaaatagttgttacttttttagatgaagaaaataatggccaagagaggtaaattaaaacaaaattatactaaaatattaaataaattcataacgatctaagaccatttgataaatcaatggcattttcgaataaaaaacaacaaaaccgtacaaaaagtagacagaggaaaagcaaagaaacggagaagcagcagaaggaacgcttttcgacaaaattgtaaaaaggggggggggaattaaaattgaatttgaatttatgagtgaaaattgatataaaatccaaatttgaaatgattattttattcccatttttgagttttgtttcggccccaaatcaaaagactttttatttgataaaaatattataaaaattaaatggcaaattaatgcaaatttttcgcttcgtccaacagattcactgtgttcattctgttctccatgtttttccagcaaatacccgaatattgtgtcgacaagtaatgaatagggatgttaaaaaatat

SEQ ID NO: 2722 - DNA, 3374 bp, Heterodera glycines
cattattatttatttttaaataattaaaatgaattccaagatgcaaaataataataattgataatagtcctccatcctctagaagtcaccatagaaaagtttctccgcccaaattatggcgctccaacggtcccagacagtaatagtgttaagccattaccgtaatccaccgttatttcttcgccagcaaaaatacgccggagggcaaaaatcaacacggacggcacttgctgtccacgctgatggtattgatcaccagcagtagcagtgctagcgattcggacggcagtggtgatcaaaacagcgcaacagtttggctggcacgaatggttgacaaagcgggccaaattaacttttcgaagcgcatccaactgatattgttggccattctgcaaaaaaagaagaagcaattattgcctttttgtttaggtctgtaacggatggagaaattccatcttttggccaataaaaaaacaaaaaatttttttcgaatttaaattccgataccttgtttgccagatccgccatttcaaaaatgagaccaagattagatttacagccaaataattagagttaaactttttgatttttagccaaattttttgcccggcgagtatcattttgagtcaatttaaaaatttgatcgtcatattttacgtgttcaaacgcgacaattaaatttaaaccaattaaataatcaatgcagagttgaaaacagcaaaattttatgcaggatttgatttttactaccccacgtgaaataaaataaactgtatacgatacatgaggggttggaccgggttttggagttttttaggtcggaatgccggattttccggttttatgccttccaaaccggggcaatagcaactcgtacacaagcaactagtacaaaaatattttataaaataaagcctaagcttaagcctaaacctaggccaaagcctaagcctaggcctagcctaaagctttggcctaggcctaaacctaaaaggcctaacctaagtaattggagttgcctctgtacaacagtgtacgagttgccttttgtgcaagttgtcatgatacctctaaatcacaattgctgttttactgtctgtacggcaggggtggggcacgcacagaaaaatcccgcggtcacggatcgctcgcttaaaaactcaaaattttccaactttttaaacatacatttttttaaacttttttaaaatttccttattataaaaaattaattaaatcccggtgcatataagatttgcgacgggactgaaaaaaggggggagggcggggaaaaatgacctattttgtgatttagagccaatttttttaaagaaaaattaaaggttttgtcagctctgacgaggaaaaattggaattttgaaacgaattttttaagaaaaataatccaagtttcaaaactttttcattaaaattttgaatattcaaaaaagacaatcgcttcaaaaaaatttctttataaaaattttgccgcaaaaaaatgagcggcgcgccgcgcaaaaaaaaaaatcccgcagtcgcggattcaaattgccgcggtcgcggaccgcgcaaaaaaaaatgccgcgaatcgcagtcgcgtcccagccctgctgtacggtaatattctgttatgaaaccatagattacttgaaatcgcgcagcgggacgcacaatcggaacaactttgcatggtatatcctggaacattaaaattaaaattaaaataatatgttatctttaatgaaaaataattaaagaaataattagtgggaaattccgtttctatatatatatttttttaattttataatttaacttcgaaaatcgttagctgaactcataattctcaccacattttcgccattttatatgggcttattttgtctttgttctccgtgttgatcactcgcaatttgttcaattctttgcctttactcaagtcattgtccacgacaaagtcggcagtagtgggaatttcactgaaatttaaataaaaataaaaatattttttttcaatttatagacattagagaaggcagaaaatcatcttcatgtttgacacttgaacaacatccattaattaattggcttaatgttaagcaaaatatttagcaaaaatcttaatttatttgtcattattaacaaaaattttggctaaggcgatgcgggattgcgccgctgtcaagaaaatttgcagattttgttgatattgatttgttgaccgagtttttgtgtcgcagtttgtgtaaaattggtttttttaaattggattattaaaaaaaagagaaaatttctgaggtatggatcattcgttggcgaacataatttcaaaaaaatcagaaaaggataatgattatccgcaagtctgaaaatttttgttcactgacagaatacaattggcatcccggcaattcagaaggtgccgggtcgttcgttactcaaaaccataaaaatgggcgttactcaaaaaaccataaaatgagcatattatttgatataactttgctcaaaagcaaccaaattttcaattcttgaaagcatttaataaccctaaatgttttctattatatgcaaaatttcaaataatttcgttaagttccaagaaagttatgaccaaagtgttcaaaaagtttgttttttgaatttctcaggtcatagcttttttgaaattttgcaggagaatagaatacatttagggctatcgaaaattatcaaattttaaaatttggttcattttgggctaagttatgaatatttttctgtcaaaaaatttcatttgatggtttttgactaacgtcagacatagatagcagggatgggccaaattgaaaataaaaagcgaaatgcgaaaagccaaaatatgcgaaaatgcgaaatgcgaaaagcgaaattttttttttaaattttaccaatagcttgaggttgtgatgaaaaaaaaaatctacattttccggttcgatctttttctcagatagaaaatgacaaattctactcattttgtggttaaaatttcaaaaattaaggtaaaatgaatgtccggcggtgccgataagcgccgccggaaaattttttggaaattgtaataaaatatggtaggaaaagttgcaaaattttcaaaaaatttaccgtttttcaaaaaaataaatcgcaaaaaaggcaaaaaatgcaccaaaaagttcaagataaaagcttcaagccaagttaaaaactcgttttcgtgcatattaggctatagcaagttagcaaaaaaggtaattattagagttgcacgtgaccgggattttgacaaaaaccgggaccgggacttaccgggaccagaaaagtcgggaccgggacctcgattttcgtccgggactgggaccaaccgggaattt

SEQ ID NO: 2723 - DNA, 1855 bp, Heterodera glycines
aataaattaaataaattatttatcattttatttaatttgtacaatttatatgtcccattctcactcacttttgcttctgtcgttggtgatttcgtgagcaaatcaaacagcttaaagcttttaaattcctttattaccactgataaatcaatctgattatttggcacaacaattgccaaatgcaattgatcattatcacttccaattggcacaccgataaatcggaactgaaaatttaaaaaaatttttacttaaattaattttgattcttttttttactttttcctcattcttgtaaatgaattgaccaattagcggcccccaatttgtatggaaatgtgccacattaacaataataatcctagaaaattgtgtcaattaatttttaatgattttttcaacttagtctgatgtggcacaatgtctcccggttgaatcacatcactgacattcccttccgccgttattttgcgcgcaaattcatttattttcttgaaaatattttaaattatgtaccaaaattatttatttaatttttgtaataaaacaaagattttgctactttaagtagtaaattttgatcaggtccagagttaaattttaaaatttcgaataattaggtattttttggactccgatggttcggatcagtgccatagtgaataaatcttgagatatattgttaattttcttaacaaattttccgcaaattacccaacaaaagtgtcaaaagtccgaaaatgctttaaggtgccaaacgcccacatatatattaatttaagcttttttaattggctctaattttaaaggtccccgccatgattataaatataagaataaaaatttgaaatattttaattgtatgcaaaatattattttacatttgccgcctcggttccttgacgaaagttgatcttctcaaaattgttcccataaaatgtgtttgttttcgtgttgaattggtccaaaacatcgaatgaatccgacaaaaacattttactttccattttcagtttaaaaacatcattagaaggaagcaattgaatttcttggagaaattgacggttgttattgtgcattaattgttcagacgaatctaaattatttaatttaatgttactaaatgcaccaaaattaataaatttttgggtacacagtggccgggatttaatcgctttttagtgtctcaactaaattttttgaacatttgcaggctattagggactttcaagcgcttttaaatcctctaagcttatttaatatgaatgacaagtaaaaaagttgcatcatttgtcgccaaaatggctggcgccaaagtgggcggttcccattaaccgggactggtttttttcccaaaaattcgatcccaatcaaaaaatatattaccctcatccaacaacactttgccaatttgagctttcgtattccctcgtgcgccattgtaggcaattgccaagccaatcgcggccaattggggcgcaactaccgtatcctccgttgtagaagtgtatatttcagggtttttgtgaaggtaaatatgtttaaacaagtccatcacaaattccgattgaccaacggctttaaaagcaaaaaaattaattattttatatatattttttaaaaggtcggtcattacgtctcagcacgaagttcgtcgggtacattagcgtgccgtctggcattccgttttgtttcattaacttcaaatcggtcggttgccaatttagctgagtttgatttgcgtattcataaccgcctgcgggatctcgccattgcactgcgttgccggtttgcaaatccaactgcagtccgcgcatctcttgcacacggcccttttggattaaaactaattatt

SEQ ID NO: 2724 - DNA, 3407 bp, Heterodera glycines
aacaattatttttaatgcgtttttaaataaattaaaaaattaatttttttcttcttttttttatcaaacatttggtgccaacagatcaggaagatggtaacttttgtagccacaactgtaaattatttcaaaaattggctttattgataaaaaaaacgaggacagttttaagtttagaaattttttaaatttaattttagggtgggacaaagacgctcaacccacgacatttttggcattttttggattatccccgaccccgacacattaaaccccgactcaaggattgaccttcattttattttaatgaaaatctcgatcccaaaactttactgacatatttttaattaataaaattctccttttctgccaatatgaataaaaattgatgccaaaaaaacgcacttgccactcaaagtgagtgttatgccaacgaacacatcgggtatttgtgaactaaataaattccagcagagtctgttgcgaaattcaatgggaaaagtgaacggaattcctcctccatctaaaataatttatttaactaattttttttattgaaaaaatagaggtatttttttactgaaaaagagataaaaaatgatagtgacccaaaatttttttttaaataaaagaaattttgaaaaaaattctttgggcaaaataaacaaaacaaaaattcccaattctgccaaaatagtggcaaaaaattgagaaaattttgttaaataacaaaaatcacaattttattttaaaaataatgccaattttcaccatttccatcatcgcctggccattcctttatttcgacactaaaaatgccaattttcattttttaattatttcattttttttttatttgcctgctctcgaacacttgtttcatttcgcctttacaattgtaggcaattgttccataataaaaattttctctatattcaactttcacatttatggtacgacaatttttgattgctcccgtaatgcaaccgtccaaaagtacaagaattccttaatggttttatcaatattttaatttagggttgcgtccccgaccccgccccgaccccgaaccccgacttttttgcccatttttcggggttaaccccgaccccgaccccgacgctcccaaccccgacgcaccccgaccccgacccttaaccccgactcggggtcggggttaaatatacacccctaagaatggcatttttgtgggagaaaaagcaaaaaatatatacaaattttgaattttttaaccattttgccaaatttttataaaataaagtaatttgcttttaccaattcatatgcagtagtggcgtaatggttagtgtgttaacactaacacaacttttgtcgtgagttcgatcctggttgacttcttcttttttaattatttttttttgtaattaatagggttttttaaaataaaaatacccataaaaattggtcatcattggcataatttattgacaaattaaacccaattttcctttcgttgaaattaaaaaaatttaattttccttgactaaatcatgaaaagtaaatattttacaaaatataaagagaaattcataattttttggtgaaaactgttagaaaaaagagcttaaaatttaaaattcgcccggcgttgcctatcggcatcgccgaccccccaaaaacctgaaaattttgctcaaaatcaaaaaaatttataattttttggacaaaatctgttacagatccatccaaatttcaaaattttttccggcgctgcctatcggcaccgccggacccctttctcctaaaagtctttagaaacgcgccgcaaaaaaaatgattttaaaaacaaaaaacttttcgggaacaagggtccggcagtgtctataagcgcggccgcgaaaaatttttgaaaattagagaattagaatgcaatttattaactgatttcaccaaaaataaccaattttttcgactttgagccaaatttttttagaaaaaatttgtttttggggcctggcgccggaggaaaaatttgaaattttgactatttttacagattttcactaaaaattgttcattttaaatgccttatcgtttttaataattctatacaaaaataattatgaataaaaagaaataaaaaaatacacaaaattattattatgaataataaaactttaaagcaaaaataatataaaatttttttgactatatggcataaggcaaaaattgaaaaaccccgaccccgaaccatttggtcaaccctgaccccgaccccgacacttccaaccccgacgaccccgaaccccgacttttccaaccccgacggtcgggggcccaaccctaccttaaatttaaggatgaaatattggaaatttgttcaaaaataaacttccaaatttagcatttagattttttagaaaattctattttaatccaaaggtatttttcagttataataaaggaatcggcctaaccgaaaaccaagggtaccagttttctggttttaaaaccttaatcttctcaaaaaattaatttaaatcgcaaaatttggtcgtaaactcattaaaactataataaatcattaacattgaacaataattataaaatttaattagaaatgaataaaaataaatttttcacgagcttttctcaaaaaatcactatttttatatgattattccggtaacaaatgtcctttgtttgtccttgaattttgatcacaaacactaaaaattaggcgaataaatcatcaatttgagtaccatctccgaataagcagcagtcgtttttattttcatgcagatttttgaaattttcatttgctttctgtggcaaaatgtcactgttttggactcggttcattcgtaaaggaaagggtggcacctaacaataaaaaatacaaaatatttaatgaaatttactaattttaaatatgtaataccattgggaagaaacttttagttgccgatgaagacttattttgaccaacaaattccattcgcattggggagggaggcgactaaaaataaaaaagatttttttagttttcgtaattcgatttttatttttttggcaattttatagtttaggtggaacgattaaaaaaatttaaattgaagattcattatccatgggctttttagccggaattccatgggctaaagcaaatgcattactcagggattaattaccatttcgtgaaatgatgatgttgttttcattgaaatttgtgggtccctcaaaacggagtcagccgaagatttggcacttccatatggatcaatggcattttcttaaacatttcgttttattaccttttcagtggcctcacagaaattcgttttcccttaattttttcacttttcgatgaaaacaaaggcaaaattttgggaaatatggacaacattataacagaaatgctc

SEQ ID NO: 2725 - DNA, 923 bp, Heterodera glycines
  unsure (1)..(923): unsure at all n locations
aaaaaacaaaacgccacgccaacacactcaaaatgaaaaacaaaagtgtcgtaactgtggtcaacgtactaatcaagcgttaaagcccctaaatccaattcaatgcagtaaaatacgtattttttagatttagtttgagttaaaaatgatctacaacatttattggatataagctatttctcagtgattaatcagctctcaaaaaagttgtcagttgaaaaccgcaaaaaaggcagaacttttgaagttttttatttctatctttttttatagttcgaaattttctgtaatttttagtaggctaatagagcctgtgaagagctttcgaatgatatcaagattgtttgattcggaccgctgcgcgcagcgcaaaaaaatccggcggtcgcgcaacgcggattcaaattgtcgcggtcgcgaatcgcggcctcgtcccacccctgttaagtcctaagcagtaaaaaattataaaaatgatttaaaatgctttttgagcgcttttttagtgtggccttgaatccatgctggatttggcacttcaatcccggcactttttctgcctgaaaaagggcaagcgccccgctaattctatttttgctacccattcgattctgactgtttttaagcaattttgagtttgggggtgctagtgcgtttcgtaaaacggccaccatgaaaactaccacctatgcgcgtttcgtaaaacggccaatgggctcgaaacaaaaaatatgtaaaacctaaaattcataacttggctcaagttcaaccaaattaatatttaatggtatcattcaatagctttaattgttctctatcagaatatgattttttaaaattttttacttaagtataaaaaaagttattgtcataaaatttcaaaaaacataaagtcaggaatttttgtccagaactntttttaa

SEQ ID NO: 2726 - DNA, 3410 bp, Heterodera glycines
  unsure (1)..(3410): unsure at all n locations
caaatcggtcggctgcgatttggcaatcattagcttctctttntcggattcatagccgcgcaagttgtcaaaaattcggaaaaaaaacctaaaatttanaaatgaatttttatggaatatagatagctaaaaaaattctttttttttcatgaacttaactcttgtaaatttttaattttataatttcagatatggtgggggggatttctgaaattatttttggcataattcaatttagaaaaacctaaatgaaatgaataaaatattgatagttaaatattttgtttttttggtaaaaaaattctcttttcatgaacttagcttttgtaaattttttaattttcataatttcaagtatagtgggggattatgaataattttgtcaaacttcctacccaaaaccaaagtaaatgttaccttataagcgattaggttcgataatccgaattttgctctgccacaactgtcaaattaacaaattgcatttttcttacaaatttaatccactcactcgccactcaaagtcaactttatgtaattgaaagtgggtggagtgtgggattgcatcagattaggtttttgaactccataacgaaagtgaacggcgaagcgccactcataccgtaatcttcttcatgtttgtagatttgtatactgtaaatttaaaaaagattttatacatacaacgaatattatggataaaatctgttattaattagccgtttaattggttaattataattcgggagatacaaagtatggaaagagagggaaacgagagagtataagatagtgagggaggcgcgtgggtcccccagacgactcaccgcttccgaataaatggggaggacgatttgggaggacggatcccgggccctgggatcgatggttaaatcccccaaattgcctcggtgttaaaagactaatttattctccggataaaatagatgatcgaaatattccatgaacggacgagatgagaaaagtgaattaatcaatcgatggtaaatccgatgactccgacgactaactgatcgctggggaaaggaaaagtgtgaagagaacggaaaaggggcggggatgaaagagataagaaaagcgataatggaaagatggaaagtccggctgctgagggaaatgaaattgttttgagggtgggccaatcccttacaatattttaattttttgtgtgttttgtcattttttacttttaaagaagatttttatgatcaatattttaattgatatttatcgactttcataatatgtttattcttgatttctttaaacactatatttaaaatttatttaaattttattttacctattatctgttcaaaatggtgttgtcctagaggttattatatatatattgaacatattttaatatttatttatgctatttttctgtacataaacttgtattcatttttttaatcttgatgttatgccagcaacgaatcgtttacggaagttctctgttttaatatgtttggtaaagatttaatcttgttgcaggcagttaaatggtattgaacgagccttaacataatttttttaatacaagaaacttatgttaaaaaatgtatgttataattaaattttttattcatcaaaaattttgcctcatttagtttatcttttaataatttttgttttttttaaatatattgatgtttaattttattttctttaccaaaatctttaaatattttgttttctttctttattttaatcttgatgtcttctgacagcaccagtcttgattttggtagtttcctgttttaatatgtttgataaagatttaatctagttgcgggcactttgttggtatttttcgagcctcacataaaattttattatttgtgaaacttatcaatataaattgctgcctcaattttaaatgatgttataattataatttaattttaatattttatttatatgcatatattgtcctatgtatttagtttatcttctttaaaaaatatgttgccatttatatttttaaaattaaacccattaagcttgaatttcaaatttccacgcacttatttgtttttcattgttttaaagattaaattttttcttcacctttaaataaaatcttcataactatttcatgcttccagtctacgtaggttttatatagttatactttgatccaaactcatcaaaggatccaggggccttatgctcgtctcgcggtttagtaaaccacggttaacgcattaaccacggtttcgttaaccgtggttaacgaccgaccttaaccggtatgctcgtctttaaccatggttaagtaaaccatggttaactcaaccgtggttaagagaatttatcttgaaattgaaaaataattaatattaaaaaaatataattaaattattataataattattttttgtttatattatcaatattagcatagattttattaaaaaaccccgaaaagctattaaatcaagaattggttttctaaaaatttttggccataacttttttaaacacagtaatttttttttaattttgcaaattaatagaggattcttggggctatagaatgataccaagaatgtttaatttggatgcttcaagaaaaattttgctgcattaaaattgtcaaattattttttttatggtcgtgtgaactgcaatggagccaaaatttcttggtaatagtgcattacaaacaattacgttgttatgcaacatgctacaaacagcagcaattttgtcaccttttttaaaaagctattttagcggtttgggcgtgttcaaatttttttgatgaaataacactaatccgtcaataatttatatcatagacaaaaataaaagtcagattctttttctgcatgtaaaattaccatagaaaaaatttatttatttattttactatttaaattattaaataaatttacgttaaccacaactcgagttgtggttaagattccttaagaaagattaaaccacggttagatgagcataccggttggaaataaaccacggttaacctgcgttaaccgtggttaaggaggcagtaaaccacggttaactcaaccgtggtttagccttaaccacggttaaaaagggaaggacgagcataccggttaaggatttttaaccacggttaacgccgttaaccgtggtttagctctaaaccgcgagacgagcataaggccccaggcttcaaggagcctgtgttttctttcacctgtattttcgtctgcttttgtaccagggttgttccgggtctgccaaatcccgaaacccgacatttttctcgtcccgaaacctgaatcccgacgatgttgggttgggtttcgggacaaaataagcactggtaagaaaggggtctgggtcaaaattaggtagaaaaagaaattggtggagaaaggagaattttt

SEQ ID NO: 2727 - DNA, 2785 bp, Heterodera glycines
taatttggcattacacatcctgcacatttgcggatgaatttttgtgatagatttttgacagaacaggccttaatgtacagtatccatacataaattattatctaaatttcatgtgccgaaaaattgttttttgcagacttaaatttagcaagcacaaattgttttcaaaattttttgtatggaaccataaaaaaccggtgatgcttaatgttgctgtttgatggtgatgcttcacctgtttttcaccaattttcatcgtcaaatcgtcgtcgggtaagctgctggaaggcgccgggaactgacttaaaaaatgggggaaaaataagaaaaaatggaaaatgaaatcaattagtgatcggaagaatccatcccaaaaatgccttagtaaaaagcgcgtcagtcgcatttagtttttcaaaaatatacatatgaaattctaattgactcaaattaaaaaaatcagttatttcgatcttattattaatcaatcacattttcttttttgtctcccgctttttgagaattcggataacaattgatgaatcattagcaatgttgttgtaattaacttcactgcccttgttcagtgtatgggtctaaatgatttaattgattaatttatgcattttttaagtttgatcatttctttaaacctacactaatgatttgttgtgccccatttgtgtcccaatcccaacggacaatttgtgccaatggctcaaaattcgacggattggaagaagaagcattgccaacgtccgtgatttgcaatgcgtgaaaatcgcttctcataaattcactaaaatatataagtgattaatttatacccaaatttttttttgttttttaaatttttttattattttaaaatttcaaaaaaaatgaaattacagttcagcaaatcggatcatttcccgaaatgaagtctttccagtgaattggccagagaattgaccgatcgcttcttcgtcaacaacaataaattcgtcaaagatttccatttaatttatttcagttgaaaatttaaaaatatttttatttaaatcgcatttttaatagaatttttcggaaaaaacgccaaaaaaggcaccaaaacggaaaaatgccaaaaaaggcatttaaggcatgaaaatcccgaaaaggcaaaaaaaaaggcataataaaagtcaatgtataagcctcaaaacaagtgggaaaatgcctaaaaagtcaagctaattattagggctgtcaattttatgtaaatacatatttttttcctggcttctccatgctcaaaatagcaggaaaacactttcttttttgtgtttgcgaacaaaaaccgggacttttatttacatatttttacatatttcggggtttttatacatatttggtaaatattttggactttttcttacatattttcatttttttaacatattttgaggatttttacggaaatttttggaaatttaaaaaaaaatccaaaatttcggcaaattttttgcacattttttcatattttttttcaaatatttcgagaaattttgaaaatttatagtgaaaaaataccaatgaaaaataccaaaaaaataatttttaaaatactaaaagttcttctaattgtaagactatttaagtaatttttatggcattttgaagcctatttcatactttacgatgattttttcccaaaaaaaaccatttaaaaaaaatttatttacatatttggggttttttgtacatattttgggttttttcttacatatttatgtacatatttggaccactttttgtacatatttttgacagccctactacaaaagtgattttggaaaataaataatttgaaaatttaaaatgaaatttaccaatttaaataattttgttatttaagagtaaataattctatttaaaataaaaacattatcgcttattagacaactattttacttttatttatactttttgggtgagtcagtggtaattggtaatttgggaaatgattgatgcccaagggcaaagaacagcactaagcagtagagatcggaccggtcggtttttttcagtatttttcgattttcggtttttaaccgaaaaaaaccgaccgaccctcttgtccggtctctactaagcagacagactgacccactgctgcagacatctcgcagcccctgagggggaaattgggtgggcttatatatatataatggcaaaattggggatggactttggatgggatggggggtaatgacggtacgacagaaatggatggcaaatgcaacagagcaacagagaggggaatgggatagaatgtcacgataagagtggaaaatgagaaggataggcattattggcttgggattgggggtcgaaggccccctaagaggccgcgaggcggccgaatgagtaccttaagcgcgggaaaattagtaaatgggggagggggggggaggagtaagggcgggggaagcgaatgagtgggccgaaggccccataccagggatggcattccgaggccccaaaaattttcggaaatcggtaccatctctgcccatatgaggcctcgatgtggccgagtgagtaccttaagcgcgggaaaacttaaggcccgcctgtgttgaaagctgcccagcgctttccagggccctggttaactagtaaattaaaaaaatcggcggaattccgtttcccgttattaattgtttaagaaactgataataaaacaattaacaaatttattcataccatcattaattgacttcataatggaaacccgtggctaattgatccccactaattg

SEQ ID NO: 2728 - DNA, 4666 bp, Heterodera glycines
  unsure (1)..(4666): unsure at all n locations
aagtaatggagcaaaaaacggtctattaaacataaaatgcgcttaagaatctcacgagtttcctcctcaaaaactggcgctgttccatttccttcagcgtccattttcnncaccgtcatctcatcatcgttagcatttgaagtaacagacaaaattccctgaaaagaggaaaactttatacggaaaaagatttccaaatctatcataacagtgtcttgttaggtagttttgaggtccctgatcacgaatctgacaaccttttttgacgaatttctaatcccgaacccaaaaaaaagtcaaaattttcaattaaaatttttttttgtattgccggaattggtcaatattttttgacatagtgtccgcttggtgagggggagtaaaagcctaattaaaccacgaatctcttgctacgctattgaaacagttgcgcattctctccctccctcacctctttgccctccagcgatgactcctcaaaggcgtgcaaattggcgttggaatggcaccgggaggacgagccgttgtcactgtccccgccgctgcttttcgacaccgtccgtcgtcgatgcctttgcgcagccttacggtgcacaattacctgaacatctactagattgcattgccaaaattgagtaggaaaaggattcggttaaatgccggagagttttaggcatttaaaatgcctaatcggcgtggtatttcaataaaatgttgggattaaatgttgaaaaagttagaattccgtttctaacacacttcggtggagagttcctcggccggcatcgctgccatcatccatttgttgttggcgtgctgatacgtggccgaaaacaaactgttgtgcatgttttgacgccgttggtaatgatggggctggtcaaaagtgccaccaaacaatccggcatttgccaacagaggcggatgctggtgttcctccagcatcgatggggtgggagtaaacggactccaagtcgtccgccattaccattgaagcggacgaattgacctaaaattgtatacaaaatgactcccaagaaaatggttaattaagggagtgtaagaaattatgtgtgcctgttgcctttgatcatccgcagaaactgtttgactcgccctctcgtcttccccgcactgttcgccttcgtccaacagcagttggtccgcgttcatgccgaactcggccaccatttgttgttcgcccgaggcgattgccacttcgtcgtcggcaaggaggacagaggacgaagcggagggcgaggaagagccaatcttagtgcgtattgacatcggtttaattgtgagggcttcacatttgtcgcaaccttaaagcctttgccggtgggcaacactccgttaaaagagggcgaagagaaaggcacggggagaggcacagcggcggattgaaaggcgaaggctgtcaaatgaaaaacccataaaaaggtcaaataaaatctgtttaatgggtatgggtgcttatgatgggcattcacgactactaagtctcacaaaaaatttgcaaccaatcggatagcttttttgttgctcttttttagtgtagtttcctaattttttggctctgtgggaaaaatggaatatttttagccattttcgccaaattttgggggttttgagacaaaatttttgggaaaaatacaagaatattgggtcgtcggagaaattttggcaaatttgttaagaaaattaggtaaattttaaacaaattagatatttttttctaagaaaatctttttttgatttgggtagagggggcaactgttcccaccctggttactgtctaaacactttttgcaagtagcgtatcatattttatacgattttttaaaatttaaatgcacctccaattgacggagcggttttaatgagaccagcaagagacaacggagacggagtccacgtattcaacaagctaaaaatggataaaagggcaaaggagggtagaaaatggttgcgattagcccacaccaacaaaaagacgataaatgctgacctcgagttggtcggagctgttattttgagcccattaattcgctttaaatgaacacccaaagagttaacgcattcggagtcacggagaaaggcatcgtcggcataaaattgtctttaatttttgcataatatttagaaataaattagccaaatgaaagcacttacttcatctgtcgggtgtccttcacaaacatgcttatgtaatgatccagggaatattcgttgagaacaatgcgaatccatgcctgaatcaaaaatcccacaaaaatcaaaaggaaaatgccaaatgttataacccttgctcggccgatttcagtgtgaatttggttgagcgttgaaatttgcgttttgatgcttcgctgcgtgtatttggagacaaagggccagaaattcttaacatttatttttttgttaaaagtcatttccccaaagtgggcataaatttcaatttatccctcgatttacccaataaattatctttgagacacaattccaattctccattttcttactggggatggccgattcgagtgccgtgaacccttgagaaaaaaagcgtctctgagtccatgtatgaaaacagcttcgatgacagtgcacaatgcttgtgtcagttcactggaaacttacaattagcccaatgcttaatttgattcaaaaagaaccccggaatccgattgtccacaaaatcagcagaagaggaagtcacaagatcaattgtcgtgttcaatttccataggattgaacgttttgatgaatttgaaggatcaatagccccttcattttcaaccgaagtttccatctggaattcagattatttttacgtttaaatcgttagggtttttggggtcggagaatcctactccaatacctatttttcatcacaaatacacaattgtaatttcgtttttagaatgagtaacttttctgagaaaagaaattttggcgctatatgaaaagtgacatattttgaaaattttttcaaaaggggggacccttttgttttgcaaaatttttttgtgatagtcataaaaatgtattctctggggtttttggagaccccgatcacgaatctttcaattattttgatcaattccgatttcctaatctaaatttgaacaaaaaatcataatttgaaaaattaaaaatttcgatttttattcgagttcgggttagggattagaaattagtcaaaatacatgtcagattcgtgattaaaaactttgcaaatactttttcccattttgctgtcccaacccccgccacaccatttgcgtagtaaaatttcatgttttttaaggaaaagtgagtgaatggaagaaaatgggggaggggagagagctttataaattaataaaaatttagaaaatgggaaaccgtacaaatgaaccaataaattcgtataaaagtggttgctgctcttcctctaccttccattattattcattcgccattattttcgtctctctctctctctgactttttctccctgacaatgtcttcaaaaatgattctgtacgtttttcgcatttcttctcaacatttactcttttccatctcattttttttagtctcatcgctgtgccaatgtttgtcggcggttgtgccattcttttgaagtattgggaccgcctcaaaaaaccagcaaaaccacgagaaaatcacaaaaagaaaatgtaaaattaaaatgccaaattcaattttaaatttgttttcaatttaattttaaatttttttcctttttttcagtttcatctccgccgattgttggctttgtgtgttcgatttgctgccgccttcccaacttggcctcggaattgcaatgatcagtcaccgatttggcatttacgtggacgaacacttcaaaacacgcaaatgggcgctgaaatttattcaaattcacagcaaaatcagggagaatggcaccaaggaaatggaaattgtcaagaactatggaaaagaattgccaattccgcaaattcaattgccacgcaaagtcatcggattcgaatgcatcgagattttgtaaaattggcgattatataatagccaacacttcccatcttttttagtttcatcaaccaaaatgtcatcgcttttcttcaccgttttcgccaactcttcgccaaatgtccaattaatttgtccatccacacgaacaatgaccgcattttggacttcattttccacaacatttggccaatgttcggaaaaaacattaatcgcttggaattatccgccgcaactttccaccgtttgcgacatttcgtcccgtcaattctcaatgactgtccatcacttcgcattgtcaaattctgtgacgccgacaatttcttccccgaatttccggccgatgacagtgccatggcgtcgaatggacaaacgatggccaaatggcttttcactgcccttcctgacaatgtgccgaagatgttgaaatgctcgttggacaaagatgctgggaatttggtgcagaaatttgaagccttcaaaacggtgcttacgaattgatttatttgacactttataatctttgggattcatttttcggacataaatcttattaaataaccatttttccatcttttaggcatttgccaatgcgtcttcctctgccaatttcattgtcgtcatttggtttattaattggtctttt

SEQ ID NO: 2729 - DNA, 4717 bp, Heterodera glycines
ccgcgattgcctattcaaaaattcaaatataattgcctttctattaggcttctcgacacaactcccggcgcaagtgatcagcagcagaagtgaatgaaatgaattgttgagaagtgaccgatcaatttgaattatggaattattaaagtgctcataaaaattgttcctttttgttgttgtttgttgttggaatgatcaatttgtgtctgtgtaaatcattagtagggttgcaaccccgacccgaaccccgacatttttggccattttcggggaaaaccccgaccccgaaccccgacgcttccaaccccgaaccccgacccttaaccccgatcggggtcggggttaaatatacactcctaagaacggaatttttgtgggggaaaaagcaaaacatttatacaaaaattgattttttttaaccatcttgacaaatttttatgaaatatagtaaattttgcatatgttttcttatatttttgtggtttagtggttgttgcttcaacactgatagcacttttattatgagttcgagaccggttgactgtttcctttttaatttatttttatatgattaataagattttttaaaccaaaaatacctattaaaatcaatcatccttggcctaatttatagacgtattgaacccaattttattttctttgaataaaaattcaattttttgacaaaatcatgaaaatttacaaaaaaaagaaaaaaataaaaatttaccagaaattcataaatttttggtgaaaatatgttacaaaatagaccttaaatttcaaaattcacccggcgctgcctatcggcatcgccggcgccacaaaaaaacctattttttcttaaaaaaaattggcccaaaatcgaaaaaatctatcattttttggacaaaatctgttaacaggcccatccaaattttcaaaatttttcacggcggcgcctatcggcaccgccgaacccatttctcctaaacgtctttagaaaaagagcgccgcaaaaaaaggaccaaaaaaaagatttatacagattttcgctgaaaattggccattttaaatgccttatgtgtttttaaataattctatacaaaatatttatgataaaaaaataataaaaagcacataaaattattattacgaaatttaaatatttttaagcaaaaattttataaagttttttgactatatggtataaggcaaaaattgaaaaaccccgaccccgaccccgaacgatttgtcaaccccgacaccgaaccccgacgcttccaaccccgacaaccccgaaccccgaattttccaaccccgacgtcggggtcgcaaccctaatttaaagtaacaaaatacctatatataaaaattttaattaaaaaaataatattatgcgttaaagcattttcaaaatttaaatattaaaatttttagaaataaatgatttaaaaaatagattattttatcctattctcaatttataagaacccccaaatacattttattcaattcaatccaataaaaaataattattgtcatattcttcattaaaatatggaatatataataatttaattaaaaattaaattattttatgttaaagcattttcaataatatatttaattttttttagaaatagataattgaaaaaaatagattattttacaaatccaaatttctcaacttaaaagatcccagaaatacattttatcaaactcaatccaataataaataattaattatcatattctttattgacgctctctttctaattgcaatttgctttgaatcgagatcaaagataatcgtacaattaatataattagcaaaaaattcagaatttattggatagtccaacatgaggggtggtatgaattaattgaaatttaaacaattttcatgtatttcatcgaccttacattttttaaatgaccataaaaatgtgacactttaattacttatttgctagtaattctttttcagaaacaaccaattttaatctgcttataattttgaatataacatatattgttaattttatggatttgtaaatcaatatttggtattttgctatattttaaaattattttacaataggataaaaaacatattggaggtcgtagacaaaatataggaatgaacgtatctattgcaagggaatttaaaataatcaataattcttctaaaagtagtacgaatcaatagaaaaataattttaaatatttatttttaaagattaataattttgatataacctattatctatagcgcacaaaagagtaagaaaaatgtgatgaatacaatttttttatatttaaaaatctgattgagggaatatacattttttacttcttttaaaagagtaaaattcaccatcgaaaaataatttaatatggctattttaaattcaaaaaaacataaatattaaaacattaaaatatattttaaaagcaatttaaattaaatcttctattaaaaacattcataaataaaataaaaatgtctgcctataaatcatttttacccatttaaagagatgaaaagcatgtgcatatgattcataaatgaataaatagtttgtctgcaaaataaaataattattatttaatataaagcgtataaaaacttaaacacttaagtgaagataaaaaatttaattttaaataagattaaaaaataaaaatactatttaaaccaatttttaaaagaaaaatttagaaaatgcagcattttgtttttaagtgctaaaaagttgcattaacccgaatttttttttatttggatacaaataaactaatgttatgtgaattgttaaaaattcttgaaacttttgccaaaatttcaccatctttcttttttcggcttcgatcagaaaactcgacggcataataaaaatttgaaactcagacttatgaacagattttcacacatggcacacgatacctgggagacttgaaattttgggacccgatattagggaccaaatgagcagaatgactcatgattagggcagcaaaaaatcccgaaatcccgaaatagttaactaaaatagtgagtaaaaatcccaaaatagtgaagaaatagtgacaaaaagtccaaaatagtgacgaatagtgacataattttcagccaaaaattaaaaaataataatttttattcactatttgcagttgcaaatgagtaggactgggatttttaagaccaaaaaacccaaaatagttacctaaaaaaatttttaaaattaaaaatttttgccaagaaagtaaatttttgagaaaattttttttcatttcataggagtatattttgaataatttgttgctttgatacctttaaacactcaattcttttgtttatttgctgcgattcttttaaaagaggtttattaagttctaaattataattcttattttactatctttatttaatttaataatatttggatttatttaatatttatttatttaatgttgtatctttgtaattaaatcatggatttccacagcatcattgtatgatactctttgagttttgtgcctgtgattaattggttgtttattaataaaaaataaattaattttgttttttttaatattgtaataactttattattcaaaattttatctactattatattatatttcgtttaatgtaaagtaacgaaaacgtttttcggaattttaaattaattttattaagaaaaattgttcaaaatttcaaaaattttcaaccttttcctccttcattgtataattaacttttaaatgtttacaacgctcggagtccccaatcccccgaattagtgtcggggggtcgggggcaaaaagtcggaggtcggggacctcgggggacgacatgtcgggggtcgggtcggggaatagatccaaaaaacgtctcgggtcgggtcgggggccggggggctcggggtcggggctgaaccctagttaatataaaatgattaatatttttggattaaaacaagcatttcttttaaattcttttctatttcatgcgaatacgctccacattgaactcattttgactgtttctttatgaattaaaagtttcattaacataaaatagatacattttgtcttcataaaatatttggggatttactttattttatgtaagaatattttttgttaattttttattttttatatgtcagttttttatatttttaacgttttcaattcgaatttaaatccattttttgtttattaaatatagcattttatttattcaaattggaattaacttaagttcaagcatttaaattttttatattttattaagttgtcaatgaatttttttgttttttaaataaaactaatacattttcttttggattttatttttaattaagtgtcgaataactgatttttttaatgatttccaatttccttctcccaaagcagattaacttaatattttattgactaaatattttcatatgttattaggaatattaaaatgtttaaaaatttttagttaaaaaatgtaaatatgattattaaatttttttacttttaaaaataatattattatgaaagcatctttttatataagaaaattcgcgaaatatgtaaataaaatatgtatgtaaaaaaatgcaaaaatatatatgagatatcagataaatatttaaattacgtaaaaaaccataataattctctcattaaactagggagatttttcattaattaattaactaaatattttagtgaa

SEQ ID NO: 2730 - DNA, 1865 bp, Heterodera glycines
ttttttcttaagaaattcatataaaaaacagagaaaaatgacaatgacagtcattttttcttcaaatattattattggctaacaatttcaggcaaatgccatgcaaatgcttttcattctttgcttttgagcacctccatattattgcttctctaaaattccaattgttctttcatttattttttcacacacaaaatcaaaaaccaaaactaatccatttaaattgaccagttgtacagtttttttctcttgaatttttataaagaaatgattgatttctttcaatgattttaatcagttttactaagctaatttaaatccaccgagaaccatcttaataatttgccgcgacaaaatgtcagacaatggaaatgaagcggaggacgaaatggcacaagcaatgtaaaattaaattaaaatgccaattttcaatttcaaattttgttttccttttcttcagtttcatcgccgccgactgttggctttcggtgttcgattggctctctccgcgtcaacttggcctcgaaattgcactgatcaaccaccaatttaacatctacgtagacgaacacttcaaaacgcggcgctgggcgctgaaatccatagaaattttgcgaaaaattggagaaaatggcacaaaggagatgaaaatagtcaattacgctggagaagaagtgccaattccgcaaaagccgttgccaaagagagtcgtcggattcaaagccatttcaatagggtaaaatggatgaattaattgttttcaaatgtaaacgatttcgatcatttcattttcacagatacatcgaccaaaatgtcatcgtgtttctccgccgttttcgtccgcttttcgccaaatgtcaaatcaatttgtccatcgatacgacgaattatcgcattttggacttaatttggtgcaacatttggccaatgttcggaaaaaacattcatggcattgaattgtccgccacatttttccgccatttgcgatattttgcgccgtcaattctcaacgaatgtccatctcttggcattgtctctttctatgctgaggatatgttccccgaatttccgcccgccgatgaaaatgccgcggcatcggatggacaagcggtggccaaatggcttttcacaccgcttcaaaacaatgtgccaaaggtgttgaaatgccagttgacgatggatggtgggaattggtcatcgagaattgcagcatttaaagtggtacttactaataatttgtttatttggcacttggcggtctttgggatttgttgataaattttttaacattttaggcatttgccaatgcttcatcgcccgtcaatttcatcgtttccatttggtttcgttcgtcttttgcttcatccgttgtgccatttgtgctgaccaacgaattgactcgtgaacaattggcattggaaaggattaacaatagccatcgttttctgctgatccgttgtccaattgtacgaaatgcgagccaatggacaaaatgggagaaggaagcatttaattggcgaatttatgatcagcggaacagaattaacattgaaatttttaatgaggatgacatcggcgattggtcagcgaagaatttttcaaatttattttttgcattttcaatttttaggcttatcgacgaaactcccgacccgagtgatctgcagtagaagtggatgaatgtattgttgagaagtgatcgatcaaattatggaattattaaagtgctcataaaaattgttctttttttttgttgttggaatgatcactttggatttgtgttatgccattaggacaatttctgtataaaacttcacaaattgcattatcattaattttatattgttccctggcattattctttc

SEQ ID NO: 2731 - DNA, 4058 bp, Heterodera glycines
  unsure (1)..(4058): unsure at all n locations
gggcaaagggtgtctattcacntcgagcgaaatgtgaggccgggtggaaaagtcgatgcnaactcgggtctttccattctttttcattacggccaaaatcggtgctgcncaatggctgactcatcggtttgatggctccaatctgcaaaagccggtccaactcttcgttgacggcattgagggcgccgtgtgggacgggtcgtgccttgcagaatgttgggtgagcatcgggtttgagaatcaaatgggccttggctttggtgcaatgacctaatccggggccaaaaacttcagaaaaatcagtttggagggcctttgtgagcgattccaaatccgaaattttgtgcgttggctgaggaatggccatggcgttgatttctgctggggctggttgagcttttgggtggatgtcggggtgcatgatttcacgcgggatgacttccaaagcctcaatccagggcagtccgaaaagatcgtaattgatttcggaactaacgtatgccacaagctttttgggtgcttgattgggttggcaaacggtgcagacaaattttccttcgacgttgaatggaacttcattacagttccgcgtttcaatgtcgggtttgtcgagttttggagaacccagctttttccacgttttgagtgtgagaatggtggcctgagcaccagtgtcgatgttcatcaaaatcttaattccattgatgatgaacgtgagtcgccaccagcggcctgctgcggttccaattcccatgcagtgggatttgacaacgacagtgtggacggatcgctctctgcgatttttcgcttggttggagctgcgtcggcatgcctttgcaatgtgcccttgtccttggcatttatggcatgtggcttccttgaatcggcaatccgtacgccaatgatccgattctccacatgagccgcacggatgagttggtgatccgcggcttgccttgccgtaattggtgtttggtggacgcgcgggttgcccctttgcattgttggccctcttgggttgttgcggtgttttgcctttcgggtccctccactgttgtggccgggtgtgaatggcatgggttgcaacaggaggatttgccaaagtgagtgcgctgtccttcaccagctgaatggtccttaattcctcttcaatttgcttgagcgtgacttgcgtgccgtttttctgtgcttcttcgagcatttttaggcacttttggcgcaaatcgtggtgctcgtcgcgtagtgcaatcacgaggatgatgcacttaagttgctccttcgtcaagctgaggtcggcattttcacaagcggcgttgatgtgtgccaccaaggatgtgatgtcttggctcggcttttgtcgaatttgaaagcattcgaagcggcggacgaaaagtgagcgggtttcggcgaacaaatccttgagctttgtcagcgattcgccccatttaacctggtccggttgggacgggctaatgctgtctctgtatttgttgtattcgtcgtcccccaatttgccaagaagaagccgaactttggtctgttcggggagttcctttccgtcctcttcgatgagcactccaaatcgcttaaaccaccggtcaaatgtgttgccgcattccgaatcgtagtggaatttggtgatccggttgtccaaggagctggccagagtcgcgtgtgccagtgaggatgaggccgcgtttgcaggtgccgcatttccggcaaatcgtgcaaaaactgcgtcaagcacttgctgcagttgggtggcgtccattggctttgactcgtccgatgatcagcaattaaccacgcagagtggctcctcacccgcctagggactattggatgtcgaaattgaagaaaaccgcgtcttgcggaacctcacccgcctagggtctattggtttttgtcgaatttaaccgctaaatttagcggacctcacccgtcttgggactattggttttgttgaggttgggttgcagttcggtgtgtcttcgaatgggtgaagcacggctgctgactgcgccaatgttgtgtctcaactttggacacacaataaaataataaacacaatttatgtcggaggtcaaatgcagtacaaaatgtaaaatagcaaaatgaatggagaaggaaccatgtggggaaggagggagtgcttaaataaacaaaatgaataagggggagggattgacacgtcacaacattaatcaataatcgatgcgcgccaaattcaaattctttaacactccaacacctcccttctttaagctgaaccctcaggggtttggcgagaagcggatcggcgctttccgttggcgttgcgatcgacgcggggccaaaggaggactcggagatcgtcgctttgcctgagtccgtcgaattggtgccggttgcggaggaggctcgcggatcggcgatgggtcccggtcttgctcttcttgagcctggggtgggatccttaccgtatcattaccgtcctcttcaagaggataacggtgacgcaattggtttgcgtgccgatgtacggctcttccgagtgccggaacgtggacacgatacgtcggggatttttccaatcgttcgatgatggtcccattaagccaaaatcgttttccacgattaaagttcaaaagcaaaacgggatcttttggcaaaaactcaaccgattttgatccgtggtgttgatcaaattgacgggccatttttcgcgcataatcagcttgtgatttgcggattttggctgggtcgatgacttcggcttgttcttccttcggatggacgagagacagctgagttcgaagccttcgaccgaagaacaattgatcgggcgaaagtccgttgagtgccgaattcggggttgtcctgtaggcgagaagcatcttttctgcccaaaattttccatctttggcgcatttcttcatggcccttttgaacgtatcaacgaatctctccgcttggccattggattgcgggtgatacggcggggtgaaggtatgtttgatgccaaactcgctgcaaaattccttaaattctgcggcatggaattgagtgccattgtctgacacgatttcttctggaaatccgaggcggtagacaatggatcggaggacttggagcgttgctggtgtcgaaattcggtccattctgtatacttccggccattttgaaaatgagtcgatcaaaatcaaataggagtggccatctgaacagggaccggcgaaatcaatgtgaatgcgttggaatggtcgtgagcaagacgtccatggagcgagcggtgctttgggtggactcttttgggcgctctggcaatcttcgcattgcctgaccatacgctcgatttccaagtccaatcctggccagtacacgtgctgacgggcgagggctttcatgcgcacaattccggggtgtgccatgtgtagagccttgatgatgcgttcacgaagttgggtcggaacgatcactcgctttccgtagagcaaaactccatcaatctctaaaatttcctttcgcttaggaaaataaggtgagatatcggggtcggtgcacttttgaggccagccgtttttggtgtgatcagaaatttttcggaggacttcgtcttttggcgtccattctgaaatttctgctttcgtgatcggcaattgatcagttgcagtttggaggatggtgttgatgtagcaatctgtctctgtgcagatatttgctatcaaaatgtcttcttccggccggggataattggcgattaagcgggacagtacatcggcttgtccaaaggatgacgtgttgatgtactttatgtcgnnttcgtnnttggncctgntccgtgcccngcgctgnngncgncttgccgcntnnntcggtnttccctttttngngccnnntntngccngcnntggcttgtggtccttgngnngcgtgnntttcctnccnnntnnccttcggtggnntttctggnccgcnnnnncgngggcccntgcttcctttaggntttggctgtngtttttctgtgcgtcgttgcgtatctaatggcggttcaatgactttttccgatttgtccgtaa

SEQ ID NO: 2732 - DNA, 2846 bp, Heterodera glycines
tggacatgatcagtgcccagcgttgaagacgactcgccgcataaatcggtattccctttttggagccaaatatagccagcaatggcttgtggtccgtgagaagcgtgaatttcctaccaaataacattcggtggaatttatggaccgcaaaaacgagggccaatgcttccttttcgatttggctgtagtttttctgtgcgtcgttgagtgtgcatgacgcgtgttcaatgactttttccgatttgtccggaaaaatgtggctgattgtggtgccaattccgtcttttgaggcgtctgcagccacgacgattggaagaaacgggtcgaaatgggtgagcaaaaggtccgacagcatgatttctttggcctttttgaaggcagtttgctgttcgtcggtccattcccatttcacgtcctttcgcagaagctggtccagtggttcgcggatttcgcgcatggactttataaaccttccataataattcaatgcgcctaggaatgagcgaagtgtgctcaagtcatgtggtggcggcatttggcgaattacttctgatcgtccggggtcggggcgaattcctttcgcagagatgacgtggccgagaaatagcaattcgggctggaggaatttgcacttttccaattggattttaaggccaaattcctggattcgtttgaagagtttgtaaagggaacaaacgtgctcttcaagcgttttggaggcgattatgccgtcgtcgaggtaggcaaacgcgcctgggatgcctgagacgatttggtccatcaaatgttggaaaatagacggcgcagatttgacgccaaatgggaggcgctggcattggaagaggccacggtgggtgtttattccacaaaggtgtttggattcctcatccaattccatctgcaaatacgcgtctcggaggtcgagattggagaaatagacggagccgctgatggccgtgtaaatgtcttcaggccggggcaaagggtgtctattcaactcgagcgaattgttgaggccggtggaaaagtcgatgcaaactcgggtctttccattctttttcattacggccaaaatcggtgctgcccaatggctgaactcaatcggtttgatggctccaatctgcaaaaggcggtccaactcttcgttgacgcattgagggcgccgtgtgggacgggtcgtgccttgcagaatgttgggtgagcatcgggtttgagaatcaaatgggccttggctttggtgcaatggcctaatccggggccaaaaacatccgaaaaatcagcctggagtgcctttgtgagcgattccaaatccaaaattttgtgggttggctgaggaatggccatggcgttgatttctgctggggctggttgagcttttgggtggatgtcggggtgcatgatttcacgcgggatgacttccaaagcctcaatccagggcagtccgaaaagatcgtaattgatttcggaactgacgtatgccacaagctttttgggtgcttgattgggttggcaaacggtgcagacaaattttccttcgacgttgaatggaacttcattacagttccgcgtttcaatgtcgggtttgtcgagttttggagaacccagctttttccacgttttgagtgtgagaatggtggcctgagcaccagtgtcgatgttcatcaaaatcttaattccattgatgatgaacgtgagtcgccaccagcggcctgctgcggttccaattcccatgcagtgggatttgacaacgacagtgtggacggatcgctctctgcgatttttcgcttggttggagctgcgtcggcatgcctttgcaatgtgcccttgtccttggcatttatggcatgtggcgtccttgaatcggcaatccgtacgccaatgatccgattctccacatgagccgcacggatgagttggtgatccgcggcttgccttgccgtaattggtgtttggtggacgcgcgggttgctccttggcattgttggtcctcttgggttgttgcggtggtttgccttttgggtccctccactgttgtggccgggtgtgaatggcatgcgttgcaacaggaggtgaagccaatgtgagtgcgctgtcctttaccaattggatggtccttaattcctcttcaatttgcttgagcgtgacttgcgtgccgtttttctgtgcttcttcgagcatttttaggcacttttggcgcaaatcgtggtgctcgtcgcgtagtgtaatcacgaggatgatgcactttagctgctcctttttcaagctgaggtcggcattttcacaagcggcgttgatgtgtgccaccaaggatgtgatgtcttggctcggcttttgtcgaatttgaaagcattcgaagcggcggacgaaaagtgagcgggtttcggcgaacaaatccttgagctttgtcagcgattcgccccatttaacctggtccggttgggacgggctaatgctgtctctgtatttgttgtattcgtcgtcccccaatttgccaagaataagccgaactttggtctgttcggggagttcctttccgtcctcttcgatgagcactccaaatcgcttaaaccaccggtcaaatgtgttgccgcattccgaatcgtactggaatttggtgatccggttgtccaaggagctggccagagtcgcgtgtgccagtgaggatgaggccatgtttgcaggtgccgcatttccggcaaatcgtgcaaaaactgcgtcaagcacttgctacagttgggtggcgtccattggctttgactcgtccgatgatcagcaattaaccacgcagagtggctcctcacccgcctagagactattggatgtcgaaattgaagaaaaccgcgtct

SEQ ID NO: 2733 - DNA, 8949 bp, Heterodera glycines
tgtacgacgcgtccaaccccacccaaactaaataaataataggcaaacattaacaactatgataccgtatcgggtgttcaataagccaacggctacaaacttctctgaaaaagcaattccaatcaatcagaactctctcagacaatcgagtgatctgtatttgtgtgtgaattgggagaccttaataggttattacagccttattttgcattaagctcaacttagtgcccaacaatatcccaagagtagcccctttctaagttggaaatgggaattctcgaaaaaggatccggcacggatcgacatcttttgtcctttgtgagttgggcatcgccattggaagccatcagtaggaaaacgtcaagcatgtcaaataaaggttttaaggaatatgcatttggaaattaatactttaaatttatatttgaaggtaaaatgcaaaaaaatgggccatttggagcaacacaatcaaacagcaaaacatatcaaaaattgtgatcgttttttgtcgtcaaaacaaaagcaaccattgatcagtcaaccgtttgttgttgataaatttgctgctgaattgtgttcaatgctgctttcagcgaatattcctctttttaaagtgaatacatatattcattttttaacaatttaactttatttaaggtaaataatccttcattcaaggcttttttggagaaatattgtggaagatccatcccacaccatgaaaccctcagaagcaattatgtgaaaaattgttttgaaggggtaaaatttgaaattttttgattgaccaatttttttcctttaggttttgtcaaaaatcaaggacgacattggcgaaaatggattcgtttggtgttcggttgatgaaacgacagacagaaatggacgctgtatggctaatttgcttattagacttctgaatgaacgttggaacgcgccgcatctgatttcggtgaagccactgttggacgaaaatggtgacccaaaagttgatcatcaaacggttgctcgttttgtggacgagggtttgggtgtgttagacatattaatgttttgattttatttattttagcggatttgctatctacaggagcaaagaaaaatcggcttctttttatggtgacggacggcgctgaatacatgaagaaggcggctcggaatctgcgtgttttctatcccaacatggtgcattttacttgcctcgctcatggactgcatcgaatcgctgaagagatccgcaatcagtttaaagacgtcgacgaattaatttcttctaccaaaatggtgtttcgcaaagcaccgtcacgtgttgctttctacagaaagaaattacctacagttcctctggttcccaaacccatttatcacacgatggggcacttggcttgatgccgtcaacttttactctcacaatttcgaagacattaatgaagtgaatgaattggtttaattaatttttttttaaagtttcaggtcgttgattcatttgaccctgaggaggcccagtgtattgccaaatctcagagatgcttttcgatgacaacagtgccccttgacattgcctacattgcggccaattttggttctctccccggagcaattactcgtttggagaaggaggggcttacgatacacgaatgtgccaacattctggtgtgaagtccgcgaagctgtcttttcgtcaacggggagaaattggagcgaaaatccgtcggaaattcgatagcgtcatcgcaaaaaaccccgggatttgatacaatttgcgatattggaaaaattctttctggtcaaaaatcaatttcggtatgccccccaatctgatttcactttacaaatacgctcccttgacttcatgtgatgttgaacgatcattttcaatttacaaatctattttgactgacaatcgctcacgtctatcgtccgaaaatcttgaaatgttacttatttgcaatgtgaatctcaataatgatttggcataatattttttgctttttgaataaaattttgtcattttacacccctaaatttgaggatttttagtgcctattttccattttttagtgcctattttggggattttttagagcctaaagcctacctattttggcggtttttagtgcctataaattgcatccctatttattatatgctgtttggatcttaatacaaacattcgaataattagatttttaagtcaaaaatccgtcctaataaatggaaattcagagaatctatctttgaaaatccaatttttatttatcaaccttaagaaactaatttaaattaatgaattttaaaattattactataattttaatgcacattttttgtttttcctttgaaatgtcgacgagtaaaggtagaatcaggcatataaaaataaaagtttcaaaatttaataatattttgaagaattgaattgttggatgggctattcaatggtcggtccgccgttcggcgacgacgacgaatttggcccactgtttgagatgaattgcaccggcgaaggtgtgaaatgcatcagcacaaattgcatttttggtatttttaatttcaataaaaacgacttgacaatttattatgattaggaattaaaaattggaaacaaaataaatggaagcccaaaaatattacaaaacatcccagtcgatttaagattatcaaaacttacaaaaatgggctggatttcgctttcacatcattcaccttttggccctttcacttttcatcttttattttgagtgaaaggcaacgatattatatttctatgaatggcattttgtggagaatggcaaaaatattattgaaaaattgaaagtcataaattgcaggcaattttggcataaggcaaaaattaatttgattttcatttaaaaaaaaagctttacccacaaaacactgaaattcatttgtttttggatcatattataatatcaacaccaaagttataaaataaataatgttgctgaaaaaaatttcacctttaaccgttcgccattttcatatttttgggcgatttctcctttcactttttattttcgatttggctcattcctagcctaaaataccaaggccctcggaaaacactgagcggggccctgtcctggccgggctctattaattaataattataatgccatcactggcaaatagacaacaagcacagcggcaccgcgctgcgttaccacagttgcagccgtgacgagatgctatggtgccgagcgcaccaattgcactgcgagaaaatgttcaacggaacggtgtccgaatgtgcgaattgtgccgaaaatctgtgcaatgccgaaaatgcaaatttggcattttcagataaaacggtggtcggcacagcgatcggaggtgggacaatgttagggagggggtggaattgatcgcaaaatgatcggagttatttttgaaaacattttaatttttcagttttatttcttctcggcactttgttttactgccttctgaggaacagaaaaacttggcaaattcacacgttgatccttttgttctgttccaccattttaaaactctgaattttgtccaacaatttgttaattcgaattaaattttgcattgtaaattaagttgatttttggcgcatttcgcacttattccttttattttaaattttttaactttttctttaacactaattgaacccttttgctccactaattacccatttttcaactttcattgctcaccacccagcgaattcattgcttctttctttgggatgataaatgtgtgctgattgattcgctcggatgaatgaatgtccgcctttggttggtcagtttttgagttgatccattgacctgcttctgtcgccgatgggttgcttaaaagggcacaatgccatcaaaagtgcacactttgtaaaatgcgaaaattattcaacataaattttaataatttaaataaaatagaaattaaaaaaagaagaaatgccgcttttttctaaagaaagtataaatatttcatattttttagagaattctacttaatcaaatgcttaacgcgcaaaaaaaatttgcaatttttgtttttctttttgagttttcatgtaatttccttacggcaaataatgtgaacaaagttggcgaaggaaaacaacagcaacaacagaacgcatatgtgtcagtagatttgtctaaaatggcatcaattaaattattaaaaataaaaaaatatataaaataataggttttttattttaaaaaataatgaaagatctaaaaataaattaaataagtttgacatattttaagcactgcgccaattggcgggcgtcaaagggcgtatgggtaaatgaattttcatattttattataatattaatcatggtaaactcattacagctcagttatccaacaacaaactcttagctcatcaagctcagctgccaatgataataaacaaattttcatcggagtgcctacgcctccgccagtgccaccgattccgtacggttacggtagtaaagggtaaattctttttaattgacttaattaaatcagtccaaagcaatattataaaaatttagcatttcgcaaaatcaaactgccaacgatgcaccatcaaatagcaaacaaatttaccttggtgtgccgacggcgccgccggtgccgcgcgtgccggtacagcacgatgaccgtagtaaaaggtttttgtggggtttttaaattgtttatgacataggattttagtatttctcaacaacaaaatgccgcaattgacaatgagcagtcaaatggtggtaacaataaacaaattttcatcggtgtgcctacgcctccgtcagttccgcgtgttccggtaccgtacggttacggtaataaagggtaatttttttaattggcttaatttaatcagtccaaatcaatattagacatttagtatttcgcaaaatcaaactgccaacgatgcaccatcaaatagcaaacaaatttaccttggtgtgcctacgcctccgccggtgccgcgcgtgccgtactcaaaccagcagagagcagtggccagagggtcattaaactctatttttaaattcatggaatgccctttttcgatctagagttgccctgaggccccagcaaagtgtcaattacgcgccgacgcctccgcctattccgccaatccccgcaattccgtattacccttaccatcaggcaaaacggagatccatttccgagaacgacgaacccttttcgatgagcaatggaccgcaagtaatgaatgagaaggaataaaattttaaatctaaatgtttttgtttaattttgttcattaattttaattattttcagcgaattttcccccgcggcggcaacaacaaatacgtctacgttcttcataatcaaaaagatgctttgttgcgttaagaaattgcgcttaattatgtatttatcaaagaatttttaattatttttagtttagtaaatcttttttaattggccacacataattatgaaattatttttttaaattaaattttaaatgctctttgacctctaattgattgattggctaatgagtcgcataaacaaattcacttaatttgatgggttcgaaatgatggataaaatatccgatgaatggacagttgtcgttcatttttactcatttactgctgaattccaatcgccaattgttcatttttctcattttttttgtcaataatttacctcaaacgtgttcaagtactctttaaattttaaaccttaaaatcccaatattaaagcctttgatccgaaagaatatttctctttccatttttaaagcattaacaatttaatcccaaaatcctttaaaatttagtcaatttttttaaaattccgccctctaaactctgaaagaattcatgaaacattaataaacaattgaaaataaattttatttttctttgttaaaactagggttcctccccgaccctcatggagagaacagtcggggatcgggcaggaaatcacccagaaaaagaatggatccatttaaataattttcaccaaaaaattgatattctatttttgattttttggttgcttaagaaaaaaaaagaaaactaaatttaatattcacggtggcaagtcattttttttaaagcaaatttgtggtaaataataaatttaaaagcaaaaagacaattcttttgtgccaatgccctcctccgattacgcggacaatgaggcggacgatcgaatcaaagcgccgccgagtgaacgctttctgaactattcgctgtttcacaattactctccgtacggaatgcgttcgttggcctacgattatgccaaatacgcggagcggaccaaatggccggtgaagaatccgtgcggcaccatccaattcgaggacgagccgcgcacgccgcgctttcaattttggagtccgttgacggcacgatacgagtgcagttacacacagaacgtatgaggaggacgaaagcagaggatatgagcggactgattgatcacttaccgatcagtatgaattgattataagacaaaaaaaaagacaaaaaaaacagacaaaattaaaatggcttattgaagacgcatgaaaatttagtttttggcatcttttttattcgatttgatgaagcctgcccatgtttttgacaaggttttgtaagcgttttaaactgaatgagtcaagagaaaaagtacaatatttgaaaccaaacaaaaaaatttttcaatatgaagggattttaattaaaaagaaaaaaaatattatcgacgcccgtgagattcgaactcacgcggggaaaccccattggattagcagtccaacgccttaaccactcggccagagcgtcatgtcaagctaatgcttttttttttatttcaatattcattttatctagaaattttctccattttttttattttaaagtttacaaaatgaatgcaattataatattataacttttataaaattgctttatcataaataaataaattagaaaagagaaatataaattgagaaattctttttttaatgttttgaaaaattatttatttatattcgattttttatctgtaaattcacaattatcatttaattaattttgctttcgttagatcattcccggattcgcatcataatccaatacagaaaaccgacgaaacatcccgtggaggacaaaacagcgaaaacaattgcaataattaatccggtggaggccaaaaactggaatttggctgcttgttgctaaaaaatgtttgataatcaacaaccaattgtgactcaataaaataaatgttttgaaaaaagattatttgactaattttgcccgccgtgcctctccttccaattcgttaaaattcagtgaatcattcccattgcgttgcaccacagattgggatgtgcaaacgatcattaaaaagaggcaaatgatttgaaaaacggatgggacagaaaacatttctgtaatttatagaaattctattcaaaaaaaggtttaactgattaattaagaacaattaatgaaaagcacaaaaaaatgtatacaaataaaaagtgatggcgggataaattccaagaacgacagaaatgcgcggggggcggtggcggcgatgggatggattaagcagcaacggacgacgcgtcgataaggaaggatggaaatgcgatgggatgggatgaacagcggaaaaacgagttgggcggaacaacaaaaagaaaaataataatggacggagagaagggacgaatttggacaagaaatgccaacaaaaccatcataataaaaaataataattagagactaattaaaactttaatggacaaaaacaatgacaaagcaatggaaacggtggcagacgaaaagttgttgattagtttgattaataatccaatgcaatttatttactctctctctctcatacaaatttaattacccatccgaaaattcattgtgacaattgacaattattttgggtcgacaattaagaaacgtacaaaaaacttcacaaaaataagagaaatttcttcagtgtaatcaattaaattacaaaaattttgctcatttgtcctattaattacaaataaatttggttccaattccgatcagtcgtcccttctccgcttttcctcctctttgtcgtgtcccgtgtcgatgggccttttctcgagataaagactacacgtcttttggtccccgtccatgcaacagtaataagagggcaacacgtcgtgccaccaatggttccacaacagtgagccgcggtcagcggtgccggcaccttctgacaattttaaaatttattaattaccactaaatatttatgattttaatcagagatattctgtaaaaatggataaagtggaagggtccggaaaacggcccgatcttggtcaattaaaattaaattgtttagtatttctaagaatagaaatagcgaggagtccaggttcaatggccagccctaaggctgtttggctgatcagtcagtgcccacccgttccatcggtgatcagttgcccgtttctgtagcagcactgctgtccgcccgggtcgtcccccgtacgggcccattgccaaacggaggcccaaaagttggcggaagagcgaaagcatcggtcggcgcccgggtggtgcacgtgtggtggcgatttgtcctcggagaaggtgccgttgcgcttcgcctgctgctcagtgggcggacagcggggcaggcggaggtgggcaacgccgcggtcggaggcgaaccattgccggcacttcgctgcccttttgtcggctgtgttgtaaaccgttttgatcacattggtggagactgaagtggtgaaaagaaaatggatactttgctcaattctcagccaaatttgctcataatgagcatggctaatggaaaacataatttaatttggtgcgcatctctttttgaaatgttcattgaccccagggttttaggttacccttaacttttttcatca

SEQ ID NO: 2734 - DNA, 954 bp, Heterodera glycines
  unsure (1)..(954): unsure at all n locations
catttttcattttaatataataattattttttgggttaantttcagttcagcaaattacaagtctaaatttgatgatgttttgggttgatggcattttgggtatgaccatttaaatttcatgtagttctcatatttttttgaacaaaaaaggacgaaatatttcaatttcaaggttttgattttaagaaattttttttactaaaatgttttatttaaaattttccattttccggccgagaccatagaatgtgattttcaagtagattgcttaccgagaaaataaataaaaacaaaaatttttctttcaaataaaataacttttcagttaattaaaaatttatttaattttaccaaacttttcagcctttggcaaaaatgaaaattgatgagctgaacaaaaaatgaaaagcagcagcacgatcactttgtgggcagacataatgaaaaaaaattattgtctaaaaaagtagggatgtaagggcgaggaaaggaatccgcggtattccgaggttcgatcccggattttgaaaagcatcccggtcccggtagggagggcaactgggaaccatgaaaaacaagcactggtaagaattggggtccgagagaaaaacagtgaaaaatatttgaaagaaatgtacatttaatttttcgctaattactaaatttctttttagttggtttttactttatagctttttttaacaaataaccccaacaaaggaatgtgaaaacattttgagtttaattcttttttgttttttgttaatctggatttgaaagaattggcaagaaggcctataccccaataaatttttaattctttttttgtccaaaaaaccttgaaaattttattcccttttcgaactttttgaaaatttttcaaaaggtcggccatttggatgcatttttattgcatttttggtaagaaatttttaatgccgnaattaggggca

SEQ ID NO: 2735 - DNA, 6160 bp, Heterodera glycines
cggtctgcccaatggtcaattggtgaggctaacgtccattaactggctaccgccttgatggattagtcacacgtgaaccccctcaacgcaaccttgccattgaatacatggggtgcttttatcatggtaaaaaaaaaggtcgcccttttcaaccgaacaaaaaaaatgcttaaaggttgccccaagtgttacgctaacgacagacaacaaaaattggcaggtggaaggacagccgaagacctgtatgaacgaaccaagaggcggctatttgaactgcagaatcagcatggctttgagctggaagttgtctggggatgcgaaatgaagcagcgtctgcgtgctgatccagaatttcgccgggtgtacaatgactcattcgttccaagaccgcttgatccaagagaggatgcactacgaggtggacgcactgaaccgtttatccttcagtacacttgcagtccagacgaagagataattctcattgacattgtaaaaaaaaagttaggagaaacaaaaaatattttttcattgttaaaggtgagcttatatccatatgtgatgaaggcattctcgtttccggttggtaacccacgcgttctcacgcgagagacacttctatgcgcaccgacatcaccgcttccctggtgttctgtcgacgcgaacacattcaaagggctgttgtttgttcgtgttctgcccccagatcccgctgtacacccgctaaaagttcctttgcttccctatcgaactaccgacgggcgcctaacttttccgctttgtgcacgctgtgctgacaaccgacaacaacgggcatgcaaacacattgatgcgtcaagggcatgggtttccgcgtaattttatgaaattaatccatgtcaatttactttttttgtcccggtgtttagatacacccatgttgaattgaacaaagcactggagcttggctataaagttattgatttatttgaggtaaaaataacgtatcgtttattagactaaactttaaaaaaaaaaggtatggcattatgaagaatgggataaccaactgtttcgtgactatatgaacacctttgtgggtcttaaagttcaagcaagcggttggccatccggttgtgataccgatgaacagcgcagagcctatgtagatgaatttaggcgggttgaaggcattcagttggaccacaacaaaatttcaaacaaccctggacttcggatggttgcggtaaaaaaaatacagaattacaatttttaaacttaaaaaaaaacacacacacagaaaattcttgcaaactccctctggggaaaacttgcgcaacgagtcggtggaacggaagttcgttatacccgaactccagctgagtttcatgcactgctcgagaatcgcaacatcgacattattgactttcatcacgtctctcaccatatggacagagtggtagtgaggaaaaaggctgaatttgcaaaagcaccgtcaaccaactgcttaccaattgcaatttttgtcacttcatatgctcgtctacacctttatgactatatggaacaagtgctgcgtcttggtcataagctcctttattgcggtgagccaaaaaaaaaaaattttttttttcacctttattgacctattattcaagataccgattcaatttattacgtgacacgcagcggtagacagcaggtgcctgaaggtgaagcgctgggacagatgaagagggaacattgctcgaggcgaatatacgaatttgtgtccggtggtccaaagaattatggttttcgccattgtgatcgcataaatggagaggatgagcgtgctgaattgaaagtccgaagttttcgtctctcatattctgcgcagcaactgctcaacttcgagtccatgaagcgcattgttttggaacattacaacattgatggacaaatgttaacacatttttctctcacataataatccagaaaaaatacaataaaattctattccacagagatgatgtgctggacatggaaggtgttcatgttgtcccgggaagcaacgcgtcgataagaatcgaatttccacaaattggccgaactccatgttcggatctgtacacctacgacgctcacaaagactaccaacctcattatgtgaaggggcgcattcgccccagcatggaaactgtaccattcggatttcgtgaagcacaaacggttcaagaacaagctgaacatcaccaacgacagctgaatgattttgataacaacttattaattgttaaccttcccggatgctcaaattggaatcaataaaaaaaaaaaaatgtaacacatagtagaagaagaagaagaaacttgcaagcgtttgtcatacagaaagaaattaataatttacaatatctaagaacaatcgcaaggcatgagacagatgttcctgctttttggatcctgtaaaaatgatttttccagaatgataggctaaacatgtgaccaaagcgtgatgattgtctacaacaatcttacaacgcatagcgggaaaaattgtgggatcatattggatgttacgaaatctgtgtgggtccagtgttggtataaaattcaacagaggcaaacgatggggtaatgtgaatgaaccaactatgtttgtcacacgtatctcatggagttctaactgagagcccaaagcatgctgcacccttcttctgattttttgcgcctcgcgtaccgctctgtttggacaagggacacccgttaacaccgcacgggctgatcgaaatagaagacacgcaagagtgcgttgttgaggcagacgcagtcgtataatgattgcatggaatcgttggggatcgtactccgagttgaatccgttttgagcaattttcaaaaactctgtgtttgtgaagggcgtccgctgtagttgaaatgtcactgtacaattttgaatagttaacatttattttttttaatctgacattaaaaaacgacaatatttgaattaaaaaaaacacccgttcatcatgcatcatcatcatcatcacatcactaaatcatggttctttaacaacaacaacactaagacactcaagcgggaacagagagctatgatcaccaccaccaaattgaagaacacatggcagttgggggtaagccagctttataccatgctttacatagtagtagacgcgcacctaaagtgtattgtacacatagattggttaaatttaaataaatcaaagacaaaccgtaatgccaagataaccgcgcatagcatatgcagtttgagctggatgaattgtcagttcgttgcaatggacgcgaatgtttttccaggcagggcgcagatgattggtgcgtaaatgaagattggaacgcaacatttccgaaatttctctacgtttgctcagcgtctgcagcagaacgtgaagctcattcattgaacatttgtagtgtttgcagagaaaatcaatcaacggcacactcttctgcttttcattgcaactgcacttggtttgtggttgcgggtgctttggcaactcaatgttgtctaaatttaaaaaactgtttttaatgtctaaaaataactaaataaacctttcacttgttccagttccatttgatcattttgcaattccctcgcccgctcctcctcctcctcgatgattttaagccaactcatttgtccttcctgaaaatttattttatttttttactaatatagttttatttataaacttttttcataaaaaaaaaatacctgtgttgctttatcttcttcttcatttcctgttgtcatcttttgttccgggtacgcattgtggagccaatcggtcgcaagaatcgcgtccatttgtttaatagttaagagattattattattattatttctgtaaagctttattgtgtatatataatattttttaaacatggataatataagataaaccgttttgcaaaaaaaaaaaatggcagacaattttcaaaaatttgatgaaaaacacttacaactcagacacccgtttacgctgacaatctcagggagcacggggagtggaaaatcggaatgggtgctacgaatgctgaggaatgtgaatgcgctagtttcggaacccatctcggagattttctactgttatggggagttgaatccaaatataatacagcttcagaaaagtggacacatcggcggttgtagggttattgtacatgctggaagcccaaccgaagagcaggttaatcggcgcgcaaaagagtgtgatggaaaactgttgatggtgttggatgatctcatggttggattgggccaacaatttcttgacactgtgttcacccggggatcgcacaattggggggtcagcgttgtgttggtcactcaacatttgttcgcaaaagaactgcgggttgcgcgcaacaactcccactatttggtgctgatgcgtaacccggcaggcgcgctccaagtgcggacgctcgcctctcagctatttccaacgaaaagcaactatttcacggaagcataccgggatgcaactgaaaagcaatttggctacctactaatcgacatgcaccccgagagtccggaattgttgcgcctgaaaacgaatatatatggagagcagggtggtcttcccccattggtttatgttgcaaaatgaagcatgtcaaaagaagaaaaagactaacagataaacatactatgaatgttagcccgctgatgttgaaaaatgctgacttcttacaccactttcgctcaaaatatcgctcaaaaagcagacagcgcaaaatgatagagaacgctttggatgagcagttgctctgttttgtggagatgggtttcaatgtgttgaagggtcgtgttccgttagggaagcgacaaattcaacggttggatgcattgaagcaccagttgaggcgcttagcacgcgcacgttgcgcaaaaaccgcgcgcagagtactattattgaatcgtcaagaccaacaacaacaacaacaccaaaccggtgctggctttccggtggtagccagtatgctgacaagcattctcttaccaatgttaatggacaaattactgccaaaaactaattgataaatagataaaaaataaatatataaaagcgaaacagctaagagagcactcgtttaattaaacatttagaagagcgcaaaaaatgcgtcacgcaatgcgaatgtttctcgtcccggaggacgtctttcagtcggtatttgttcaaccccaagcagcaacagcagcagcagacggtgccgacggtacaccaattgggcttttgcgctcacgcatccaacaaattgagcgtagcagggagctgaacgaagagcagaaggccgcgcaataccatcaggaattcaaacggctcaacaaactggtgcgcgagcaggaggagcagccgatcaatgttcgacttcagcacgaaaaggagagagaaaaaaatgcagcaacgccgccgccgccgccgccgcaaacgatcgatcattcaacgccaaaaagattggagaaaaacattgtaccatcagcgtttgggttgaggaggcaaagacaccactacacacaaaaggcgggggcattatcaaatcgcagacctgcccaaaaacaacaaagaaaagcagcagcagcagcagcagaaacaccaaacagcagtggaaatggagaaacggaaaaagaagagggtgatgtagatgatggggaacagtgggacgacgcacaatcatcatcgtccacggtgtcaacaggtggtgccgcaccaaaaagagtgctcagagcaagagatggggaagcaggaaaaggaggaggaggaggagaaacggctgatcgccttcaaccaaaacacaactaccagatgacccaaaaatgcactgatcacacacattcgaaaaaaggggcacagtctgggagtcagtgatcagggaaaggttttgcgcgcagatgggtccgagtttaaaacgagcaacgtggaggcaattgtcagccattttgtgaacagggacaagcgaaacgaaattcaaaggcgcgcctgtgggctacaaggaatttgctgaaaaaggttagagaggatccgttgctaaaaaaatatttgtttcccgaaaagcctctacaatttggcaaaggcctgactgacttttaggcatggaaaagggacataaaaaagaagtgccaaacggggaagagggaaaa

SEQ ID NO: 2736 - DNA, 798 bp, Heterodera glycines
ttattttcgaacgcacttttatgtacccgaaaactgattctgtaaaacaacaagcttaaatttgtcattgtaagtttttgaaccggcttaaaactcgaaaaatttggcatttctaacttttttaaatgaacagatcctgaatttttggcgaaaatctgaaaatccggactccaataattgcctcaaaataatcactaaaccggatttttccaaaaatcaccggttccgttttccgagtccggtaaaaaccgggcccggctcggtctctactaatgatgatcaaacctaatcctgaatttaagcctaaaaaaacaattaaattttgtgccatttatgcgtttgtcttggttttgccttttctttatatttgaaggattattgctttttccccattttaacagacattcccttcgcttctcccttttcgttcccttctgagccgtcgtcgtcttcgaccagtaacagcagcagcaacgagaacaaccaaagcaacgaaatcaccgccagtggcggcgctctttccgaggctccggcgatcgatggtttttaattttcaaaaaaccccaaaattttaattaatttcattcctcttttttgatgagcttgactacgaaattggcaccaaagtgttcgtccatcgtgcgcttggcaaagtgttatatgtccaaccggcggccgacgacattcggcaaacgacgggtgccattggtcggtttggagaggaattattggcggggtccataaaaaccagaaaaaaatcttcggagggatgaacccgccgaagacttttttttgccc

SEQ ID NO: 2737 - DNA, 2050 bp, Heterodera glycines
  unsure (1)..(2050): unsure at all n locations
aaaaaattttntttgaattttttttctaaatgagaatctttctgaaagacgaatttttttcaaattttcaaaaaattcaaaatgttcataaaattattagaaatattttttgaattttaaaaaactaaaaaaaatcattttaatttcggtttaacggaaagttctaataaaaatgaatagagtccctaattctgttcggtttaacggcatttcaattttcttaattttttgaagggattgccaatgacatggagtgtttcccgtgccgcgtgtgctgttcgccggaccaaccccagcgcgtgttcctcacccgggcggggctggagaaacacgcggcggagcagcacccgcaaaagctggacgaactcagcggcatggcccagcacattcaggtggaggggacggaccgtttaattttcctttcaatttcttcaaaaagtaaaaatttttagtgccaaaattgtttttggcaacaccgtttacctcaatttgcgattttagtatttttttattcgacgcattttttggaacagttcattctctccaaaaaaaaattggtataaaaaattttaagaaaataaaaaattttttaagttttttcaaaatttcgcgtttttatttcctccccacgctttgtggcttcttaaaaagttcattttcagaatgtgtgggccaatcgacgatggcaccagcaccgcggccatggcggaggagcgacgatggcaccgccaccgctatttgccgtccccagcacaacgccggtggtgggcgactgttacgaaacgatggcgaatggcactggcggcgcactgccgccatcagagaattgcgacacggtcactcaccaggtcagcagaaaggcacgaaaaattgatacatttgcctggcgagagcgtggccagtggaaatctccgccaattaaatttttcacggcgttccaaatgggcgatttgggcgaaaatttgttcaaagggcaattttttttctaaagaaaattttggggtcgaagttaaagaaggttttcgaatccccctccaaatttttttccatttactggcctgagtggcgaattttttcatttaaatttcaaaataaaattggcaattttaaatccaattttatcggattgctccgaattttttcatttaaattcaaatttacaaatacaaatttggaaatttgtctaattgtaaggaatgcgcccattgcaacgcgctgttcgacacgcgctgcggtggccaccaaatgcgcgaccatttagcactgcaccagcagctacataatgaggaccaaattagtgccgaattttggcacggcacagcggcggtaagagaaagagagagactaattaacggacggattcgaaaaccatttagtgtttaattgcatttagtgtgtgcaaccagcagccgaagcaccgagtcaatgccaccaccaattggctcccaatgttgtccatgccgatgccgttgatccaagtctaagtgaccaccctggccatgatggcattgccaatgaccgttcccttcgcccgcggcgccgtccacgccaatgcctcccgcgtcgttacatgtgccattggtgcgcgcgaatgtttgacggaattgcgcagctgaacgcgcacaagcagcgcgcccaccgcggcattggcatggcagcggtgccgaagacggcgacggtgggggacgacagcgacgaagacggacagcaaagtggggacgaacgggtgcggaacagcggcgagagtggtggatgcgattttgctggcaccgcggaaccatctccacctccaccagcggcaggttgccaaagagttcgggaaattaatgaaagcaaataagtattttgggaaaacgggaaattttagccattttgagacaaaatttttgcaaaaaatatttaaaaaattggccatcagtggaaataaatttagaaagttttcatcaaaatcgttanataaattgagtanagttctaaaaaacacttttctaaacaattttttaatggctgancatgagtggtgtcagtggtgctgaccggagcaggttta

SEQ ID NO: 2738 - DNA, 3014 bp, Heterodera glycines
  unsure (1)..(3014): unsure at all n locations
agagagagactaattaacggacggattcgaaaaccatntagtgtttaattgcatttagtgggtgcaaccagcagccgaagcaccgagtcaatgccaccaccaattggcccccaatgttgtccatgccgatgccgttgatccaagtctaagtaaccgcactggccatgatggcattgccaatgaccgttcccttcgcccgcggcgccgtccacgccaatgcctcccgcgtcgttacatgtgccattggtgcgcgcgaatgtttgacggaattgcgcagctgaacgcgcacaagcagcgcgcccacagtggcattggcatggcagcggtgccgaagacggcgacggtgggagacaacagcgacgaagacgaacagcaaagtggggacgaacgggtgcggaacagcggcgagagtggtggaggcgattttgctggcaccacgggaccatctccacctccaccagcggcaggttgccaaagagttcgggaaattaatgaaagcaaataagtattttgggaaaacgggaaatttagccattttgagacaaaatttttgcagaaaatatttaaaaaattggccatcagtggaaataaatttagaaagttttcatcaaaatcgttaaataaattgagtaaagttctaaaaaacacttttctaaacaatttttgaatggctgacaatgagtggtgtcagtggtgctggctgaccggagcaggtttaccaccactggaaaaatttttataagtaggtaactttaaaaaaatcagagtttttttaaattttgacgaattactaagtttttcaaagtatcataatccgattctcggctttatcattaacaccaatttgtgaatcgttttccgtcaaattggccaaattgtttcccctcccctcccattgctcagattttgtcgctccaatgcgccccattccctcagcctttgagcgtcgcgcgcggctgtcgtcttcgtccattggcatcgatgcgcccgcaaagttcgctatttcccgatttttgtggcttataaattttttcgtttcatggtccaatgccaactgtgcggcttggtcatggtccgtccgtcgctgctcgtccggcacatggcccgggttcatcaacggcacgccaacttcgacgcccatgtaacgcgggacactcacaattcagtcaaggggacaccggatttttacaactttttaaaaatttcttacttacaattagagtattttaaaaatttctctgacctagaaattttttaagaaaaaaactttaggaaaattttttataaaaaaatttcaagaaaaaaatttttaatttagtcagcgaatcttaggaaatttttgagaaaaacttagtaactcatcataaaattttgaaaatgttgttcccccatttcacacccaatcttcgtcaggtggtctatccgctttggccctccgtgcccccgttgcgctacgccgtcgacgaacatggccagctgagttggatgtgttgcgagcacaaattcgtggacaagtccgttagtaaggcccacgtctgaagggccaccacgattttaagaggatgggacgctaatttagagcaatttttttcatcaatttccgtcggatttaagacaacaatttttttcttccaagtttaaatttttaaatgaccatttccaacagaatttcaaaattttgactcaatttgccaacaaatttactcgaaaattatttttgatacaataaggcatccaaatattctggtctctccctgggagagctctcaaggtcgggttcatttatttttgtttttgacccaaatttttttgaatgtgtagtttttctttaatgatttgctgtccaattttcccaaaatgaccatttagggctgcactgcttcgtcaccgcgcgactgtacattacagcaacggaacacaaacaacagaaatgaccaatgcaatggaacaacgatgaggggagtggggaaatacttttttttgttgctatttttagaagaaatttttgtaagaattgtttatttcataattatagcacataaaaattggtttttaattgtttgaagtccaacgagagtctcggctctgtgggatgttttctcttccactctcctcgtctgtctgttcgtctgtcaccactcccttgcatttctctttcgctctgcttccactgtcttcctcctctgctgctgctgctgctattacttcgttttctctctcttctttcgctgtctgtgcctcctctccctctcgcgttgttttgtctgcggtgtcttcttcctctctttctctgtccccgttgttgccgtacactctgtccacaattttaccagaaaaataaatctcttaaaaatgaaaattttcttaaaaattcatctccaagatttaattaatttctttatttcttgataaaaatttttattttaaaaattatatatctcaataatgatttgatttaattttgttacttttttttataaattttgtcatttaatatctcctaaattcatgcattttaattttacattttaaataccaaaaatcttaaccttattcgttaattcactatatggtatttttattcactattttattaatttatgtaaatgaatttggaatattaattattaacttatttttatgttatttccatgctaagcgttcggcattgttcacgtcggcattgttcatttttcgaattatttgttatatatacgtcagggctcccatcgtccatcctccgtttccaaggacgggtatgccgatttgcaaggacatagcggggaaaattcatgaaattcaatgacatttaaaatttttattatatgcaatgcaaaatggttaatatttattcaaatggcttgtatttttcaccggaattgtttttttccaacatttttttgttttcacttatcattttcttcatttacgacgacttttttctgctttaaaaacgctttttttgtggcgcgctttttccaaaaattttgtgggacagaggggggggggggggg

SEQ ID NO: 2739 - DNA, 2443 bp, Heterodera glycines
tagagcccggcgcgggacgggatcccgcgcgggattttgcgggatcccagtccgcaatcccgcattttttggaaaatgcgagatttgcgggattaatcccgcgggatcccgtcccgcaaagaattttgagttccaatcccgcaggggatccgcaaatttgattttttgtgcgggattatgcgggattttattgatttttttgaaaatttttctaagacagaatgccaaatatttttaaataaattaaataataaatttaattaaagttaactcatttttcatcgcaaatttcattcaaaatttgtgaaatttccccggcggcacctatcggcaccgccggataggcttttcttaataatcctgtagaaattgagtcaaaaactgggtcatttggtcaattttagacaaaatctgttaccaaatcgcattaaatttcataaaatttctcgcagatgtcgataggcaccaggtatggcacggaaagacttccgatttccgacatttttggggtaggaattccgacttccgaaatttttgatgaaaagtcggaaatttttttaatttttcttttcaaaaaactagcaagttttgtacaatttctgttaataaattgaactgaaatttttaaaaatttcccggcggcgcctatcggcaccgccggaccctaaaaatccctatttttcttgcaaaatttgctcaaaatcgcaaaattttgtaattttttggacaaaatttgttaacaaaattttcccggcggcgcctatcggcaccgccggaccctcctccaagttcccaaaaagtttttgaaaaaatcgcgctgtataaaacgtgtaaaaatagtcactccttttcccaaaaatgttctaaaataatgaaaaatgacaaaaaaaaatttgataaaatattgaataattttttcaagcgtatactaaaaacatttgtgaaataccttttacttggttaagaattaaaaaatttagcctattaaaatatttagaaattttttattatattgtatattttttgaaaaatttccgatttccgacgtttttggggtcggaattccgatttccgacttccgaaaatttttggggcctcggaatgccatccctgatagggaccgccggaccctctgttcctagttttttgaaaaattgcaccgcaaaaaagtgggtttgaaaagaaaaaaatagtcaatttatgaaccgttaataatttgatttccgatcaactttttaccgtcggatccaatcgaaaaatcttagtcgacccatcaaccccttttaatgcatcccgccagcccttaaaaatttatttttcagcattttttgatttttggaaattttttgaatttaattgaaattttttcgaattttccaaaatcccgcaatcccgcgcgggatcccgcaaattttaaatgcgggatttgcgggattaatcccgcgggatcccgtcccgcaaagaattttcagtaccaatcccgcagcgggatccgcaaatttgaaatttccgggctctaactgggatcgacccatttccatgctgccgtttccataccgccatttccataccgccgtttccacaccagccatttccataccggccgtttccatgccaccgtttccataccgccatttccatactaatttgtaaggtgtttaggccatttccataccaaaaatttttcgaaaattttcaggtaaaattcaataaatagataggggtttttcaactgtttgatgcttaatatgaattataaattcaatggattctcttatcaacgttatagattggaaaatggaagcaattctaacaaaaaggaaccgtaccaagcttcaacacaacggccattcatacatttttcacaagccgagtgccgatggtgaagttcgcttttgggcctgtgaacaccatcacgcaaaagacatcacttgcaaagggcgccttcacactaacctcagcaacaacgttttgcgtgaagttggaaaccaccagtgtgaaccaagtgcagctcgaatggaagcacaacgagtgatcactggaatcaaacgccgggcggaacaaacaatggaaccaccagcgacaattcgctcattggcactccagaatgtggccacgccagtccttgcgcaactccctacgaagaatgcgatcaaaaaagttttttctcttttttttttgttatgagatttttgtgcttaggtaatcaagcgtgtacgccatggaataaacgcacccccgccaattccaaacacgctcacagacttaatcatcccagacatacaaaatgtattcgcgtacggacgaacagagcgagcaatttttgttagccgattcgggtgtttaccaagaaaacgggagggaacagaggtaatatacatgcgcactttttaattatttaaagtgcaatttagaatactgatatttggacgtgaatcgaatg

SEQ ID NO: 2740 - DNA, 2893 bp, Heterodera glycines
ttttaccgtcggatccaatcgaaaaatcttagtcgacccatcaaccccttttaatgcatcccgccagcccttaaaaatttatttttcagcattttttgatttttggaaattttttgaatttaattgaaattttttcgaattttccaaaatcccgcaatcctgcgcgggatcccgcaaattttaaatgcgggatttgcgggattgcgggatttgcgggattactcccgcgggatcccgtcccgcaaagaattttcagtaccaatcccgcagcgggatccgcaaatttgaaatttccgggctctaattaaaactaaacaaaattcaaaaataaaacggaagcaaaacgaatgcttgtcattagcagatacaaaataagtacgattgcataaacaaaaacttttcattttttaattcattattacatttatgtttgttcattacaaaattttgtctatttactaacatattagtagtataaggcacctttaatccggccccaaaatccccccccccttcccttaccaaaatccccccccttcccttaagtagtagtatatagcgtcaaaagcgagcgggttccgagcgggtgtttaccgcacaaacccgtgcctatgtgaggggtggaaccttttgaagatgccgccaagagccaaaacctatgggaggggtgcagccccttgaagttgccgcccgctcacatactgagcctatgggaggggtgcatccctttgatgttgccgccttgtggattttaatttacccaaatccgtgcgggtgtttttttcacccgcgccgcgcagcgccgcgggaaggtcatcaatcatccacctgtcacaatgtgacaggtgaagaaaattcaatttttcttttgcaaatttaaatctttttgatcccaaaccttttgggccggttttattttctcaaatcctgagattttttatgatgggtttttcggatcctgaaattgaaaattctttttgaaaattagccaaaaccgtgcggtttttatcacctctcccctccctccccgcccgtccggcgatgcgatgccgccgccgcgaaaagtaatcgataatggaatttggaagaagtgcaaattaattgatattggcagcaaataatttcgattatgaattggacaataaaattactatttaaatccaatttaaaagtaaaatcaaagaatgaataaataaattaaaaaactttttcaaaagtaggtcacctgtcaaccaaaaattgattgatgggtttttatttctcttccattatttccgggttccgagcgagtgtttcgcgcacaaacccttacctatgggaggggtgcagctctttgaagttgccgccccggacattttcccgcacaatcccaagcctataggggggtgcgtgccaaccgaaacctatgggctgtttctttgaagtctgccgccttgtggattttaattcccccaaatccacgcgggtgttttttcactccgcgccgcgcagcgccgcgggaaggtcatcaatcatccgtctgtcaccaaagtgacaggtggaggaaattcaattcttgcaaattaattccaaatctttttgctcgcacgcaaactttttgggcggttttattttatgaaatcctgagattttttatcaagattttttatcctgaaattaaactattttttaaaatttgctaaaaccgtgcggtttttgcatatcttcccttcgccgcgcagcgccgtcatcaatcatgcacctgtcactaaagtgacaagtaattttcaaaaattcatttttttattttgcaaatttaattccaattcttatttatttattttgaattttaatcaattatttgatcccccgttttccaattctcaattatttttgccacctccccagagcccctaaacctcgcgggtttctcgctgatgtttcccgcacaatcccaagcctatgggaggggcacacaaacttttgaagatgccgccctaaaattccatttccccgaatccgagcgggcgtttaccgcacaaaccggtgtctatgtgaagcgtcaaacttttgaagatgccaccaagatgcaaaacctattggggcaaaccgaaaacatattagattccctttgaagttgccgcccacataaattcgatttccccaaatccgtgcggttgctttttttgcacatccctccccgcgccgctgcgcagcgacgcggaaggtaatcaatcatccacctgccaccagagtgacagggggaggaaatttgaattcgttaaaaaggtgcttttttaaagtacccaaaaccgtgcgggtttttgcatttcctccccgccccgacgatgaggcacaatgcaggcgtcgcgcaaattaaatcgataatgaaattgtagaagtgcaaatttaattggtaatgcagcaaataatgccgataaataaattaatgaactggacaataaaattaattatccaaatccaatttaaaaacaaaatcgaaaaagaataaataaatatgatgaaaaaaaacttttccaaaagtaggtcatctgtcaataaaatatgattaatgatttttagcaatatgggccaaaaattttttaaaaatctttgattgataggctttccgtttttgaaacgatttcgcaatatggacccatttttgaaatgattaatgagttttatccttttccagcacaatatgcaagtgacagacccaaaaccgagcgggtaccggaatggcccctccaaaatccaaaacctattgaaggggtattttcctttgaagttaccgcccgcctgtcgctgttttttgaatgctgttcattaaaatttaataatacgtgtttaaaattccaaatcctagaaaaagagcgaaagtgttcttactgacataaagataaagaaatta

SEQ ID NO: 2741 - DNA, 3749 bp, Heterodera glycines
tttattctgttgcatctgctttaagagtttttttaaatttatggtttcaatgaccgtagagataaaagcgcaaattgccatcactgagcttgtaaaaagatcgtggagtggaggataatgccaaggaattttgcggacaaagtctgaacgaaaaaggcctgcttatcattggcgattagccttttgactgacagagtcaaagtgaaattttgagatttgattacggcaaaatgagaaaggaaatgtttacaatttacagacgaaagaatttatattgttaattaatgagatattcaaattttattatgcttttatatttaattcatcagttttaaatgcttttgctcaataaatttatttcggtgaaattcacacaatttattcagttaaactttgcttctatcaattttctttctattttttaagcttcaagcaaaagaaaagagtaaaaacgatttggaacactaaaaactaacggacaaatgagtcaaaagagtccgaactttggacctaaaaaaatgtttgacacgtcattaaattcccgcattttaacctcccaatcagccactttttcattacacttttatacttagagattaaaaaacaaatatggatttttatttaataatattagctaattggtcccatgggagtttggggcgggggttcaaaaattaaaaaaatggtaaatgattaattaaggtggtaaaaactcagaaagcacgccaaacccattcggagatgtgctttttcgcatttttccccatgaatctgttcaatttgccaatggaattgagcattagttcagccgaagcatttggcatttacacgccctttttcaattaaaactttgttttcctttaaatgcataattaatttctctttttttttacaaatccgctttttcctttcattgtctttgtcgcatttcgtgaaggaaaggcgtgggcagcgaacgaaccaataaacgccgtgggaaaaactgggaaactgacgaaatttactaacagattttataaaaaattaaaatttacacaattaaaaatttatgtccaacagtcgaagcatctcaaaataaggacaaatgacaacacattcaagggacattccgtccaaagaatattcattgaacagtaaacgttcttccattttggtcctaattaaaaaaatattttataagtaaaaattctgatcaaatttaaaaggtgaaataaaagaagtaaaaggtgccaaaatgtaacttatcacttgtaattgtttcattggattgcataagtcttctctaattatcactttttcgtccctttttcctccgtttccgtcgtaacttttgccatcctccgcttttcctccccctcccccccccttaggcttcgtcctttacttttcttcgtttttgcttataatcccttcgctctgaaaaataaacaatggacaaaaggcacaaaaagtgccgccaaagcccaccaaaacccaaatgttgttaacgcgcgtgtcattcgcctcccatttttggcgtgaccatttgtttctctcctttttattattcatttctccgccggtccctggcaaaattaaaatgcgaggaaaggcgtgcaaatggtccaaatgttcccataaaatccgtcctccccttttgttcgcatcccttcgcccgtccattcgtccgctgctgcactcttacgattagtgccaaacattccctctacacaatgctttatctcaaatccttatccccccttgagaccaaatgcgcagcatttgctggttgatctgccctaccaaattgacttttttttgtacttcactaatcagacaaacgaacaatatttatttaacagctgagaaaaatataattaaattcggcagattatccttttttccatttttagaataccgaaaagactatcccttagggttaaaggaactgaaaatccgaaagttttcttgactaagagataggttcttgagaagccttcccttttatggcacagtacccgagtatcaccaacgtttgtgtcaaggaactgtttgtcttggccattcgtccgttcgaatttcgcttcttcccattcccttggcctttgccaatggcttctcatctgtctgtcactgttcttacgtcaataattgctctttttgttcttcttctggcactccacggaactgctcccaatcagctcaaaattggagagaatggactttttgaggaatatttgcggtgagtggcggtacaattgaactttgaaaatgccattgaatttctaagcttttccatgttaagacaattggacaaacgaagtccgttgaaaaaatcggacggacttagcgattttgtcggctctctcaacggcgccgcgcgacttcgctacggcaaacgaagcgacggattaacggccgaagaaatcgagcaaattctttcgcttaatcggtaatagtgaagctgcagtccccgttttctaaaaacggtgcttttcttatcaccttcaaaatgattatttggttttaatttccgtatttcccagcattcgtcccgaaaaagagtgaaatttagcaagacaaacatttccaagtcgaagacaaaattggaaaatgaacttaaaatccataagggacatttggaataatttaatatactttcacaaaaattttaaaggtaaaatattcctgaaatatgggggatttataaaatatttaaaaatgaaaaaatattttttaattcatttattcgttcgttaatttactataaaaatttaaatttacatgcttttactatttgccatagaaagtggcacttttcgatgctttccatggaatcgtgtccaattattctgatcacattattgtttttggagtcataagctcaaaataaagatttttcttgtgaaataattaaacaaataaagctaatcggttgaattttacagatggaaaatgccaaaaagagttgccaattatgcagaagcattgcccatcggtttgctcgaccaactgaacggagcggaaaggttgcggtaatgagcggcgaaagtcacaccaaaaaatgccaatgaaaatttagatttgggcgaaaatgatttgttttgatgtgtcggctcttcaacgtcgaccacttcagccaaataattaataacccatgcagtgacaaaaataatattgacgaacatttaaatgattatcacgagaaatttatggcatggcactaaagtccgttaagaaaagatgacaaacttaggtaataaagtttagtcaaagacagtttggtgcttttatgcccatataatcaccattttattgcttaaaatttgcagccttagttgatcaattgaacaggcacaagggcatatgacagatgattgagacgaggggggggggggttcgagacaaaacttcatttgacggtccaaaatttctccaataacgacctttttttgctttacttttgacatcatttttttgcgaccgatgctgataagggaaaagtcgaaatttttattgtgatttgtaattagtagagctcggcctggacctggatttttcctggatgcaggtccaggtcaaatatgaaaaaatcaagacccaggcgaaaaaacgaaacttgtaggttttgctactccccccccccatacaaatgtcatgattccgacaaggaaagcacttttctagggtaattttaggcgctgatcacgaatatgacttgacaactgaaaaatctgtgattttatcaatgatttccatcatgcgatttt

SEQ ID NO: 2742 - DNA, 2655 bp, Heterodera glycines
  unsure (1)..(2655): unsure at all n locations
aaatcattccggggaaaaatagaattgtggaaaattttctttttatttttttgtttgaatttttgtgtacttggatttcacaaatttcccccgttatgtacttggaaattggcatgcctgtacttggaaagtgacttggtacgatccgagccctgtatatatatatttaaaaaaaaccagtaacatgtctaaaacccaaaaaagtgccctgagggccgcggagaggccagccagtagagagcatgcgaagacgggggcatatcagtaaaaatttgttgggctataacttttgatagagacatagtagaaccctgaaacaagtaccattcgagactcgttacttatttttaaaaatcatagatttttgcaattttgaagtcagaatattgatcagcgcctaaaactaccctagaaaagtgctttcctttgctgagatcataacatttttatggggggtagcaaaacctacaagtaccgaaaaaacctggatttcctggacaacattttagaatttgttatttcaagtgactgatgtttttttcaaattttcaaaaaagtgattaaattgatttaaaaacacatttagatctttttagatgttcctatgcaattaaatttttggctttttaaaacaaattttaaaaaatccaggtccaggcctgggttcaggtctcgaggagcctggattttcttcatgaagtccaggtccgggcttttttcaaaataccgagttctagtaattagatgcgtttttttcctaatcaggcatcaaaacatatcttctttattaggcggagggaaaggggcagaaatttatggcccatttgttcaaaattataatttatcattcactctaacaaaaacaatgacaattttcacccgctaattgtaaggtatttttatcctattgtaagtcatcactaggagagagtcaaccacggaagcctaataattgggccgagaatgaggagaaacaattaaaaaacattccccggtgtgccccaaaggatcatcgtaaatggctcttccataaactgcttgaaattctgaagccaaacggcgcccactgcaccgtccaccactcggtgatcacagctcaaagttactttcagcgaagtgactgcgcggaaactgaaaacaaaagttatttaaaatctgaatactctgaactgttcgaaaaacaccgttcgtttgaatccgatttgtcttcctcttccatagggacgagcattcgacgcgcagcgccaattgccaaaatgcaggactgaggtgggtttatgatggccgtaaaatggtcgacacttccaaacattcccaagttagacacggtgaatgttcctccctgaaaaccgaaagtaacggagttggacaatgaaggtacaacttgaaattcatgcggctgcaatttgccttcacgcgctttcgctgccaatgcgtgcacttcgttgctgattgtcgcaacgcccttaaaattggcgatggaaatggagcaatccgttgcttggattaccttagtgtgtgcgtcgaaaatgatcggagtgatcagaccgacgtcggtgctaaccgcaaccgaaacatccaccgaactgtgctgccgaacgaaagagcccataaaggaggaattagcctcgggaacacgcaaacaggcgagtgcggacgcctttataataaagtcgttgatggacaatttcgaaggcattttttctcctttctttttggcctctctctccaacaaaatgttcaatttctttctgactctgaaaaagaaacgaaaacaataaacgacgaaacaaccaacttactcaagcaatttgtcaatttgcatttcagaagtgaggtaataatgtggaatcgtcgactttgcctcactaagacgcttcgcaattgttttgcgcatgttcgaaagcggaatatcgatgaacgaagaagcggagctttgagtcccacggctcggaaattccccttcagcctttgataaatcggcagccaaaatccgcccactagggccagagccagaaaacgactgaaattgagctgattataacatattaaatttgaattttttaaaatgctttaaaataaaactaatgtaaattaatctctccacattaccccataaaatagcggttttaccgcctatgatcgtttgacttgggcatttaaccaccttcctatagatcgggttcattttacccaccgaaaggtcaattcccttttcatcagctaatttcttggcatatggagaagccttgacacggctttggtctgacatcacattctgaggcgatggctgtgactgttcgggttgtgccgtggggagtgtcttttgcgtgagtttggtcgtttccggggtccctttggcttcgattgtttctggcacactttcctcgcctttgaagtctttgaaagcgttaacatcttcttgtttctcaacaattatgcataagagctaaaatggaaataaattgataatttgctctgaattgtcgtaaaaataacctttccaatgggcacatccttcgtcccttcaggaataatgatttttgccagatagccttcctccggcgnttcaaacccatcgtcgccttgtccgtctcatctcacaagcaaatcacctcgctganttggtcaccttccttcttttgcatgatatga

SEQ ID NO: 2743 - DNA, 1108 bp, Heterodera glycines
tttgccatgatatgattgtacccgattccattgttggactgagggcgggcaatggcactttgatatgagttgggtaggtaccttaaacaacaagactggcaagtgaacatttttagtgtaattgcgagcccctctttccataattattttttcgagaaccgccgtttagcaacccatttattcgaacccaaagttgaaaatctgcggtgtccatgtccgtgctcatggccatgcgcagcgagaacattgtactgagcgacattagttgacttgcaccgaatcacatcgataagcacaacatttgtaatttcattaggcagtgctttgaccgcagcaaatttttgttgctgaagtaaaaccgatgcgagcgataaattccgcaaggaaaaggaatttaaattacggaaattgcaaagcatttctgaatgaaaataattaattgcaattatattaaaatagaccaaaataaaaaaggatccaggaataatagtaccaattgtgggccctctttttaaatcgacccaaaatttctgatttgaatgtaatattacccgaacccagcaacttttttgggcagacttatcttttgtccgaaagataagagatatattggggaatatctgtatttagccaaaccttgaaaaatacatgtacatctaaccgctcatgttaattaaaaataataatttttgaaaaatgtaggttgaaaatgggctgatcatttacgcacaaaaaatgtttagtggtagtggcacaagagatttttgttctttagttacattatgccaaattaaatttttaaaaaatccgctgacccacaaaaaaatttgcaaaccaaaatgaccccaccccttggtggtttttaataaaattcaaagatgtgtaccacattgcaactagaaccaaaacttctatagtctcattgaattcgattggatgcctaaagtgcaataagaccaatttcggcaatcctaaagtatgggggtttctatttaaaaaaaattttttttttcattgaactcaaaattggtatttggggcttttcgagggcgctgaccacgaatctaaagtcggatttgcccaattccgaacacccgacctgaattcg

SEQ ID NO: 2744 - DNA, 3544 bp, Heterodera glycines
  unsure (1)..(3544): unsure at all n locations
tgattataaatttttcgaaatcanaaatatttcaatccgacttcaaaaagatttcctcgctggaatcgttcgtaatggtcattctatctcagccgtcatgttcttgttgcatattgtcgctaccaaattgtccgaagtatggaaattattcttatcattatcttgtattttttggatcggttactttgcatgtttttttctatttagactcgtttcactttccttggtctgctggctgtcctttcatggccggccttattcttcgtacattatgaacagattcacaaccgagattatctgatcagtcgcttagcactttctgcctttacactgctcatcagcacagcacttctctttttaccaaaaaagccgaaacgcaagaaaagaccgaacactttttacaggttaacgaaccaagacgcgccaataatctggtcataatttagtgccttttccgttgccagcactcctctctcgcaacgttcacgttttactcgggactcatctgttacagattttgtacttgataattcaaaaagaatgatggattttgaggacgatgaccaatcgctttcttcaaaatattctacgaaaatcggaacttcaaatggaatcagaaataggtcgtttttggacaagtcgaatttactgtccaagtccgcgtaagttgaattcattttccatacaatcccatagaactcggatttctgttttccatcagctacttgattctttcaataaattttaaaaatttgggtaaaaagccatgtttaggtgtagaaccatttagatatggaaaaagatattgctagtaaaaattgaagttcgaatttttagtttatgctttttgatttaattatttgtcagacagccaaacggtttttaacccaataccccgccaggcgcgtacgggttttacggactctgtaactctgttttttgggctgacaaggatttcacgggctggtttttattcccttagccgaaccccgtgttgtttccaaccccatagcctatgtatgtggaaaattccgatagtcatgtcgaatttacaccattctaaacatgcctttaccgccaacaaatgttaaaatttaaaaaaaaagtacgtgatgaaaaatgcaaaatccaagcgtgagttcgcattaaccttagaaaaagttataaagtaaaaaaatattttctcttttttaccgtcggattgattttatttcagtttcaaaaagtcttccgcgccttcccttcgttctttttccgtttgttcttctaccgttccttcgcattcttttggctggcgtgaaaaaagagaggaaactccgttaaaagaagtaaatcagctcatcgaccaactgatgttgtacagcaccgacgaagaaacggcagagaatgaattggacgacgaagcgattggaaggcaaagagaaatggccattggaacggcagcgaaaaacgaaggcaaaacgatgctgagcactcgagcgatttcgccaggaaggcagtgccgacacggcaaacagcagggaccattcgcatcgctcactttcaacccggccgtgcgtaaagtatgtcaccaaaacaatactttttagacttaaattcccttctcagattgccgctggccatgccttcccttttgaaggcggtttatttggctcaaaggctgtgtcactctcaagggcgggttcttcgtgctcctcactttcgatttccaacaacagttcttcaccatttcgtcatctttgatcaaagttatgacccttttttttgctgttatactgattgacctgcaaaagctttcttttattgtattcaaatatcattttaacaacatattataacaagaatctgtagtcttcaatagagcccggaattttgaaagtaccgggaccgggcttcgacaaatgacttagagatttttacattcatattaagtaatttcaccaaaaaagctttattggattaaattttgaatattttaggtggattttatgtatctttttaacttaaatgctcctaaaatttattttttataccattttcttttaaaaatcaattaaaatgttataaatgtgaattttggcagggagtttattaattttcactttattacttcaaaagagtcattcaatatgacaaatatatttatttgagaatgaggtttggcaatggagtgatactgtcatccggcaattcgtcaatctcaatggcattgctagaccgatttgtcgttgaaatagaaagcactttttccgaacggttttgatcgacaaatgattgtacgtggtttgaacagaagtcatcccaatcattggtgtcgggaagctctataaaagcaaatattcaaacggagcatatcatatacagcctaggcccagaatttgagaagcttaaatcaaatactaaaaattcatgtttaggtgggcatttaagagggtagtttttctagccatatggagaaaaggtcaataaaagaatgaatggatggaggatagaagtacaatttactaaaaatctttgatggacaaatttaaaaatgaacatgaaactggtcatttttcgagaccatcacattacgaaatttgataagaaatgatgttgtaatttaaaaaaattaccctttatcagtcgttcaatatattcagcatttggcgagttttgttgcgatagtaatagccgattcgccagttggtaaaagaagctgcgctttgcgatcaccgtcattcggtcgccactcaattcatcggcagttaaagtcgcaaaggaatcctcctccattggaattgcttgacgaattaacgcaggaatattaaagtcctaaaagggcgtaattttataaacttaacaatgctaatgcacaaccaaagatttgaatttgacatcagaatgtatcatgaaaatttattcttattaattgttctccaactatatgcgggtttattggtaaccaaaacaccgtctgagctgaattggagtgtaatttgcgaagcatgcaagtcacacaaaatcggcggaagtgcaacatttggttggttatttacttcgcttatttgttagaattcaaagtaaatgaattaaaccgtcaacttactcttataatgaaatcaatcaaaggtttctgttcgcccgtactcgagtaaagaatgtggagaatgagtgtaatcagttgagcattgaaaattgaacgggtgggcttcactttgaccgactcgaagaattggcgcaaaggatcggaaggaacggagaaagcgcgcaacagttcaaaatgagtaggcagaaaattggtgttggtcagattgaggagcaattgcatgcacccgcagagttgatcaccgagaaaagcctcggaacccttctaaaagaaaacattgtaacgggaaagaaattgaaaacgtccaatttgggtcatgcattaattagagcttctanaagcctaaacggtgaaaaaggtagataatgttcaaggacacttcgtaaaagcgaaatgtcgtacgccccctttttgaaaagatataatcgccgttttagtcagtagtttttagctaca

SEQ ID NO: 2745 - DNA, 1187 bp, Heterodera glycines
tagaagcatattttgctgagcatttttccattttttcctccaaaatgccatatgtgaattttttgggtgaattttccggcaattttcggctaatatttttcagatcaaccaataattgcgtgtccttcaaaagatttcgccgatttttaaatgtttcattatatttttcaattacggcgcccaactcttcttttgatctgcctaccaaaagttctgtcagcacgtcaatgtccacttgtgcacctcgacctgttctcgtaattaagtgacaaataaaatcgggaattcggtgtcagttaccggggattaggggtaatgggtcataaggctgaggttaatgagttgtaagactagggcttaattagttataaggctcgggttaatgaagtatgagccagagttaattagctataagataatgaggtgagtctggggttaatgggattataatagcaggagttcatgagttataaaactagatttaatgaggtatgagcccagggttaatgaattataagactaggggttaatgagttataaaattgagagttaatgagttataagactagggttaatgaggtctgtgagcccagggttaagatataagactaaggctcaatgagttaaagactggggttcgtgatgtatgggccccgggttaatgagttataagactgagagttaatgagttataagattatgattaatgaggtatgggcccagggttaatgacatgtaagactaagggttaaagagttataaatattttaccggaagggtttaatgtgtggtgtattaattcggcaattagctgtgcccggggcttcaacatgccctcaaacattttggcattttcgttgtacatgttgtaaatgaggccagtgaacaaattggcacctttcttcagcctgaccaactctgcattgccggaccagaaaattttgttcaaacactcctcataattgcttgatttgacctgcgggcgggtggggtcatgaaaaatcaaacggattggatattattagttaaaataaaaataattaattatttttttattatttttttcatagaaaatattaaagattaagtttttatgtgttttgctacctaaaaatcgctatcaaacaatttttgtttacctatttttctacctatttcggatttgtgtacctatttaatactatttt

SEQ ID NO: 2746 - DNA, 1916 bp, Heterodera glycines
ttcagtgatttatcaattattttattttaaattaataaggcaccagtagagcgccctaatcagtgatttatcaattgggcactaattgagcatttttattgtataaaagccccattcagtgatttatcaattattttattttaaattaataaggcaccagtagagcgccctaatcagtgatttatcaaatgggcacttcgaaaaaattcatgaaaaataaatatcaaaataaattttagttaaaatttaatgctagttaattttttcggccttcaaaaaaaacatgaaaattttgaaaactttttccattattttttttaatttacccaaatatccatccataaccgggctctgttaggtaccatgtgatttcgtcagtaagggatttcgtccgtgataataattatttttttacaaaaacttttaatatttcataaaataaataatctaattattattaacttaaatatgtagactcaaaataaaattctttgctcgattaccaacctataattcggccggttacttgcatatattaattaattgtatttgtgcctagtctttgctacttttatctcctgtatattgttaatttctagatggtctctagccattatcattctatattaacctcggaatttcacttctaaatttcttactattaattttgtctttccgcattttgagtttgttgattgccttgtcatgttttctgcctgcaaatcgaagccacattaaaagcgtaaatcagaatgagttcgacaggacaacaatttgagcatacttgcagagggtttgcaaattgtgacccattagaatattaatgagcctattcttattaggattcggaccccgtgggcgggggtggcttttcgcgggggcgggggatggcgggggtcagagtcgcgagggcggggacgggggcacgaaaatttcgcccccgcggggacgggggcgggggtttgatttgaattaactccaaaaaatctcacaaaaattaattttttatgaatgatgtgatggctccacattcctttagtcaatgtatagcctcaattcaattccttttggcataaattacacagattttgtctaaagaattaccaaattttagagatttttggctaatttttaagaaaaaataggtttttggggggccggaggtgccgataggccgcctggcgaattttgaaatttaagctcgatttctaacagaagtttacaaaaaaaaataagatttttacgataactttttgttttttaatatattaaattatcatgatttactcaacaaaattggaactcagatttgtaacatattttcttgtggcacatttttccaaaaaaaaaaacttggtgaatgtgcgagcgtagaggtccggcggtgccgataggcgccgccgggaaatttttttgaaaactgatggatctgttaatagattttgtccaaaaaatgataggtttttgcaatttttagagaatttttttaataagatttacgaatttttgggccatacgatgccgataggcagcgccaggcgaattttaaaattaaaaaaaataaattaaaaaagaaaccgtcaacctgaatcgactcacgacagaaagtaatgtcacggttgattcactaaccactacacaacactacacatcaatgaccaataataaaattaactttaattcataaaaaatttgtcaaaatggttaaaaaaaatcaaaattgtataaattttttgcattttatccatgaatatgtcattcttaggggtgtattttcacccccgcgcccccgcgggggcgaaggtccgcgggggcggggatgcgggggtcagagtcacgggggcgggggcgggggtgagcccccaaaacctgtcccgcccccggggacgggggcggggggcggggtcccgacccta

SEQ ID NO: 2747 - DNA, 3702 bp, Heterodera glycines
  unsure (1)..(3702): unsure at all n locations
acgcttaaacttatttcataacaaagaaccctaccgacggccaaaggcatcagatggacaggaagagccagcagaagtgcaaccaaaataatggcatttgtagaaggcaaaaacattttaatagacatgaaaatatataatacgactggaatatttttagggttctaaatttgaggaatcttgcgaacccagtaataaatcaatgccaatttcggcatcacccttgattttttcattattatttaataattttgtttatgcactttgatacgagcttatttaacatctaaggcttgttttacgtgaatcgactttcacacctcgcccacttgtaaaattaatttttccttggtcaattttttagggcttcatttatgcactgtcaattcatcgtaatttcacggggagtaaagaaatccaatggaaaagcaatcaataaattattgaataataaactcatatatattatataagactgttaacgcttgattaaccgaatctaaataggaacccggcattttttgaaaaaacgaagaccgggcgggggtcacaagttaaacgctcaaaaatggagcaaaaaatgaacaaaaaattgccagaatataattcgatagcaaaccaattaatgtttttgaaaaacttcataagaaaaaaatttcaataactaaaatattctttaaatttggacgggggtgagccccaaaaacctgtcccgcccccggggacgggggcgggggcggggtccgaaccctatttttgactaacgtcatagaaccgttttaattagagaacgaattttgtggcatatgccttttttctgcgtacaagtttcgatttattaagcataaaaacacatttccacttggtttgaagcttctactttgacttttattatgctttaatgccttttttggcatttttccgaaaaacgcttaacaaagatacaataaaaaagaaaaatatatccctaagaaatgacccgaaaaaatttcagaaaatacatccctaagaattgaaaaattttctcaaaaattgatcgccaaaatttaattttttgtgccttttaatgcctttttttcaattttttggtgccctattatagtgcctttttcgtgatttttggtgcctttttttcgttctctagttataatcagggctgtcaaaaatatgataatgcatattttttttcctggattctaggtagtctaattagtaggaaaaacactttcttttggtatttgcgtataaaaaacgggacttttatttgcatatatttgcatatttcgggtttttatgcatattttggggtttttctgcatattccatgcatattttgccattttttttttacatgttttcagattttttgcatattttgcctttttccgtcaaatattttctgatttgaatcccttatgaaaaaaaaatttgattatgccaaaaattaaatccaaatctgaatggatgcgcgagtgggtcaacagtgggcttcactgccgaaaaccttaagaaatttttgatttacaattacaaaaacaaccgataaaatttatggggaataaaattttttaattgatttgcatatttggtgcatattttgcgatttttgcgcatatttggtgcgtatttcacgactttatttgcatatttatgcgcatattttggacattttttgtgaatatttttgacagccctggttataatataaaatccgccgccacctttggcgtttcgtctaaaattcgccaccacgtaaaattactttcctgcaaaacattgttgaatttattgttgctacttaacaatattggtttcttgattgtgtgcttttattgttaaataacttaccagggctgccaagtgtccttatttgtaagatttgtccttatttggaggggccagctcttagaaattaaaaatgtccttttttctaagatttgtccttattttggcacgacctccttgaatttgccctttgtgtcgtctgcaacgatgatattaatctcctttccattgggaaagctgccatttctcatcatcaaaaaactgaaaaaatcagaaaacggcaaaagcagcaaaccgatcgattccgttgcaggaatttttgccaaatacttcggccccatcaactgaagatcgaaaaattcttgccgcggagggtaaggcattcaaaatcaacaaaaaaaaaaaattcctctctcacaatgagcctgggcttatcacaccgcgcagcactcccattctttcaattccgttgattgtgtgtcttcttctggactgttccgaacaatttttccggattcggcaattgcgaaaaaattcagttgtgctcgtataaaaacagcaaaaattttgacaggtagaagaattaaaatagatttctttcaggttaaacaaccaaattagattttattttattaatttcagcaggaaaaaacattttaccggaacttttgtcagaaatggagaaattccgatcaaaaatcgaatccagaaggagggagcgcttttttggtgctgaccttggcttagctaaagtcgaacagcatgcaagaaagtcattggaggaacaatttctggttttaagttgacgtccgccctgattaaacttattttttaggcattttacacgaccgttttggaatatttggacaagtggtttcgtgttgatcggttctctgagaaattgcgttgggtctcactgatgtcggacaaaatcccacaaaatgacgcgttggatttggccagacaaaaagccccggatctaacaaataatctctttgacgatgttagcgaagctaaccaaattctaaattcaatcccaaaggacgaattacagatgctcaacccagagcaaaagtggatgaagctatttgaagccgatttaccgcacttgtacaagttggtcagcattgtactttccgttccggtatcaaatgcatttgtcgagagttttttccctttgcggctcacaatggactgatgttcgaaattcgttaaaagtcgaaaccgtgaaggcgctggtccagacgaaaataaattttgatctcacttgcccagaaatgtatcagatgctcatttccaatcacaaactgagggatcagatcggtggatgggaaaaatactttgaatgacacttttttgaaaaaatattattttcaataataaaaccgttgtaattgtgcaaattggttgtattttgcttttataaaagccaataatgctttttaactattttataaggtaaaaatcaattttttcaaaaaatcttatttttgggggcaacatcttagttttagcctcgtttgtccttattttgaaaaaaaaacttggcagccctgcctataactgtttcacatttatgaaaatcccctgccgattttacgatacgccctatggttaggattcaaattaaaatatttttcatttttttaaatcaaaagtcacaaaataaaaataaaaaatcacagaattgacattgaagcatattccttcttccacattttaaaagttcgacttggaactcccaatttcttagcaattttttcgtcactaattcttggattttcttctttcataagaaatattgctttatctttgttattttgtcatcattagaatatttattacatgctanatanactaattattaagcanaatanatattctcttacttttttgatattttgttatcaattcttt

SEQ ID NO: 2748 - DNA, 4516 bp, Heterodera glycines
  unsure (1)..(4516): unsure at all n locations
atggaaaccgccctnaatgatcaacaaaaaatagaaacaatcgaaaaatttgatgcaattaaagaaaagttgagagaaaaaggaaaataccaaaacaaagaaagaaacaaaattgaggaaaaaattggaaaattattaggcacaaatcgccaaaaaatatacaaatggaaaaaagaattaaatttaaataaaaataaaattttttatgggcagaaaaagaaagaatttattgaacgatttgctgaatttaaaagtttatatggccaaggcaaacagaaagcaaatattccaatgatgacaaattgaaaaagaagaagcaatatttcaagatcaaagaaataaatccaaaaataagcgatgaaaaaattgcaaagaaattggaaattgggtattcaactttgcaaaaatggaagaaagctttattttcgaattgaatttgctttgatgctgtttaattattaatttaattattaatatgattttacatttaattggctttctattcgaatttcgtcaaattttgattgaaccttgcatgattaatttttaaaactaaataaaaatagcataccgaaattaatataatcaaaatgtttttattatttggaatttgcttcaattgcggatacgtaatttgggcaaagatggaaaatggaataattcacttcaattaaagacgaatgattcattctagtttcatttaaattcttttcatgacttcatttgaaatgaaataaattaaatattcttttgacaaattttagtaaagatggcggctcagcaattaaaattgccctatgttttattcctaaaattatggaattaatctggcgcaggcgacatcaagtttgggcaccgggaagtttgggcactatgatattaattgaaaatttaaaaactaaaaaaaactaaattgcgctgtgacttcatcctaaagtaaccaatctgtgcttaaaaatttatgtttacttcaaaattaaaaaatttaaataaggaaagcgggtaatcttattatttaggcaattcttacactgtttaaacgtaggattagacggatactagtttctgtttaggtttagacctgaatacccggcttatttggacctgaaaatatcaagacacgtctatttctattcaattaaaatatattcgttaaataactttcgttccgaacttaattaaaattactatttttaaattagacggttgcattttttagacattaaaaaatgttatttttaaatccttaatctggtgcccaaacttcccggcgcctaaattcctagtgccctaacttccctgtgccaaaacttccccccgcgccgtgacccagtgggttggactcggttactgtagcccagtcgtgggtccaagttacccactagtgctattcgagaccaaaaatttcccgtggttcgagaccgagacttgaccccgagaccgagactcgagaccaagacccaaaaaacccgagatccgtgactttttttcaaaaaattttctagttcgcttaaaattcgtttaaaacttctataaatttaaaaaatcaattttttgagacttttcctaacaaatttttgctttttttttgatttgatcattgacagctctttttatgatttttgtttaaaaactgctcattaattatgcaaattttaaaaatttttggataaaaattaaagttcataaatttgtgacgaattttcataaagaattttcaagaattccatatattcttcgaaaattcatctagtttgggttcaaattctattaaaaaatttgtctatttaaaattttttttttttttaaatttttttttgtctttgaagtttttcaaaaatattatgtttttatttgctaacgaaactatttctgttttaataatgtaattgcaaactgtaattaattaattttttatcatttaataaaaactaatagctcttcatttatctaacggtgccatatttttaaactacacaaatattcactaatcaaattttgcaccaaaataagcattaaaattaaatttaagcaattaaaaatacacaaaatataatcactcaatcaatcaatcatcatttgattcggcgtgcaattgtccatctctttcaactaattgaaaaacgtgtatgacaatttcattcgatagtttattttttgttgtgacaaaaagcagccgactcattacactaaatttatttcgaaattatttaatttaatttttatttaaataaaaatgtattatttttgataacgtatattgtttttagagcacttgactaagattttgtgaacattaaatctttattttcaaaatttaaatgaaaaaattatgtttacaatgattcttacaaattaataaaagtgattttctttaattttaaattaaatttccataaatgataaaacctcttatttatcttcatattaaaattagaaatttattgaattattaaattttgattaattttaaaacacaattagtgaaattttttctcatttaaaattaaaattatattccgctatattttaaaaccaactattgaagtatgatatgaacatcattattgtcattcaaatccaattcatttggtggaaagcaatgaaatgcatttgaaagcattgttttcatttttaacattttctttttcacttttttctctgcccgattttttggttcgcccattttgaccagtcgatggtcagccaaattgatgccaaacaaaatcattacgttgaaaaagttcacattaatttttggcattatgtccttccatttttgttgtaaattcgaaattcgtacattgaagacatttttttgttcaaaaaagtcaataaattgtttattttcaatgggcttacaccaatttttatggccaagaattttccattttcgtttcaatattttttcgccaacttgttctgtgaggtaaacaagaaatcggtccgctatttgaattgaaaatttcactaaaaaattattgaaatttaaaaaattttcgtaaattagcaaataagtcaaaatttaatattaatttacattgtttccaatcgtttttcattgtttcttccaaaaattcgcttgtaaattggttgaacatttttaaataattaattccatgcacattttcacgcttattagtgtgcttcaaatccgcaacaaattttgggctataaaattgttcctcattttccgacgaattttcttcaacaatctctgatttcaaatttgttttaattgcttttggcatttgaggttcataattttttcgaatttgaccaccaatttttttgttggtgttggcaacaatgggtttttgtggcgtttcgtcaatttcaaaattttccggactataaaatttgtcctcactttctgtcgatgaatttggtgatacaattgaattttttgttttgtctggcattgtattttttgtcccatttttcaaaacatttttatttgcttgaatatattcagttttatgttccataactgattcatttggatttgcaaatttattaagaccgcgtttagttgccgtttgttgaacaggttgcagaatctaatttaactaattaattaaattaatccaattaatttaggaaaattacaaataaaaatgaattaaaatttaaatattaataatttgtacatctatttttataaattaatattccgaaatttgtcataatattcaaattctttcaaattaaaattattttaatattaaaatttatttattaaatttattaaaaatttaaatgaaataaacagtattaattgcatttaccaatcctttgctcgacatgtctattccttttacaggttcaacaaattgttgataacacttgtcctgggtgttcttcaaaatttccaagtacgccacttggaacatgccactaaactttgtcttgctaatgcttgcccggtttggcaaagcgttaaatttttccaaaatttttagcatatccgtgccaacatggagcccaattattcggctcacagctttgaaggaaatgaatttattaataaaattcaattttaatcaattaaatatttaaatgtataaaataatagaaattttcaaatgtgtatttaaaaaattgaaattgaaattgtttttaaaatgacttattttcttggcacgaaataaaattaaaatgaaaaaagattattttctttataaagaaatattttaaaaaaagaataaaaactaattgtgaatttgtagaataattataccatcaaaattcctcttcaaattagcttcatttaatgttttagctaaatacacatattctgagtcggtctccaaaagcccagaaatttcaagcagattccgaatttttccaaaattagctcttgccatattttctttcagtgctcgtgtttcagcatttttttgctccaacgttttttgtttgttatttttaaatatactaaatagaataaaaatcaattttttaattatttcagagagtccaaccaaaaatcaaacccttttaattccattcttga

SEQ ID NO: 2749 - DNA, 4759 bp, Heterodera glycines
cggtaccaatagactcagctcagcgagctgagtctaatggtaccgcgtatgcacggtttcgtcgaattttcgacaaatgccaaaagtttcattttttgaaaaattcagtggtcacgaaattgactttcgtttgaacggttctgcgtgtatactgcaccgttttactcagctcagcgagctgaatctaatagtaccgcccgcacacatacggttttgtcgacttttgggcaaatttttgttgtttttgtgccaaaaagggcctccaatttaaattgctttttgcataaaaaccaattcgggccgttttttagggtctttgcttttttttttgcaatcatatattctaacattttcagcaactgcgcaacaatgtttgggcgtttccctcttttgaccatgctcaactcggcctcaaattggcacagatttcgcccagttttgaacatttggtcgacaaacatttcggtggcaaaaaggtgaattgttttttagtgtttttttaaaaggattttgtgccaaaagggtgcctccaatttcaaagaatttttgcctaaaaaccaaattcggttttttggtgtaaaaacactcttttttagtgtttttgcttcttttttttgagattttgtattcttatattcttgacattttcagcaaccgctcaacaatgtttgatggacatttcccctcttttgaacatgctcatctcgacctcaaattggcactgctttcgctccgtttcgatgcgctggtgtgcaaatttttcaaggacaaaaagcggattgttgcgcaagtttcatttttttcaaataagccggtcaaacctttctaagctcgaaaattatagattgaattcgagttcaaaaatagaaaaatggaaacatttttccttgaattgaagaaaatttttatttatgaaattgtatatttcaaacaagaaatcattattgtaattttttaaaaaaatgataccatttccatcccaaaattttccaaacttaaaaaattctctcaggcaatctctgtgtttggccggttaaaatctttaaaattcatcaatttgaccatgaatagaataaaataaccaaaaatttttagatgcccatatatacaaaattatggcaaggtgtacactaagcaaatagttttactaacccaaatctgaggttagttaggaattaagtttcgtacactttggcacgcataagcccctaaatagaatttaagaagtctttactcttgacagaaatttaaatttgtacttaaaattattttacaaagaataccgaagtcaattgtaaagatttctgtccttattcccttttgagattcacattttttatttgtttccaaatcttgtcggtctgctttgcgaccatgatgagatttgtgcacatgccggtctgcattgcgaccatggcaaatatcggtctgcttagcgaccatgatatttagtgcacacgccggtctgctttgcgaccatggcgaggctggtccgctttgcgaccatagccaatagtgtcggtctgctttgcgaccatgacacagtgccggtctgcttagcgaccatggcaacatatcggtctgcttagcgaccatgatatttaatgcacacgccggtctgctcagcgaccatggcgaggctgtccgatttgcgactatagttcgctgacggaacctgctccttctgggagatgtgtgttccagacttggttcagttctttttccccatcgttaccggccaacatcctgggcgaaactggtcccgcactttgccaagaccagtggactggtgagaggtgacgttaggataaacaactgacccgttttccaaataactggaacctgctcctccgggagacgtgtgttcaggccaacaaattggaacctgctcctccgggagatgtgtgttcaggtaaataaattggaacctgctcctccgtgagatgtgtgttcagaccataaattggaacctgctccttcgggagatgtgtgttcaggcttgtatctatctgcactcgctgccctttggcaaaatgggacatgtgagcgtcctgcctgatagatttcggcagcgacatcactgtgacactggacaagagatgatcattattttacgcaatcctacacattatttgcttgataaatgtttatttttgtgtgcaataattggtcaatttttctactataccttttgccacattcgtattatcccattaattttgtttttcagatgccttctaagcaagaaatgctaaagaagagaaagaaagaagagcacctgcggcggacggagaaatctgttagtccaggtcgctcacctatcccaaattgccctcctaagggcaatccaaactgttcgattttggacaacccattgagtgcagatgggaatggggcggcatcgcccaggggctttaacaccccaaatttaagtgctttgcaattgagcacgccggcttcttcaattggaagcaaaagacgggctagacccccgaaagccggagatgaggcaatcacggcttcgcaaaataatgtgtcttcagttgacacacaatttacatcggccactcaaaatattgaaacgccgttcagcaaaaaatggaaggtcgacgatgttaaccgacccagctctgctattgaagaaattgcttcaacgcctattttcacgcaaagaagccgtggagggcggccggccaagaaaagacgcggcccaggcaggagcaaagctaatgattccatgagcgagagctcgtcaatggaccagagctctgaagctaccacatcagttgcccttttgccaactgtgcctgaaaagataaacttcagcacagtgcaaattaatttcgctacatcgcgaaattttacctgtaaaatttggaaatgggcagcaatcggcctttacgaacgtgatggcgaaacaccgattgccccaagatctggcccaagatacattgagacctgttggaatgatatgacccagtttctcaatgacggctttgctgccacatacttggcatacttggcaaccatatcacaacgaaaagtggtcgttgttgacccaatggtatggagcaatggcctggacagagtcatgccttacaaaaatatgacatttgggtacgaccctaatgttccggcagaagttatacttttgccagtacatttccctggacattggactctcattgtccatgatgtgcaatttggcactcattttgccgattctttgcctactacatatggcaggttggatccgcaactgacggataaaattaaaaatatcatttcggatattttgccgtcagcagtgttggcagggattgttgatgtcgaaaatctgacggtccaacacgatggtaatagttgtgggtacttcgtgtgcctgtatgctgagtcatggcttatgaacaatcgcacatttgttctgcctgatttatccatcaattatgaaaaaaagcgcattttatggcacattaacgagctgtatggctctgataatgtgccatatcatccaagggaaggggtgccaactccttgcccaattgtctatcggcatacggatgaagcgcagtcgacatccaaggccgctgagctaatggaagttgatgaacatgaagatataatgatcatcgaaccacagacaagtggacaggcagttgatgcaattctcacccaagttcaagtggccggtgaaaaccaagctgacacgcttggtttggtgtcggagtcttgcatcccgcaagagccaattgcgcaggctgatgatgtaattttcatcagacctaagacgccaccaaggcgatcaatgcgcgttcaaaaaaggctttcagcttctgttagccgttcgccttcaccggcgccgaaacgccccccgccagcaaattcgctgggagtggcaacgccgatcacacggcgttgctctgcatttcacaaggggtggcaatgcgctgcagcagcagccaaacatttcccggaatattgtgactccgggaaactcggtgacaaaaaatgcgccgattgcggtgcacatctcttctcacatgaagacagtaccatttgctgccggaagggaagagttgtgctgccaatgcttaacccgcatcctgatgagctcaaagagctgattgtggggaataagcaatcccgtgaagggaaagaatttgtgcgacacatgtcgcgttataacaacctgttccaatttgctagcgtttccgctggcaacaaaccaagccctgctggcggtccgatggccgttattcttaacggagaattccatcgccgcataagcagcatgcaggctggtacaactcagattcctggctttggccagttgtacattctggacccagtcgaggctatggaacagcgtcgaaacaaccccaggtttactggggagaaaatcacaaacgaagatgagtttgtgcagggtcaccagctaaatgagcagactcttgagatcttagaacaaatgatccaagtgcatcatcctgctgcgcaagcatataagcaggcgcgtgagcagctcactgagcttctccaacaacaaactccggaagagcttcgcttcttccgcatgactttgttgaatgagcgcagggcccccacaaggtctgaaagacccaaaattgcacccacaccaaataatcacccctttctacgggtggaagggatgttcggctattcatgcggaaccccactggtgctcctcccacccaaaggaatttgggtagaagaacaaaaaaggggcaattaaaagaaa

SEQ ID NO: 2750 - DNA, 3986 bp, Heterodera glycines
atctaaagatgaagaaaagaaagaagaaagaataacccatcgttgaagcattgaaaaatagaattgaacaaattcccgaagaagaaaaaacaaaaggaaaaacaagaagcgaaatattaaaagaaaaaattggggctagtaaaccgatagaagaagaaaaaacagaaggaaaaacaagaggtgaaatattaaaagaaaaaattggggctagtaaaccaatagaagaagaaattgaaggtgtgaaaacacgtggagaatcattaaaggatttaattgtttcaaaacaaattgaaacagtcttatttaaatatttgaaggagcggcggaaattttcaattgattttaatgaccaaagaattgactttattgaattgtcggctcaactcggctacattctcggattcgaagacccgacaaaaattctgagtggagctatagcaaagtattattgtgacttgaagggtggtatagacagcctttgtgtgtacattaatggaatcactgagaatgtaatagtaggggaccaactcgcttcacttttgcgaattgttgtcgttgaaggaaaatttggagacgtgattgagaagatttataacacaccaatgtacattaaggtggcagtaaaggaaattaatgagattgaaattgaaattaggactagggagggaaggcttattccattccaatggggtacaacattacttgtattagcatttaaaaaatctattgtattttagtatttaaatattcattttcacattatagtatatattaataattgaataaatatggtgcatcaaatatttgatccaaactcagttagttttgatgattttgttgtagtagagcagattggctcgggagaagcctttaattattttcgcgggatacctccataccaacgaggatatggaagacagcgaggtggaggagtaggagatgtgttgaggtttttatggagagcacttttaccaaaattaaaatctgctggtacattattgggtagagaggcattagacactggaacacgtgtattggatacaatagagaaagctgaaacaccaaacaaacaagcaataattaatgaagtaaagaagggaatggataatgtactcgaaaaaggtggggttgggcgtcaattcggaacgggaagaaaaaagagtattaaaaggaaaagaattattggaaaaactatacctaagacagtaataaagaagagaaaaagatcagacgtatttggaaaattattttaaaatggtcttcaagaaaattggcaaggaatcggtaaattctataacttcagctttgtcaatatttacccttccaccaactaatgtgtcagtgagtagttcttcagtgcgggaatatttaccgctcaatcctttaacggacattccttttcattttaaaattcaccctaccgctagtttctttgatttgaacaaatgttacatcttaaccgaaatgtcaattaaaaagctggattctgacaccaataaatatgttaatttgaaagtgaatgagcaagcggcaacaattaatatgattggtgcgacttggataaagaatttaaaaatcactgtgcagggacgtgagatttatgactctaactcactttatgcttataaagcatacttggatgccgaactttcttattccaaaaacgtaaaggagtcagacctgcaggcgagcgggtattatgtggacagtgagaatcaggacggcacggatattactcagcagggttttgatctgagaagaaaattgttttcacaaagtcaaactgcacaatttattacaaaattggatgcagatatttttaatcaggacagatatatggtgaatggagttgagattgatatacaacttacccctaatgacaatgagtttatggtaatggcagcggccgacgataaatatagaatagaaattaccgcttgtaaattatatgttaaaactcttgaagttgttgatggtcttgcattagacatacagaaaaaacttgaaagcaaagaagcaaaatatgcccatagaaaaactttgatcaaatccacatttataagcgagaatcgaactgaatacaatggaacgctatttacgggtcaattacctaaacgagtcattctcggaatggtggagaacgctgcatacgtaggcaaccaaaagaaaagcccatttaattttaaaccatttgatattcgatccgtcacattgatagcaaacgggaaacaatggcccgcagcgccatttgagcttaatttcagtaaaaacttatatacccgggcattccacgaaatgaatgaggcattaggtatggccagttcaacagacagtaacggaatttctcttgagaagtatagaaagggttggacaatttttgcgtttaatatgactaatagcatggaggacaacgagggtattgatcttattacagaagggacgactaccgtgtgcattcaatttagatcacctgtcccatcgggtgggatcaccttaatagccatgagtgaaatggactctattttgatattggataaaaatcgaacagtaatgactgatacaaccatttaatgtatttaaagtgatttattatttattatttataattttttaaaatgtttattttgtttgttttatttttaataaatttttcttcgagttataatagccctattctttaccctgaacgatccagggacagcgaaatgactgacatttattataaaatagcctcctttgaccattcctacttgaataaaattaatcaatctgaattattctcaatgattgatgaaattgttgaaaattttcaactttgtaatgtagaagaaacgaggtcattatcgagatgggtatactgtatgctactagttttgctatggatagcaattgttatgacaggaatttttctctattttaattccttgattcgaaatttatgtaagcttatgcatatatgtagagacggaaatggacacaacgacgataaatcggattctagcgggaaacacaaagaccagagaacactacttgggatgcttcccttgcgacaaactcccaaacataatcaacaagtacccttcaacattcgtggcgaataatgacccatcgaataaggaaggaacgcattggatagcaatgttcatcgttgacgataggaccgtctactattttgatagttttggtaggaaaccgaacagatgtatcagccagtttttacggaattatgaaaaagtgatttcgaataagccagctattcagtcagtgtttagtgagaattgcggctactattgcatttattttgttcattttatgtgctcatttggaggaagaaattatgagagtaattttgaaaaaatgagaaaaaagttgataggagaagataatccagatttgtttgtcgtgaattttgttaaaaaactgataaaaagtatttaaggaatttttcattaactcatttataaaaatggaccgtttagacacaataattgcttctcttctgaattgtcccgcacgtaacttgtgcgaccgcttaaatcacccggatgagatacaaaaagtagaaaaatacctcaaaggaaaaactctacagacaacatacaaaaatcaactagatgaatacaaagattttgagtacggtggaattacaaaagaatgtgcccgtaagcagatggcatacaatgggtttaaaaatgtgaccgtcgaccagcacttttatgtacggcaccgcatttgtcttcgctacgctaataacccatgtgtgatcgaaaaacacaagaatggcaatgaacgattctacccacttgaacttgtaagagtgaaggacaaaaacgatatttatttagggcaaaatttccctaaaccaataccttcaatttgtaatgataatgattttattgatgatcaaccttgttatcattggtgaatttcaatatttgaaattacataataatgaataaaatttgttaaatacagaatctatttct

SEQ ID NO: 2751 - DNA, 1930 bp, Heterodera glycines
ttttatttatttttaaccataaattaattttaattttaattttgaattaatttgaattttatttcaactttaattataataattcatttaactaaaattttaaatttatcacaatcgggctctcaaatagcccctgcgggcgctcaagtggtagcatacctacactcaatagaatttgagttacctctgaccaacagctagtgctttctattgtcaccagcgggcgctcaaatggtccctgcgtgcgctcaaatggcaggcgcgagcgctcagatgtcctggcgtcccttcccttccccaaagggtatgacagctgacccctccctttgcctccctttcccttctctaataggatttggctttgggttttatccttcagatgttttttcaatttttacctcttctgggattggatatatttattataggtgttttttaaggtttaaatctggtactgaaatgtccctttcaactgggactgaaatggcggggttgaaatacaaccccgaaaatctgcatgggtaactactaacaaaaatccaataaaaacgaaaaatacacccctaagaatcgacattaaattttcagaaaaatattttttcgtaaatgtttatttaaatatttctgtatttttaaacaaatatttgtcccagcccaaatgatcagcggtcattcattcgatttatttaccaattgaggtttttcttcataaaatgcatttgatcactgatgaattatgttcatttcttcttccactaatcaccactgtttttgttcttttgtccgtcactcatttttcagaagaagccccttttgtgatgctttgtcccgcttcttcttccacttcttccggtggcggagacaatggccttaattaagcacaatttgaactatttaaacaaaattaaatgccattttttaattgctcacccaatggatttaatgccataagaaagccaaatgaacacattgttgcaattgttgtcccaatttccgtctttccaatcaaccgccgctgtctccccaataattttgcatcgtttcattatccaaatgttgtccaattcatttgctttggtcaatgtcagcttttcctttgtccattcgtttaccaattcaaatggcaccattggcattgacggcacatgaacagaaaaatgaatttggtaattgacggaagaaatggcattggcacggagaaaatgctaaacaatttgattggaaaacaaaaatcacaaaaatgttgggccacacctccttgaaattgttgatccaatcgaagttcgtttgtttgttgtaatctacgcaacgcaatcgcttgggttggccatcttttctcggagagtgcaaccatttggacaacgcttggccagcagaaattgttgcatttggcacatcaaaatcatcaccaatcgcagcgggcaacaaatcataggaattgattgaattcaatttgttgagatcagtgagaattgtcggtgaaatttgacgaagcaaattgtccaaatgatcaccacggaaaaagcccaaacagcgaatgtttgtcgaaaaaattggccataattcacgaacaaaaacatcccaaaaccttcctgatgtcataccatcaggagtgaatattaaattatatgctgatgatgttaaaatctatatttgttataaagcaagaacagaaacggaaattatgcataaagcattgcataatttattcgaatgggcaaataaatggcaaataaaagtttcaattcaaaaaacttttgtactttatttgggttcaaaaaacccaaaagaaacttataaattttatgggaatacaataaatgctgtggatacaattagggatttaggagtaaacattgataacaaattacaattttccgatcatgttaatcatataacaaggaatgcgtatttacgtatgcgttccttg

SEQ ID NO: 2752 - DNA, 4091 bp, Heterodera glycines
ccttttcattggatttttgtttgtttagaattcatcctacgcatttcgcagttcagtgtcaaaggcgacaaaaacgtcaaattgcgatgtgagccttttaaacggattgaaaatgatggccaatttgtgtccgcttttccgttcgcattaaattttcattcattaagttgcgtttcgcatttatgacatggacagagacggtttcatctccaacggcgaactgttccaagtccgttcatttgtctttctttttggcattttcacttaggtgctcaaaatgatggtgggcaacaatttgaaagacacgcaacttcagcaaatcgtcgataaaaccattcttttccatgacaaggacggggatgggaaaatatccttcgaggagttttgtgacgtgagttggggtgacgtgcaaaacggtcgttgttttctgagctttgcggtgttttaccgctttgattggtctgaccaaccgagccgactttggcctttctcctgacttacttttgcactttggccatttggtcaccgttttgtctctttctctttaccaaatcatccaattttacaggtagtggaggggacagaagttcacaaaaaaatgtaatactttttctgcttaatgctacgcaattcattttcacttttcagggtcctagaaaacatttgaaagaaatgtaatcctttaaattatttgtttccgttttgttttactaatttgttctcccctaatttattaacactccgtttttcctttgttttgttttccctccctttgtgtttgttttaaatgcttcgtcttttttccgtttcccgttaacatttccccattttcaggtcgttggtaatttggacgttcacgagaagatggtggtaaagccgtaaaaaaatgaattctccaaaaatgagctgaaaagtgttgtcagagtcaatttagctgtttttttaaaaatttaagacaataaaagtcaaaattattaccaaaaaacttctgacaacatattaaccgaatgagtggatgccgtgtcatttcattctttccacatccctttttctattattgttcggctgggaatttaagtgaagcaaagtttcaatgattctttaaaaaattacttttcattagagctcgacattttgaaaaatgcctggacctggacctggattccatgttggacctggacctggatttcctggacaaaaatccaggtccaggaaaaatccaggctcatcgtgacctggatccaggcctggacctggattttttgaaactaattttaaaaatcaaaaaaaggtttaagaaaatcaattaattgcttataaatagggctggaatttttatgtgctaaaaatcctgaaatatgtaataaaatatgtgctaaaaaacccaaaatatgtgttaaaaaccaaaaaaaggcctaaatatgtgttaaaaatgcaaaaataggagctaaaaattggaaaaaccaatggtatttttgcataaaaattccaaaaaactcattctttatcatttttgcccgcacaattgcaaataaaaaacatttggaggtgtttgagggtaaaattagtccttttttgataaattgtttttaaagataatttttccatcagttgagtaagtgccagcaagaaacttcgatatccagtaacgaattaatgaagaattcgattttcggtacacgaaataaataaagaaaattttgaaagagcctataaatatggcaagaaagttgatttttagggggtgcattttttaattttttgtgtttttcttagatatttttttcaaaaatgccaaaatatgtgcaaaatatggccaaaccccgaaatatgtgcgatatgtttttatgtgcgaaaacgccaaaatatgtgtttttataagtcgctctaaatcaaaaattgttcggagaaaatgctatttttgggcttctctcgccataattaagccgcaaaaaaaatatgttaaaacataaaaatcccagccctaattatacgaaaaacaacattcacttagtgatgtttaactttttttctgcatgttaaatccaccccaaattttgaatatcgatagagaaaaaaaaatctacatagtgtaatacagccattttatactttatacactttttcatgagatatgttaagatttgtaataaaaaattattttgtgattcaatggccaaattaaagcgaaatataaaaagagaggcggtgaaacagcggtggcaaaagcaagaggagagaaaagcgcagacggccaaggcgatacaagctcgcctggccaagaaaagtgagttaagtgatttttaactcaaacatctttttttaatttcagacgctccacagccaaacctcgacgaacaaatgtcacaacaggacgaagcagggccgtcaaattctgctgcatccgccgaagaagcgatggagcctccgccaccaactccaggaccagtgccaacgccagaaatggacgaggaaattttggaatttggcttttcgctgccatcgacatctgtcacaccaatcggcgattgtctccaggtgatttggacggattggagacggcagtcgaccagttcaaggcatttctcgatcaacaaccaatggtgcaaacacttctttcaaaaaagacaaaggcccatttgctgcttcaccactttgttccatttgcgcgccaacaccgatttttggggcttttggatgagcaggatggggccatatcatttttgggggctcaattttaaatgttgtgatttttcaggagatgaggcactgcattccgtgtggtggcgacttgagcaactttggaaaacgatgccggacggtgtacaaatgcgccaacagctggagcatcatttcgtcccgaattggctgctggacaccgggagatttgacgaattgaagctggtgagttaacggaagggaatttaacatttatccaactaattaagcgtgaggaggaacgacgggagcaagcggaggaagacaacgaatgaagaaagtgatcaagaagctgacgtcgatgtcgttgactgatcgaggatttatggtttttattttcattacaagcggtagataaaatttttaaaaatttgaaacaattttaaaatcattttggtcatttttccttttatttattcattaaaatcatcaaaatacagctatacatgcaccgggaatcgaacctgggacccccattttggtgactttctcacagaccactgagacaggtatttaaatcttttttggtattggagctgatttctgggatggtggacagcaattttgaaacccggaaataccaaattttcaaaattctgtaatcaattttaatggcaccgcctgccgagaaaaagcaaaaacttttgtccgccgttgaaaatcagcagcaatcgtcgtcgtcgggttcttttgtatgccccctccctttttgaaaaaaaaaattcaaaattttttttctcggaaagactcatttaggggtttttagggtcggaatatcagattctgataactatttctacgcaattcgacccccaaatcttgattggaacaaaaaatcgaattttatggcagtggttactggcacggatagaattgagaaaaatccaaccaatcattataaagtacattgcagcaaaataaattagggcaaataaatatcacaccagtcaaaatgggttcagtattgcaatggtataagacgtgaaatataaagtaaacctcatttatttcaaaagattatatgtaaaataatatcacaaagctcgatgctttaataatagtatgattgtaaatgtttgtgtaaagaaacaataatatttatttaaaaaataaatatatttatatcaattctaaaatgcgttattcgattgtagaagcttctgcaaaaaacgagagatttgcgtccatatcatcacaagtaagcataaatattgtttaaatgctataaaaattagtttataaaaaggcaaatttaaaacttacggtaaacaaccaagaataattcaaatatttttttacttagatattaatatatttaaaaaatcgcttgaagcgtggctataaaaaccaaattaattaaacggaaaacaatt

SEQ ID NO: 2753 - DNA, 2299 bp, Heterodera glycines
cctctcttttttgagactcgttcagttttgccattcaatcaattctctccctctgatttcggcatcgaatcggtgatgttagaaatcaccaaaattcccgaccgaaatttttgtttagattttaactgcaattttggttggcttttccgacttcggcagttttttgccgctcctccaaaatggcctcgttcagaaattgatgtgaggcggaggacaggcgacagtcgggcgttttgttcagtgccacgaattcgccaagccaaccgacgagcgaatcgcgcagaaacactttccctcctccattctttgacatttggaaaaccaattagtgattggggcaataaatataaaactattctaagtgtaccaccatttctcgaacaaataattttaaaatgaaccgatcaatggttgtgatctatcagcaaattcaccccacccaaccaataatcaattttaaggcagtctcgattgtaatttggtaattatatatattctaaagtggagatgattttgtttatttatcttccaaaaaaataccaatgagagaaaatctggtataaagcggagaagaaagggaatacattctttaaaattaaaagaaaacagaacaactcaatattgggggagcaataataagcaaacgaagaaggggggaaaacaaaacggaggaaatgcactcaaataaaggataaagctcagacgaaacatacaaaaaaccaaatcaccataaaaagcgctaattgtccatatccacgcccgtcggtgggcccccttcagtcagtgctgctcctcctcctcgtctgtgtccgtcaaaaattcgtccccatctccagaggaagaggattcgtcaaagtcgtcctcatcctcgtcgtcttcctcctcgtcatcgtcttccgtcgttgtctccccagcaacactcgaatcgtcttcatcctcttcctcggcggaagatgccttggccctgagattctgttgttcagcagcggcggcactcgacgtgcccttcttcacaagttcgtcagttcgctccttctcatcaacttcgctgctgctactgctgctgctcttgtcactgtccgtcagcacatctttaaaggaaaacaatttaataatgacacatatttacaacattcaaaaccattttgaaattggcccgatgggaaaagctccgcttcagacggcatgtcaactgtggcaccgtttttgcggcaatagtcgatcatcctgtaaaagaataaaaaaataatttattgttagggaaaatgatatttcaacacgaactccttccaagacgaatccctcatcatcactttggcatttccgacgatgatcaaaagctcttccgcacgagtgattattgtgttgaaacgctaagttttgaaattaacaccagcttttagaatttgtaaacaccttgtccgacatcagaaatccgatcgcctccttttcgttgttccgaacagtgctgacaatgatcacccgacgctgggaaccctggtaacgctccacggtgtccacagtcactcccttgtgttcggtgctgagtttatgccgcagccgacggacctaaaagtgaaccaaaagtactgaaatgatggcacttttacaaatttaaacgacgattggggtagaataattcacactcacttggtagttgtagggtgtgacgactccgatttctgatggtttgacatgcaattcagtgcatacccttttgacgtagtcaaggataatgtcctgctctgctcggttagagtacgagtgcccgtccatttccctctcttcaggttcattggcgtgatgccaaagaatgggaaaaccctgaaatttcccactctctaattatataaattagaaaatatgactatgttttgttaaggatttttgggatgggttgaatgaatatcgtattttggctctttttacatattctatgtgtcctattaggtagtatgcaattgttaaacaagtactgagacgacctgcttcggtaatgccttccacgtggcgagtgggtctcgcggttgcgcatcctcggggacgtacatttggttggcgtagaaaagacgagacggcacatcgatgatgctggcatgggaacggtaattggcgcgcagcatggtaacaatacgcctgaaagagaaataaaaaccaaatatttgagtgacaaaaatgtgtttaaagtctacttacgggtcatctttgtaattcgggttggactcgtagcgttcgatcagcgaggaactaatgccaatcttcttgaaatagtcaaccatttcaacggggcccaactgac

SEQ ID NO: 2754 - DNA, 6727 bp, Heterodera glycines
  unsure (1)..(6727): unsure at all n locations
aaatgaaatggggattaagcatcaatggtcaaacggagaccgaccgattggcaccaaagtgtcgagttcagaagcctgcccagcctcgtcgatgattatatgactgaaaaagcaaattgtgaatgagtcaatcaattttgtaattgccacaattttaaaggccgatacctgaactgctgtttcattccgcccaacgcaagataagtagaacagagcaaagttgagacaataatccggtagttcatcaattctttggccggtggaatcccaaattggtccaccatttcagtgtttggccttagaagtggaagaattgaaagtcaaaggacaataaaaggcacctgacaaatgcaatgtccctgagtgcgtcattcagctccgaagttggatgagtcagtgcatacatactgcaaaatgagcaaaatagtcattcagaatttattaaaactgaccgaaacactttgctcgtgtcaattcctgccacatggatcaattcgtgagcaaacaagtcggcagccgtgttggaaggagtacagacgagaattctgccagtgtcaaattgcgtcaccatcaaacgacacgcctccaccagagtcgttgtcttcccggtacctaacgcattgggaagaggtaattattcatttcatatatcaaatcgtgtgtttgtttgcccctccctttctcacctggaggtccatgcaaaacgaacgggagaatgttgtcgttctcgctactgatgcggaattctatcgcattggcaattgccttaataaacatttttttactaaatgataaacaatttgaccatatcctaaacgattgttatttgaactcacaacaattgcctgtcgctgttcggtattgaagcgatccgacataaattgacattttgaaatagccaaatcgcgcaactccacatactgttcaacggtgagctgaaagaattgggttaatttgtatccgagttaaatgaacattttattcaggttgataagaaaactaccttttcgtccaccggaggcgggaagatcaagaatctgtagggccgctggttgtcctgcagctcgttcataatatgatttctcgagttgtagacgaattgggacggcaaaaagcgaaccatgtactgaaaaagtaatgagtaaattgaatgaacatcaaatgttaataactcacattcccttccggcatcgttcgaaagaatggcagaaaatggatggtctgcttcttctcgtcagtggaaatcacacgcccctaaaaataaacaaattgtttattggttaataacttccaaaataaagtgccctgttgctgttgaccttgtaatatgggtcatagtattgcatattctgacgcgactgctgctgttcgtatggctccagaatgatcaccggggacgctttgatgtcattgctgttccgctcgcagtagtcaatgctcagctgaacgccgtaaacggaggcgccggtgcgcgaacgcgagcacagcttcaccgtgtgcggtcccgtcttgttatcctcgctggtaatctgcaaaattggtgttaattgcgcagaaatagaataatgaaaaatctttaaattgtaagtaattgttatttacctggtcgttaagcatcaacaagcgattgtaagccttctgtttcttggcatatgcaagcagtccgggcggttccttctggttgagatactcgagaatttcctgcaaaaattaaattatgattgtcttaatttagagagttctcctcaagtaaaaacaagcaaaacattgtagaccagacaaaacttgcatttgcttcatccatgagatgagctgcaacgcgattcgcattgaagcgcgagtggatgagtccatggtcagcgtcggaccagggaacgcttgatttgaagaaaaattaaaacgaccaaatttctgggttattttaataagaatcaaggatttaccattgtttttatacgttttttttattaatttgcaagggaaattttgattaaacaataattgaaagggaaaaatatcggactaataatttaagaattatggacaaaccaaccgcggcaaaggaataatttccaaccctccgtgaacagttcggcgtgatcccatcgtttatgggcacaattttaaagaggcaaatggcaaatcagttaaatgaatacaaaagctaaataatgtgttaaaataacagctaattgacctttgtgcaagtcattcttgctctttttttgctaaaaaaaccgacttataaatgtaatggatttgaagagaaagggtaacactggagattggaaaaaaataaataataatatcgattctgttggacggggatactgaaccacctttgcatataagggaagatctaatggaaccaaaaaaacagaggagaaccagtgatattgaaagagggacttctctaaattcagaatgcagggtggtgctgccccttttgctgatggataggctaaacaaaggaattcaaatggtgtacccattcagtttaaatgtttttgtccaatctccaatctaatagtttgttgacgctcttctccacagcccccccccccccatcggcccaaaaacccataaacaaatataaatcagatttatccaacagatacatcttcattttcataaagataaagtaaaaacgagccattaaggtcacacatacctatgtataaattgaatatttgattaggaaactgtaaatttaaaattaaggaaaataaagaaacatgaaaaatcacgcaccaccaaaaaggacaccacccccgtgttactccaaatggcaaatgcaaatggattacctaagtttagttgtgatgatgaaatcgaaaacaaatcgatatcgagtaatagaacaaaaagccaaagtatttaatttttctttcaaattcaaatttatatgcttttttaaatgcgagagctggatgtggcggcgatctcagtctcgatggcattctctgtgttgtacgacgctttttttgtcgagcatcaaccaattaaattctttatgatgtgattatgtgactaaatgattgcaaaaatcgcaactccggccaggctgattttgttttttgaaaaaacacaagcttaggtaagttttccgtccgctgatcgtctacatacatttccgttggcaccacaatttaatttttgaactgcttaaattgtcacaatatttttgtgtccattttattattcgtcctcatcatttgtatttgttataacatattctctacgtacgactacgaaaatgtccaaagataatcaacggagcatcagcaaccatttgccatcatctcctcatttgcctcacttatgcaattcaatttcttatcagcaaaagtcggccacctgagcaccaaatgaatgaacagcggcgctgttgagggccgagcgggcggtgagggcaatggttttccatccatcgaagtgttcctttagcattcattggcctttcttcctcagctcatttccatcaaacttttgatctcctccctctctctctcacttatcctttcatcagttgggacggattttagcgccaaggggcggcgaccccacaaagggactcgttcttttattttgttgactcaaactttagtggtgaatgtttgaactttgtctccgctcaattactttcctcccgatgaactttctccgtttatttgtgaagccaagacgattaattatgcctaattctgtgtaaaatttgaaatatttttaaagaccctattttactgagttaaaaataatggcgtccaagcaccaaatgattgcgacgccgatggaatatatgtacaatttggatgccgacaaagtgttagagcgatttggaaagtatggaaagtatcaggtaggtacatggaatttcggtgaatattaattttaaaattgaaaacgagaaaatattgttttaatcgggtttctttctttttttgtatcacttttccaagttccaattctgttatttgtaaattcgatctctgatttttttcagatgatcgtctatctgatggctgcactgaacttcttcatcttctcttacaaaaccacagtgatttcactgatagctgagccccaaccgaactgcactttacacgcaaatgttgtgcatttttttaatttctgaactgttaaaaattcattttgatttttatacttttaaaatgcaaatttctctaccatttaaggattcttcactttcgctcaatgattctcgtcactacgtaacattagcaactgattttggcattggctgtgaggacaaacatttgctggagcatgccaacggtgcttttatgctcggtaaatgccaaatcggcaaagtgattattttgtttaaatcattaacacgattttttccttttcgcaatttctctttttccggtttccattttctcattttattttaaaattccattgttttctgccccttctctctttgccaggtaactttctgttcaccgctttggccacttattcggccgaccgtttcggccgtcgtcccattttccttctctccctttggtccatcgtcgttctgagcgtcgcctgtgcctttgccccttcctacgaatggtttctgttcttccgcttcttttccggcgcttttggagctgtaatttttgaaatttgtcttactaaaaccagagttttgcaaaaatgttgacaaaaaaactgacaatttaaaaaattgaaaaataaatttatttgtgtgttcgatgttttcagtccatcactgtggttggctttgtgctcaccgtggaaagtgtcgccgcgtcttttcgctctgtccaagtcaatcattttttttttaatttattcatttttaaatttacatttatttgtcaggttttggtcaattcgctgatttgggtggccggcattctctcagttggcgttttgcaccttttcattttcaattggcgccttttgtacctttgcgtagtcgcgcccggactcttttccgtcgtttatttttggcttttcccgggtcaatttccattcattccatccaattttatgcaaattcttacttttttcagagtcaatccattggttaatagcaaatggaaaaacaaagggagtgaaacggtgggcatttttaaattattttttcaaaaattatacggtaatttattggcgaaatgtctctcttctgttacagttatatcagtcgtgcttcacgtgtcaacaacgtgactttgaacctgcactcgtgccaatcggacattgtggcgccggaccaaacgccgccccatccgtcgaatgcgccccgggcgaaacgcaactttttggatctcttccgaatgccgacactgctgctccatttgtcgctgaactgctacattttgtcagtaatttggcaacccattcatatgatttatattatttttatttgtgtcaaaattggaccaaattttggaattttctctgccttttcagcattgtgttgaactttgtctattgggtactcacgctatacagtgtgaagttgcacgagcagagaatgatcggatttttcctctccgcggtggtcgaagtgcccgcgggcattttggccatgcttttgcttttctgttgtggccgagtgagtggcgctgttgatgagatgatctacaataaatcaattaatttgtttgaatttcagcgaactgtcaccgtcgtggcactgtttggtcaaacggtgtctttgggtctgaccattttggtgccacgtctgttaatcgcacattttttatttatttttactaatttcccaatttttagaaggtagcacctcgaatttgctgctttctctggtcgccaaagtgttcaacggtgtttcttgggcttccgagccgttgctgcttagtgaaatggcacccacaacagtgcgcaacatggtacggttgttgttgttgttgttgttgttttagtcgtcaaaaaataatttgatttattattttttttaaaagatgtatggaattgtggccacagtgggcgaaattggctctgtgttcgccccttatttggatagaattgtgagtgggaaatttataaacaaataatcaaattagctttcgaatttatgataattattcaagttgttatttttaaagaaatcaacaacattttacaccttttcattgctcctttccctgtcagggtgacgaaaatatgcaaaagattgtggtcaccgccatgtccgtgctggccattctgttcgcgttggtcgcgcccgagacgagcggtcgcgctctgccgcaggacttggcggactttgacgggggtccatgcgtcgcttttctgtgccgcacactgaaacggtggcgcagtgggggcgacacgaaaaaacggaggagaaaaagcaacgcgctggtggaggaggggagcagcggcgaacggacagcgctggccgaagaggcggcggcggaggacggaggtgacgaagacggagcagtaccagcagcagaacaacggcaaaggcagcagacaaacagcaacaacaatgacgacaatgccagccgaacggggcaagcgattgttggggatgaagccgtcgtcgtagacaacaaccgcacacccaaccgaaaatggtaccaagtgagccaacagcagacaccgcggcgaatcattgagctgctgtgttcttnccatgttcggaattcactgctggtgctgacccggtctcactcacttccccccccccatcccattttatttgtgatcatttttcttt

SEQ ID NO: 2755 - DNA, 2350 bp, Heterodera glycines
ccccccccccatcccatttaattgtgatcattttcctttcgctgtgtggttgtgaggcaaaactttgattttttgactaattaaattataaccactttttattgcatatcaaattgaataaaaaaatatatatagttgcatattcgtcgactgtttatctcctccaatagcttgggtcgttcctattaattaaacacacttggttttttgcaactccttatattattatcccacttttatttcttgtttattttctccaaaatgacttggacttgtttttatgttaaaactacaaaaatggcgtttcattgatcattcattgttcaaatgggttgttctgtctgctgctgttcaacgacggcccatccatttgctgaagagactgtccaagctgaagcccccgccgccgcttttgtggccgcgtgaggaggaagagctgcccaagcgcgaggagggccaatccgtgccactggcggttacgcggctgcgcgtccgtccgtccggcgactgccacgacgttgtccgcgatcgtcccccgctgccgaacaaaccgccccagtcgtcgtcactggtgccgaaacggctccgacttccacctgctgtcgaaggaagggacagggaaatgcatccgcggaacatttcattccgtggaagtggggattagtcggacagttccgttgatcagtcaccacccgcctcacatattggactttgaccgggttatcatccgccggtggcaaaatgccaaaaaagcccaccaataaagcccggaaatttcggatttgcggatcccgctgcgggattgtaactcaaaatttttcgggacgggatcccgcgggattaatcaggtattttccaaaaaatgcaggattgcggaatgggatcccgcaaaatcccgccgggatctacccaccactgcctccaaagctgctgcccctgccgctgcttccgaatccgccgaaactgctcccgcttccccaaccgccacttccgaacgagccgctgcccgtgcttccgccgcccgtcgtcgtcgttggccttctgccgccactggtccccgccgcggacgacggcgttcgtcccccgccgcccgaccctccgtaaatggcttggatgcgtctgatgtcgtccgacttcagcgtttgcggaatgtaattgccgttgtcgtccaccgactcctggtagaacggggccatgatcgcgttctccactttggagtgctccaggcccaatgtgtgcccaatttcgtgcaccgccacagggaacaaatcggtgtaaccgctttagggggtaattagtggaaatggtggttatgtaattaaatactaatgaattcgttgtttgattcataatacaacttggcaattttccgcgcatcctccggccccagcgcccatcgttcatcatcgtcaaagtgcaacttcccatccgttggcattgtggcatgtgccaaaacgccgcctcaatttttgcgcatttaaaatatattcgtgaaacgacagagaaatgaccgccgatcactgatcggaagaaagcaacatcattgtctgtgtgcgcttttctcacttcgtccgtcgaatggccacgggtcgccgtgacttcgcgcggcgaactgcacattaatgtcggcttggccttgtgtctcctgggcaaatttaatttcaaattaaaaaaattaaaattatgccttcatttgtcagttaaaaaaatattcacctgaaaacgcactggaatcacttgagaccaagtgtcataggcacgtttgatggcatcccttcaaaatttaatttaaatatttcgtggttttttaaattaaatattttaatttcattttagtgggaatgatttatcaattaaatgcccattgcatttgcctgatccgcgactgaggaagttgtggggagaaattgttgattttgaaggttaccaaattcttgttccattttggaccgcctgaaaaacaaccaaaaaataattccgattagtgcgtcgctactcatcaatcattaattattgactgattgattcccttcctaaaattgtctccgatcacttctgatcacctcctggccccacaatcatttgtgcgtcttgcatgccgcacctcggctgtgccatctttttcttagttttgatgtccaatttgcccgtctctggctatgtgcgggatgaaataaaaaattattatttattttttgtctgaaattggcacccaaatgggcgaaggattgaaaagctttgatcgccttcctcaaaaatgctaattttaatttgcattttcacatcttttgttttaattttaatttttctttggtcctccggttccgccccccttctttgcaattttccc

SEQ ID NO: 2756 - DNA, 1765 bp, Heterodera glycines
aaatgcaaaaaagcagagaaaagagacaaaaattggcaacagaaaaggacaaaagggaatgccgtgatttgtgatgccacatttaggctaaaaatgtttcggtaaattctttaaaatttaacgaataggcaaatattgcccggggaaacggtgaaaatcaatggcaatgccatgccccgcgggggtgttaaaaaaaattgaccaaagggtttaaaaagagggaaaaaaccaaagaaattgggaggaagttaattagtatttcattcagaaaataataataaaaaaaggatgagtgaattttttgaacacaattcactgatgacggaaagaggcggggaagaactcgtcgagaagactcgccaaattgggcgagaagtgattgatggaccacaaaggccgacacggactttcgatcgaatcaaatgagggggggaggactgatcgaaattgggcacaaatcatttgtatgaatgagcactctgatcagtgtcaacactgatcagtgatcacaagaacagcacatttccatcgacggatcaccaaaacacttttcaccgatcggccataaaaaaatcagtcgccgaccgttcgttttcactttataaattttgtcgcccctccgctgccaaagtttgtccataatgaaagtgaactcgtttttgtcggcgagtcaattgatttgatttctcaagaaactatttattccttcctcttttaatacaaatcaaaaatatttatttggaaaaaacaaaacaatttgccaaaaagaaaaattggggcaaaaaaaaaacaaagtgagtaagaggaaaggttttttgaggtcaaacggagatcgaaataaaagttaatccaaaaaagtgatcggatattccgatcaggcacaaaaaagtgtgattttgtagtcgcaacaatttgccctttctgctgatcatttgatcattcgccatgcgccactttctcacaattgtggacgctgaaaaaattgtccaaacgccgcagcgcctcgggcaacggaaccgcgcgcgtcagccgttgccgaatccatccgggcaaactggcggcaattgtgtcgcgcgcgtaccgctcgtccagcagcacaatgccggcgaagtcgacacggtggcgaatggcacgcccgatggcctggttgatggcctgctggcacaactgctcgtagaagcgcgtgcccgcgccaggcccaatgtgctggtccaaatactgggcaaaaaatgggggcaaatttggtcagaaaatttatgctattattagcataagaatttgtaagaaacaaaaggtgccaaatttatataaatattttaaaacatgaaaaaaggaattaaaataaacggtgaaaaatgatcaattgtaattataaatttgatcaaaatcaacaaataacggtttaaatcataaaactcacccgaattcgttctgacaattcggccgagtttctgttcgcgtacggaagtccgaccatcagcacacaacggcccaactcatcggagaagttgatgccttgaaatcataattatatatataaaaaatatccaaaacttcataaatttacaaattccccccccaccccccgctgccgtaaaaaaccgaaccctcgctgagttttccgccgaccaccgcgaaaaggacggcaccctcgcgggaacgtgcggactcacaaaatgcgggccaaatctgctgctgtgagggtttcaaaaacaaattaatatggttcgactgtttttccatttttgaatttagttcccttttt

SEQ ID NO: 2757 - DNA, 4207 bp, Heterodera glycines
atttccgaattgataaaatgtcggattttttatgttttctgaattttttgccataaatttattattttttttatctactttcaaccttttcacagctcttttatttcagtttaattctttttcaattttccgcactttcgcaaatgctaaaatggaagcgcacagtgttggtcagcaatttattattctgcagccaaattcgtcgataattttttcaattagtttttcgtacagtttctctcacaaaattcaaatccagttctgcgatatggaaatgaggagatgaacgtaatagctatttcaagcttaaagcggactatggctccggcatcatcatcatcatcaacatcagcagcagcttcagaaaccaaaaaacgaaaattggttcggaagaagaccggggtataattaatgtcaaaaatataaatgcaaaagaataattgaaaagttttaagaagtgaccgctcttgcactggcggcgttcacacagatcaaaatgcgcttggcggaggacattgagggccagggaaatgcgcagccgaaagcttgaagaaggtgcagccgcgataacggacgagcagatggaaacgatgcgccaacaaatggagcaaaaattccgtcaaaatctgctggaagccgagcagtggattgatcacaaatgggcgacgatgctgaacaaagaacaacaaaggactcagcgaattgcggcacaaagtgcgacggtgattggccaactgatgagtaagcgagtgacagagaggggagaagaaaaggaaaatacgagagagacagaggaaaaaagttgataataagtgatcggtgcaattggtgcctagagaaaggccaagtgttattcggagttaggggatgcggacatgtgtttagctgtccaccatgctctattgcgataatggccgttgaccaaccaaaatgtctgatttgtttccataaattaactgatttggaatacttaggatcataaatgtgtaccggatatttgatctggatcctaagtatttataatatttgtactactataattgtactcctgcagtaatacctcatccttaacacttttttcattgcgtacagtaatcgttaatgttttcatttttctaatttcattaaccaataaaaatttgccacatctatttgatcacacaacaacccatagaaaatgaaatttgcctgaacaattttgtaatttggtttactgaaggtaaataaaaaataaaaaatgtgaaaatgcataaaaataaatgtgaaaattaaaaaaatttttgtgccattttttgttgttgttcgccatctgcttcctccgccttttcctccttttttctaatcttcattcagtccttctcgcactttgaacgcttcaaacaatgcatttgcctgaatttttaaatatttttggttaggcttatcaacacaaagaaatgaggaaatgtgtgagagagagagaaatgagaagcaaaaaactatagggggaccaacacaagggaaggcctgcctaccgcttttcacagctccgaaataagcattgaagggggggccaacacgagggaaggcctgcccatcaacactcagactttatgaaatgtgagagagacagagagtgagagagagaaatgagaaagaccaatccacctttgccctttgcgctggtgtgaagtcgacagaagatgagaacacaaatggcaattgttgctcgaccacttgcggaccattttgctgctgctgacgcactaattaataaaaatttcaaaaaatttaaatttagaaaaattttttattacattgatgaaaaagtgggcgagcattaagccgttgttgtagaaatggcgccaccggtcgttccacaattgcatggagcgtagagtcgatggtagagtcaatgtcgtggaagtgcgtcagctcaagggcatcgcttttcgttgataaacaccctcttgcccttgataatctgaaaatttaaaaattaaatcgaaatttaaattgaaattttaaatgtaaaaattcaaaaaaaatttataccaagaaaatccacatacagacacagatgtgtcgtgccaccggacaccacttcatcagtcgccaataccgaacggagctcgtattggtcatccggctggttgggttccgggcggcgtggacggaccttatcggcgttttgccattaggaatgcggattgatgggggcgacggctgtaaaaaaaagaaaaaatttttggaagatatgataaaaataattaaaacaatttttataataatttaaaaagacaatgaaaggttaatatttttaattatttaaatgctatgaaattcaaactttttattaaaacttgccagttttttgttgaatttgtttttgtccctttttttgtcgtgcaatttcttcggcggaaagtgacgacaacgacggttgacggacatttgctgctgttgatgatgatgagcagccggcattttgagtggcgacgacttttgctgctgttgttgtcgatgaagtcttggccttctgtcgggcggcgactttgactgttgttgttgaagttgtgccatttggttcgacgacgacttcggcatttgatggtggcattggcaacggcagaccttcttcattttatggtggtatttgtggcggcgcttaaattgccaaaaaaaatttaataaaggaaatgtaatgaatttataattaaatttaaaatttattaaattttaaaatcaaactcacgatttgcaagtggccctcttctgaagcccatttgcctttttgccagcaccgtgtcctccgctgcttcacgtcgttgtgcactgcgcgtaacaattggttttaatagttcagcaaatgtctggaaaaaaaaaataaataattattttttgaaaatctcaggattttattttactctttttggtggcatgatgcgacgacaattgggcaggccgacaatttctattaccaattaaagtttaaaatctaaatttaaattaaaattgtttttttttaatttggaaaaaaataagttgataaaaatggttgggtttacatattttactttttgttcattaatttcccttttccattcctcgttccaatccattctacacacatttctgcctccattccctttatccatattgattttgcctggggtcaattggggggagggggggggggcattctgctgcagacgctcataaatattttattaattttgcgtaattcaaaattagacttttttttgtattaccaaaattaaagttgaaaaaattttggcggtaaaaaaaatcggggtccgtttggtgtgaaaaccagggaccgtcgaccccctccccttaacctaaaagagaaaaaaaaatgcaatttatattaagaatttttaaaaagtctattaattttatttcatgctataaactaaaaaatatcaaaaaatataaaggattcaccaaacaattagaaattatacttaactaaaaacaaataataaaaaaaggaaatatgaaatgcaaataaattttataaaattgactagtatacataatccagctaaaattggttctttcagttaagtattgaaatgctaaaaaggaaaccaaaaaacttcaacaaaaatacaaatttaattgttcttgtattttttattaataatttattcttgttttaaatattaaaggatttacttggaatttacattatcctttcatcgtcatattaattatattttttgtttattttttattttaatattacataaaataatgcagcatcgctatatttattttttatgcaaaatatagaaaaattatgcttagtttatttaataggtgctggcaactttagtggagaaaaatcttaaaatagttagctaaatattaatgcaaaaacgcgaataaatataaaataatgacaaagtctatagaagtgaataaaatgagacaaaaaatgaactaaaaacagtcaaagattaaagtccttttaggagttcactttattgcattgttattttcaaaaagtaaaattatggcaaaaaagttaaaacgccaaaatggtgggcggtcactaataaagtgataaaacccaattttttattgatgaatagtaaagctaaatcgaaatattttcgcgctaaaaatatgtttttcgtgtatatttcgttccaacaggcgcaaaaaatactcaaatcaaaaaatcagctagccctattaa

SEQ ID NO: 2758 - DNA, 3848 bp, Heterodera glycines
  unsure (1)..(3848): unsure at all n locations
aaaaaaataaaaaaaaaaaaaggggggagttatataaaaaaaaaaaaaatttttttttaaagaaaaaaattttttttttttttttttgggcggggggggattttttttcaaaaaaaaattttttttggaaccggggggggcccccgcccagcccgtttttcccccaccgccacaaaatttttggaaaacccttttttttattttttttgcccaatttttttcccataattttaaatccccaaaaccaaaaagtaaagtaaaattatttggaaaaaatttgccttttcgattttttttcaaaataggttgggaaaattttttcttcctttaattaaatgaaaattaaaaaaatacccataaagaacttttttgccgatatttccattaatttaaaaataggaacatgataacaggactggggaataattttttgattttcatcatattttccccttgaattgctcagcagatcttcattttttaaatccctatttcattaatccaattgttttcccctaattttattatatttactcttatacagtaccaaaaatccatatataaaaatttttgtatagatcaacaaaaaattttgaaacttacccagttatttaaatagttattttttatgatttgcgatgattttgattacatattatattaagatttatatgctttttttactattatggacctttcatatttatttcttttaatctgagatattataacatttaacaaaaattgctaattttttaaattattttaaattcgatcttccaaataaaatttgttgaaaatatgctccttataaattggctccttttatttttaagattatttttaaacagtagcttgtaatttttatatgctttaattaatttaacattttttttatattttaaatttttaaaataatattgtactttgataagctttttacaatttttgcattaaagtatttatttaataatatttttctcatattatgaataaaattgattccttcaatattatgctagaatgagtgaacaggcggtcgaaaagatattttcatgttttttcatacatcaatatattatattaaaattgaatttaagatgattttggtcagattgttacattatatagaaatttcccgaacgacttaattaatttatttaacactaataaaattttattaaaatcgtatatagtgctataagacgcatattttattaattatttttctcaattaacgaatattttaaatttttaattttcatgaagaatttcgtttaatatctcttgtattccttttttttactaacttaaaactaggcgtcaaggtagatggctgggcaattgatggggtcggctggtaggccacacgaggggtagaagtgtgaggtgtgcaccgtcgcggttgttagtgcagtagcagctcaggcgcagatgcgtgtctggatgttcgtgcagcagcagctaccgatagatgcaatgaatttaaaaaatgccgagcctagccgtttatatttttgttccaccaagttttgtagagctcgagctgctacgaagcgagtcccgctccataaaatactcaaaaaattattaagcaaaaagcgaaaattacattttaaaatgttgggtgctttccaaaaaccgggattttcaaaaaaattttgctggtgcgaattttttccacacgtgccattttgtagagaatcgatagggctttcgaatgataccgatcccgaacggatcgtttcgggattcgcttgctgccaaatcgtgtaagcttttgggcatgctttttaatgggggggggtaatcgtaattttttaattatttttaaattgctttagaaattttttataatttatttttatttgtttcccacttatttgggtctatttttatttactttaattaatataattgttttttaaattattttttattttttcgccaattttccatttaattatttttatgcagcttttataacacaaatcagaaaaattctgattattcggatcacgactgaataattagaagtattgctggtagtttccgcaacgtttcaggattgttccttaaccggatttattcatgtgcaaaacagtaccggaagcataactggagttaaaatttaagaattagtcaaaaaccgaattagcctcctgaaaaaagttgcaaaaacttgaaaatgttaaaactttaaggttcggaaacccatttaaaatttttctttgtcccccgcaacaatattttggtcaactgcataattatatttattgcttaaattttgtaaatttaatttttgtttaaaatttatttttgagaatatttactatttttaaaatattttcgaaattatttttaaagtttaaaatatggaacaaaagtttaatcaaaatgaacctaaaacaacgaatgcagaaaaaataaaggtattttgttaaaaaaaaataaaattgaatcaattatgattttaattttataaaaattaataaatattattaattaatttgtgcttttaaatattttgtaaggttgcaacagaaatggctgtgaacattgagcgaaatttgaaagaagtgcaagaggaaatagtgaaaatgcaaaataggtactcttacaataattaattaaatttattttaattataatgtgcaaaatttgtgcagaaaaagacgattttgcgagttgctcgaaatgaatgaggtgaaaagtgcaatttttgcattataaaataattgaaaagaaataaatttagagaaaatcttcgataaaaagtgatgaaagtgaggaaaataaatcctgtgtttttttaattaattaattaaatttatcgagcaaaccaaaggcacattagtgctcttatatggcgccaaaaagaaacaaacaaataaaaagtgtcaaattaaaaatacaaaatgatgtaataaatgtgaaataaaaataaatcaaatgttaaattcacaggtgattattttaatgtaattgtggcacagaaatttcctactctaactcattgcttttagtaaacccctgaattcctttgccttattaatttgcaccgctaccactggaaggttattccagctttttactattctattgaaaaaattattttgagttttggccgtgtggcgctttacccgtaaaagtaaaggcctcctgagcctttctgagaaaaagaaacttttcccagcatcgaggctggtgaaccctttgattattttaaaagctgttgttaaatcattgatttttcttctttcttccaatttgtgtatgattttaagtctttccatatattttttgtacacaaatccacattttcgaaaagcttttcttgtgaaaaatttttgtacccgttcaattttgtctatatctttttttaaattagggttccaaacttcggtagcgtattctaattgaggtcgtacaaaagttttataagctgctgttagagtctttatttccctggtttttaagactctcaaaatctgaaagcttctaagatatgcgtttcgtataattttgcttatgtgttctgaaaaattaagtttcgagtgcattataattccaaagtcacgaacattatccgattctgaaatcttttttgagttaataaaatattcttttttaatattatttttccctaaatataaaacaaaacatttttcagttgaaatttctaacccatttatttttgaccatttttcaaagcctncattgctttatccaactgattcgaatggccatcatttttcgtgggcataatataatttaacatcatcggcatacatttttatgccaactgatgccgcttcatttgtataaaaggacggcagatcatttat

SEQ ID NO: 2759 - DNA, 1013 bp, Heterodera glycines
tttttgactattttgtcaaattaattaaacattgacaataagggcgaaaaataatttatttgtttatttaagcagcatcaaacccggcaaatggtttccatatgctgaagaatccattagtaataacatagcaatttttttgcaaatttaatgtttatttttattatttattaaatcaaaagtatttttattaaattttttgttgaaattttgtctatcgacttgtttgaacaccgcacatttcgcaatggtagcagtgaaattgcttgtatggaatgtggcaaaaagtaggtgtaattaataaaaaaagatttgagttttcgggtttatttggcgtgtgttttataggcgacacggcgtgttttcataaataaattatcatataacggaatttttatgtgatagaaatcttgaactatatattaaattatgtgctaaaaaacatgggcaaaatgtgccaaacttcgaaatatgtacaaaatgtttttatgtgaaaaaacgccaaaatatttttgttttaattttataagcgctcaaaatcaaattttgttcgaagaaaacgctattattttttcttgttaaattaaaatatatttttaaatttttaatcataaacctttttaagaaaaaatttgtttagtctataaataaatcttgatgagttaaaatatgcctaaaatgtttgcttttataaatattaaaaaaactttttcatcagattttcgccaacagaggaaaatgcgatgggctggcacattgtcaatgctcacgacaaatacgcggttaaactgctcaagaaacaactcgaaaaacagtgaaatgagacggcaaacaggcccgtaaccagggcgagggcagttgcccccccctggaaatgaaaaattgaattttttccagttcgaatttataagttttaaccaaatgctttaaaaattaaaaaaaaaacatttcccggctgtacctatcggaaccgcttgatccccagtttgcctttctattttaaagtttaactg

SEQ ID NO: 2760 - DNA, 2306 bp, Heterodera glycines
gctgatcccccagtttgcctttctatttaaagttaactgcaaagatggcaaacaaataattactttgttatgtgaaaagcggctacaaatctttgatcattgttgtctggcgctgaatttttcatataagacttgagaatttttttttggccggaagtgaaaaaaaacttttcggttgtctatccctaaattttgttatctggttaagagcctgtgcacaaatattgcatattgattaagcagagttcatgaaaacactattaaaatttgttgaataacactaaaatttattgttgataaaaattcaaaattaaaaagtatgttattattaaagctataaaaaaaattagtacataaaatcaattaagttagtagctaaatatttttacaaaatttgtaataagtaatttcatttatttctgtaattttgtggcctttcttagataattttgcttcctaaatcttttcattaattaataaacaaatgaaatgatttaacttttttagcattattttggtgtttattattgctttacaaaaaataatgaattaactaatgattcattttatttttatctgtttgtgtgaatgaatacaaggaacaatcaattaacgcgaataatcaattgacgaaaaccttttacaattgttaaacctcaacaaaataattaattaaaacaaacgtttattttatttcatattttaccgaaaaatcattgattaatgacaaaataataacaactcaaaaaatgatggaaattttatcattagaaaagtgaatgtcatatttgcaaaattttattacagtttcttatagatttttatttacatattcttttaataaacaaaatgtataatttcgcagctgaaatttgtgagaaaatctgaaaaaaagtatagagagaaaaaaaccatcttttttaccattcattactcattatcaaaaattaaaaaaagaaaaaataacgaaaaaaaaatggaaaaaaaaataactttacataatattttttgactgaaaataaatttgaaataaatctttttgtttttaattaagatttagatattataaacaaattttttgttttaataatttctacaaaaaatttttttaataagtaaataataaaaaatatgttataaaacctcaaaattattttaattaataagcaataaatctatgtaaattaataaattcttgcttatctcctccgtccttcattgatcgcttgaaatcagccccaactgtcagcatccgagtcaatatcctgaattttttataattttttttactgataagatttttttcattgcttaaaatatcccttggctaacttaattgcaaaaaaagtatgctggtgtaaactaaaggttaattaattgctttttgaacaccgattttaatcgattgtctaatattgccagaaaataattatttaatctatttcttaatttgaaaaaaagcttttgtaaaataaattttaattattttaatgatttcaccatcatttagaaatgattttttggcaattgttaggcctttttattgttttattctgcttcttttgctccttctttgttgtcagttcactttgcgcaaatatgtcagaattggccaccaaaatgaagagaatagcaaaaaaagggacgaaaaaatgaggaaaacattgagatgcgtgttgtcataaacggaagaaatgaggggaaggtcgagaacaaagaaaagggggacgaagaaaagccgaaacagagtgccgaagatggaaaaaatggctttgaggaggtgagatattttaaaacttttaaactacttaaaataattttttttaatgcaattaattaacctttagtttacaccagcatactttttttgcaattaagttagccaagggatattttaagcaatgaaaaaaatcttatcagtaaaaaaaattataaaaaattcaggatattgactcggatgctgacagttggggctgatttcaagcgatcaatgaaggacggaggagataagcaagaatttattaatttacatagatttattgcttattaattaaaataattttgaggttttataacatattttttattatttacttattaaaaaaattttttgtagaaattattaaaacaaaaaatttgtttataatatctaaatcttaattaaaaacaaaaagatttatttcaaatttattttcagtcaaaaaatattatgtaaagttatttttttttccattttttttttcgttattttttctttttttaattattgataatgagtaatgaatggtaaaaaagaatggtttttt

SEQ ID NO: 2761 - DNA, 2157 bp, Heterodera glycines
cgctttttcaaaagaattccggaccagtgatccttttccccgagggctactgcaccaacaattccatggtgttgatgttccggcgtgcggtgtttcaggacgatgttacggtgtacccggtcgccatacggtaggtttatgaccggattctgtttttgtaagcctatcattcatgtaatttgtgctcaatttaaggcaagaggcccgattcggagatgcgtactggagtgaggacaatttcatgcactacctgttcagggtgatgacctcgtgggcaattgtgtacaatgtgcactatttgggtgtgttttggggtgtcgcaaatgaaaattttctaaacttatttattttagctttattgcagtttacccgaccattaaataattagacaatgacaaattaatgtactattacgttttctaggataatcctaattagatatcttggtatcattccatagccccaagaatcccaatattaatgtatgtaatttggatgctttagaaaaaaatgatgcattaaaattgtcaaagattttatggttggtcgtgtgaactgcattagagcctttattattcaatttaagcatctaatatttatttgtttaaagctcctcaacatcgacgaccgaatgaaaatgccacggaatttgcggcacgggttcagcgactgatcgccactcgggtgggcgtccgtccgattgcttacgatgggggcggaatttggtgggtgttcgtttatctgtctgacatgaatagtcatgcataatttgcatttggtcgctttcaggtacaaaccgaccgaccgacaaaaggcacacgtcgaatggcaaaagcgctgcgcgagcaatttggaggaactgttgagcacggaagtggtgtcaacaacgggcactgaagaggaggagggcgaggcgaaggaggtgaatttgcggatggggtgggaatggaagacatttcaatttgttttttattttattggtcgtcaaattcaatgccatttagaagacggggcaggatggacacctttccaagggcgtagcaagaatttttggccgattttttaaacagatttccctaaaaatggcgattttttggtcgaattttattgcttttaagggaatattgattcaggcggtgcctatagatgccgccggggggaacttttgagttttttttgatgaaatttcttacaattaacaaaatggtataccattttttttaattttcccattttcattaaaaattttcatttttcggtttcggagaggttccccgttcccccccccccctcgctacgcctttgaacctttcatttaattgaatctttcaataccgaatggattaattcatttttaaaattccggtcgttccatttcaagcaactgattgttcggtcaatttcctcggatgggaccgaagaggggggaacttttgtcgctgaaccgtccaaacatgatgaagaacagctgcaacatgagcaacaaaaaagtgccactgctgctgctgtgactcaaaagcggagggaggaacgccgtcgtcggatgagtcaaagcgtcgagtccgttgtggacgacgtggtcggcgcagcagttggcgaagacagcgacgagatggacttgatcggctgaccgaccaaacacacagatccgattggaatgaggacgacaaatgattatgatgatgataatgcttttgctggatcatgattatgttctaacacatttattcttggcaaggcgcctgctctgatggacattcttttgtcagtataattttttgatgtagtaactgacttctcgagaagtgaaaataaatgcgtttcccaattttctgctaattatttcgtgatttttaattaaacactgcctaatgattggcatcgttctcgagaattgccaatcgtattgtgttgactacccgcacatatgcacactgtaatgtactgtattgttttgtatcgtataattacttaattttgttctcacccaattgtgtatcaaaatactctctctttctctgctcattttattattgttcatctgttggaagtttaaaaattgccgaaataaaataaagcatttttgatgctttttcttcctccacccactgcaatttgtatttccattagcaaatgaatgggtcgaaaaacattaat

SEQ ID NO: 2762 - DNA, 1906 bp, Heterodera glycines
tccccgatttcagacgctccaaagcgatcgaccgtttcctggccaagtcggactccgccaaaaagcagcggtcggacaaagcgcacgtcgactcggtgttcttccggcgactgttgcgcattctccgaattctcatcccgagccctttctccatggaagtgcgtccgttcattttagacgattttaaatagcacttttgggtaggaaattggttactaaattcggaatttcactattttctttttaaactgctaaaactggttaaaaacactcacacaagttattttaattggtccataaatgaatattaattggctttcgagtttagcagacccaaactaattggatattaaaatacattaaacaaaagaatccattactaaattaattaatccccccccccctttagctcctttttatggtggcaattgctctcagtttgatgctgcgcacttacgccgacgtttggatgtgcaaaatgattttttaattattatttttttcaatttcttttcaatttcaggattcaaacgtccacaaaaatagaggcgtaagttttccctttttttaaatttatttttaccattttttgtaaaacacatttaaattttcagtgccatcatttcgcggcataagcctcgtttttggaggtcgcttaccgactatttgttgtgtatgccgctcgtttcggtgatcaactcatttttgaaggtcattttcaataatttgttgtaatttcctacgaattttcagtccaaattttcgcaaattcccatttttaattacaataatttcccgttcagctgagtctttgcgagttgaaattgcgcttccgcgagcggctgacccaccacttttacgcgcagtatttggacgggttcaccttctacaaaatgaccaatttggacaatcgaattgccaacgcggaccaactgctgacgcaggacgtggaccgcttctgcgagggcattgtcgagctgtactccaacctgtccaaagtgacttttcactttaaaattatgggtttttaccacaaattcccataaatttgcaaaaaatgtccccattcggcgcacttcgaaaggttgccggaagaccatttcttcgttattagccgaattaaggagaactcaaaaatcaagtttttcgaacattttttgctttgatttttgtacatgaacgaaggactattaatttttgccggttattacattttgtcaggcgctttagaaaacaataccaggaatgtttgagaaagaaaaaattatggtccaaaaattcatccggtgatgttttggctgtagatgtttgtcctgttttaaaattctacaaatttaaaatttattttcttttttgctttcatttctcactttgcccccgttgaattcccccccccccccaattttcagcccttcgtcgatgttttgctttacgtcagtcgcatcggcgcttccatcggttggcaggcgcccattcagctgttcgtctatttgctcttctccggcacggcactcacttatctgcggaggcccattgtttgtttgttcattggcatttatttttaaatttcattttcaaatgttaaaaaaccgtcgtaattttgacaaattttcaataaataaacccaaatccccccccccccccaagggccgtatgacagtgatggaacaacaattggagggcgactaccgtttcgtcaactcgcgactgattgtcaacagtgaagagattgcattttatcaggcacgccgttcaattccaaaatgaaataaatgccaattcatttaagggcaatgagcgcgaacgcgtttctgtgctgaacgccttccaacggatggtgggaaattacaaatggaaaaacatttatttcaatccttaaattcgagatttctggattctttttttc

SEQ ID NO: 2763 - DNA, 1406 bp, Heterodera glycines
  unsure (1)..(1406): unsure at all n locations
tgtccaggtcgaattttgtncgaattgtttccctataaagtttaattgatgtgccattattcataggccctacttcaacgaacaaaatgagggaatgatgcgcaaggacaaaacggaactgatgcaggtgagtggagaaagtttaggagagaaatttaaaaaagaaaataaaatcgcatctttttggcatttcgtccccaatttttttccatttccacgtccaatttgaggcttattacaccaccggccgtatgatggtgaagctggcggatgcgctgggccgcctggcgttggccgggcgcgagatgacgcggttggccggcttcaccgcccgagttgaccaactgatgcacgtcctggccgaccttgagcagggtgaggagtgtggacgcacaatttgacacttcaaatgacttggggacacattttatttcgttcttaaaaaggcgggggaaaagtatttttaaaatgtgaaaattttcagttttacgttattttttgagcaaaaattgtccttgtcgtttcagagcaatggaattttgaaaatgtttttgaaaggttttaataattttttgttttattttttaggcaaataccaaaggacgatgctctcaattaacgcggattcaaagaatgtggccaatggaaacggaggcctcgtcgtcattgaacagcagcagaaactgaacaatggtaatcatctatgataaatgtatgccaaaatgattactttttcaattttaagtgaaattcgttttaaaaattctattttttatataaaaaaacaaaaataaaaacatggtggcaggaaaaaggagcgaaaataaattaggcctgttaaatttttccaagcgacgccaacaaaattattccatatttttttttaattttgccagaagtgcacaaaattgttcactttctgacgggaaatttattttttctgaaaaatgtacaatttgaaaaatttgtaatggccgaatagcaaaaaacccttcggattcccccccccccccctccgaatttttatattaggggccttcccgaaatgtttttcccactcgcccatcactcacactcagatgaccagcacagcaacagcacaaccgcaccgtcgtcccctccggcactgttgttctcctcctcctccaactcgtcctcctcctgctccctgtcctccttccgccccggctccggccatgtccttgtccaagacaatttgatccgtttccaacaagttccgctggtgacgcccaacggcgacgtgctcatccgctcgttggactttgaggtgccatccggcaccaatgtgctcgtctgcggaccgaacggatgcggcaaaagttcactcttccgggtggtacgtcggaatatttttgatggatggaatacgattggggggggggggg

SEQ ID NO: 2764 - DNA, 2820 bp, Heterodera glycines
  unsure (1)..(2820): unsure at all n locations
aaaatttcattcattttttctcttccattttcatgttcctgcttggcgaactgtggcccctgtggggcggcacaatgatcttaccggccaagggcaagctgttctatgtcccccaagtgaattaacccaacataaatttgtcagcattctttttattaaatttgtttttcagcgtccctacatgaccatcggctccctgagggatcaggcaatttgccacgggattggctttttgaatttactgccattgtcaggtcatttacccggaccgtccggcggacatgcgtcgccgtgggttcaccgacagtgcgctggaggcactgcttgaccaagtgcagttgcgcaacattttggagcgcgaggggggctgggagggccaacaggactggatggacgtgctgagcgggggcgaaaagcaacgcattgcggttagtggagcaccacctaaaccagacattgttttttcgttcgctttaatctcctcccttctctcgtgtctgcagatggcccgcctgttctaccacagtccgcagttcgccattttggacgagtgcacttccgccgtgtcggccgacgttgaggacgccatctaccgacgatgccatgagttgggcatcactttgttcaccgtttcccatcgcaaatcgctgtggaagtgagtcaagtgttattgggtttattgaaattcacaaatttggaaacaattcgtactcaattcaacgacttacacataaattactccgaaaatgagactctgcaatataattctccaactacgaaaatttgtgcagaggacaaaattttgtcacctgcattttttagaaaaacttaacggaaatttttcaagaaaaaatctttaaaaaatttttctatgaaaattcaaaaaaattcagctccgagattttgggtgcatccgaaaaaaatttgaagctttgactgtcggtttctctgattagaattctccaaattaggacaaatcttcagaataaggaaacatcttcaaattctctcattgttttttattacaattttatttattttatttgctttattttccccgccccttaaggcaccatgacttctctctgcacatggacggccggggccactacgattttaagcggatcgaccacgacaacccggcggagcagttcggctcatgatttttggatgcaattattaaatccattggcattttgcccaacaaacaaatcatagtcaaattccttcggtggattttgtgcccttccttttgccttttttgttattattttcacttttcttttgccattttcaaattccttttttatatgacgctaattcacttaaagtaataatcgaaagtaaatgtttattatccaattaaagcgagagagacaaaactcattagaccaattaattaatttaaaagtctcgggggttttttttggtctcgagcagcacaagtatttaattgggttttttaaaagttaaaagcatttgcggtgcacaatggaggggccgtgcttggcataatcgtcccgcgttatccacggcgttggcacagttttcaccttttaaaatggcacttttgagaaggtcgaaaagacaaaatttaagacaaatgcgcagaattttaaaagaatctgaaagtatttatttttgaaaatccgttggaaatttttgtaaaaatttatccgttttcagtccatttgggttttgaacacttcgttggcggtgcacatcagcatgtaattttgggagacggagtgcgtcccctgggggttcgtagcgacgacctttggacccaattaaattataattaaatttctttctttaaatcaccttgtaaatgccttgatcttgctgatttggagactaaatttaaaatatattagtgatattaaacgaaaaatgattagcattcaaaagcgaataataaattgctttatttatttttattacgttcggaaaaagttttacaaaactattctttttttcatttattttcaattttatttcttcaatttaaatgaaacagcaattgctcattaattgactaattaggtaattaagtgggtgcctttttccatttgcttttctgtcattactcactttgatggtcagtgtgcacaagtacttgcccacttgcttcttcactttgctgacgaagcgatcgcccgccaattctttgtccttcaaaaaccatttgaccgtcggctcggggttcgcgttgcaaatgcactcgaacagcaccgaactgacaaacgacaaacaaaatttaaaaataaaaaatatgtaatatttaaattattttaaatttctaagatggagcacccgttgggtttgttgatgatggagggagcacgctcaaaaaacgggggacacaccatttttggggaattttggaaatgagctaaacacaattaagaaaaaattaatgaatgaatttttattttcacaaattaattcaaatataataaattgtacccaacaaataattttaaaccaataaattaattaatttcccaattaaaatgctttttctccgcccgataataacacaaatcgcgattttcatttcaatttattccgtcgccagcacttttctcgctttactttttgctttgctccgttcgtttgtttgtgccgttcttttgacccgggccaacagctgctttttcttttcattttcggcttttccttgtgccctttggccaattttgttccgttccgtctgatcgatttccgccaccgcaatttcggggccattcttttggcccaaaaaatcttgtgaagagagatttgagctgattgaaagcnngtggagacaaataaacg

SEQ ID NO: 2765 - DNA, 2555 bp, Heterodera glycines
  unsure (1)..(2555): unsure at all n locations
gagctgattgaaagcgtggagacaataacgttgagggaatgaatgtttttgatttccggaaacaaaaaactaaattgnctgagaagtgacagagggcaaaaanccggaacaccaaaaaacaaaaaattcaccaacccaaanaactgtggtagaaaatttgggtttttgtcgaattttcaaataaacgaagaaaaaataaatttataacaaaaaaaaaaaactaaaaaatgacaataaaagcattaaattttctctttgtgtttttttatcttcgcatgtaaaattcgatggccgttgaaaaggcggcaaatccggcggcgcccagcaaagcgggctgaaggccggcacggaatcccaacattccgccaacgatggcacccgaaagagtgcctaaaaagggggagaaaccgaattttaagagtggaattttttgattttttctccaattcccaccatttctccagtcgctttttgcgcgtgtcgtctccaaaatgcattcagtgccagcaaaaagtaaaccgatggaggcaaagtttcgcgagtaacggcccacccgcgtcttcatttcggtccacgtctcgcgcaatgacagctgaaaatggaaaaatggaggatgaaaagtaaacattgaaaatcaaataaaaaatagtaatctactttaaaaaagtggaaatattgtaaatgccaacataccggcttggtcgggtctttgctgatcgcataacttgggtccacgctgacagtaaacaggccgaacagaacgccgatgccggcacctaacgcacacgcaaccaccgatttgaaggcacaattttcctgtaaaaggggaggggagaattaaaaaaatttaatttaatgaaattgccggacaaccataacggaggccatcacgcgctcctcgcgactcatcggaggcaatgcaaaattggactgaaaaggggacagacaagtagatgcattttaataaatgatgtgttgacaaatgataggggcttctctcgagagtctcgaggaattttgagaacggcaaaatggaaaataaaaatttgaagggcaaaggaattgggaaacacctgaacaactctggcgatgcgcaactgaacgtcctcatcaacgccgttggcaactgtacggaaaagtggaataaattggagtgattattcccggcccactctttcgccatgggcgcgtccgcgagccgatcatttcgtcgatttggcgaacaaaagcggacggagtgtacacaaaaggaggctgctgggaaaggaaagtgaaatgataaacagaaaatcaaagggaaaatgccaagaactaatggccaatcccgtcactcaaagtgccaaaagtataatccccaatgaatccgcccattctgttggcccacctgctgctgttcttgctggtgcccttcctccgattggccttgctcatccctccgaaaagggttggggaaaagccgactgagccgatcaatggagcttgaaggatcaatgcgaaaagtttccattcactttcaatggcagattatttgaaaaatttaaaaaaatgaatttaagtatcaccaaaattaaaatgattgggtaaataatgaacagaaaattttaacaaaaaaaacaaagtatacagaaaaaaataaacaaacggagtctaaaaaaatatgcaaaagtgacacttttcgggggaatgagatcccaaaaaatactttaaatggcagaaaagagcgaaaaagtgccaccacaaatgacaaaaaacaaagtgccaatcagtgcatggaataggggacgtaaatgcggcgccgaaacagcgaacggaagggtttttccgcgtcgtcgggcaacggaccgatggaaaagagacgcttcacctgccaaggaacaaaaaattagttcaaatgaaaagcaatggtatgtatttgttgaaaatgaaagaccatgggatttaaaatggacaaaataaaattttgtggattaaaaatttataaattataaaaattaataaacgctttaacgggtacttaattagaaatttatttaaaattgaatttgtacatacttttgggctgcgcagcaaaagcgtttccaataagccggtggtgagcacacaacaccaatagagggagaaaatctaaaaaaaagaaaaaatggttatgtttttggaattttttatttttttatcttaccactggcgaatcggacaacattttgacactgccaataatcagtgcgaccaatgcgacgtcaaagcaagcggccaacactttgtaattgctcgacgtcgacatgaacatccaccggttggcctttaacaaattgggaaggacatgaattaggggagtaattagtaaattggcaaatgaaagggtcattattaaagggaaaagtcaaagaaaatggcgaaagaaataaaaaattttttttttgcaatttgtgtctgtgtcaattagaagggactaataaaatgattactgcctaaatgttggattaattaacgcctaattacacaaagtggtataaaaaagcgctgtgtaaatcaccgacactcacccaaacgttggt

SEQ ID NO: 2766 - DNA, 4682 bp, Heterodera glycines
gtcaaggaagtaccaaatatacaacagacttttcagaaacaccgaactctgtataaaattctttaaggtccaagtgaacagaaaagtcttagggggaggggaagttgagtttttgcgacaaatgaaaaatctagcagttccaccgtgtcggcagacacgccgccaggaaaagtattcaaaatttttagcgaaaatctgcctaaacaattagcgagttttttaaagcagtataaaaagcccgtacggtcataaatagaataacggactttgaaaaccttttaatcgctaattaatagtaaatttctctgagtcagaattatgaattataattttgctaattgaatggcaattcgttttccgatgctctcacctcgtacacctgcttgcgcaccaagtggaccatcatcagacgttgagacgtcagtttttcggtgagaattctcaccggaacggtggccaatcggagaccgaccgcgagcaaaagaacggaggaggacggaccgagcagagagacggaagacaaaactgaacagggacaaatcaaatgaaaagtgggggaaatggcgaacaaaggtcatttgatggcacaaatattaattgggcataattatggatttttcttgacattttgaaaatttggatacgcttaaaaacttttgatgtatttttttccaaaaaaaatgtcccttaaattagtctaaattatagtttttcgaaaattaaaatcaaaaaacttcgttacatttaaacgtttccgtaaatccttcggccaaataactgttggacataacgacgacaaaattgtcggcattccctttcaaaagtgaagaaatgccatgcttttgttgtgaatgaaaatgaacgggtcgaagaaaacatttacggcaaaggaaggaaaatgagagcggattggacatgatggaatggactaatgaaaatcttaaaaaacaaattaatatttatggggaaaagtaaggaattacgacccccaaatttactcagaagaatcacgatttatagcattttggcaacccggaattgtgaggaaacgcaatttttaaaggatttaaaatagcgctttttgttttatttcttatggcgaaatgttatttcatttaaataaattcaaatcaaaaatttttacattaacgaaaaatttgttcaaaatgctcttacaattagcaattttctagataaaattagcttttcaatttaagtttttaattttggttatttcttttatattcaaaacattgttttaagcgactcagcgcataaaacactttaaacctaaaataaatggaaaaaattcgcaaattcggcagagatttgcaaaatgaagtcgctaaggaccttttgacggagcaattacttcagaagaacattaaaacggtgtacgggaagagtttgagcaaagaaatggccaaggaaatttgcttggaactcaccaaacggtacaaagagaaaacggacgaagcgatggaagaactttacgagaaggaagaggtccaagtttaagtcattttacacaaaatcacattggcatagtttaggtgctcaatatgacggccaaattggaaatgttccgccaaaaaagtcggacgaaaccgcccaaaaagatcggcagaaagtcgtgcgaatggacggcgccggagacggacaatccgggaaaagcgatttacgcagtcactcgccctttgctggtggaacacaaggagaaactcaccaaactgagggaccagctgaaggcgcaaattgaggtaggcgaaaatgagcggtttttttttgtcaaaacaatgaaagttattagaaattggtgccatcccgcgggaaagttttttttttttttgatgaattgcgagattggtaaaagacaaaacgttcaatgcctaaaaatgcaggaatgttcaaaaaatgttctttagactgatactttttgggtaaaattgacaattcaagcagtttttcttattcaaattaaaaaacaattcttaaggccgcgaatcggcccgccaatagcgaccattatatggccgtctaatttattttgcctatttttgggaaatggactctccagtcccgagtctgtaacccgactcattgtcagagttgttgccgcggcctaaaattgcaataagctccaatctcacagcggggggaaccctgtctcccataaacaaaatattaaaaaaatatttctttaggccaatgaaagggaattgatggaagaagattaaacagcgacagaacatattcaaaattctgatgctaattatgatgatgacggtctctctctcttctcagcaattcctttgtctctgagtgacaaaatatttattttatgtcgccaattttaatgctttatctctcttttttgtttttcgtgaataaagtgcgaattgacaaaaagagcttcattctttgtctgactaatggacaacttacaatcagctgggaaaaaattaaaaattttttccaataagttttaatttttagtaaataaaaatccgcaaaaatgcccacatacatagaactcagagttatagaactgtctaaattagtgaattttcaaaatgtgattaatttaaacatgggaaatttttatgttttggctgggacaaaacgccataaaaaaattggccaagttttccgtaaaagtcaaaaatggccaaatgtgctccattacaaaatttggggcaaaaacttcacatacagttaagttcacttaatttaaaaattgagaatttattgggataagcaaaattaataatttgaaattggaaattgaaaagatcgctcaatttttaaattggtggcatcgttaatgatgttgccattttatgtatttagtcgtgctgtttggatgtcgtgttcagcacacttttgtgcaaatgcgcctccaaacggacgaaaaagtcgaacagcgaatttgggacgaaagtgagcaaaagggagaacaacagctcaacctgaaaaaagcaattaaaacaaaattgagaggaattttaattagttatttaatgatttattaatttatgctcctaaaatctctgtcattattttggtgaatcgaaattttgaaaaaatagattaataatagctacctatattaaaaacaaatatatatgtaaaataaaatgtgcaaaaatgaaaaaatatgcttagaaatttatgcaaaataatttttaaaataaaattattcccaaaaattggcacaaattgaaaacaatgtttaattcgaggtcaacataattaaattgttgatcaattggtcctgtgccaaatccaaaaatatgcctccaaaatggtggtggtgcccaatttcatgttcaattttccgtgtcaaaaatttcaaatttccgtgccaatgccattccgttattcccccccccctttttaatggcccacctgaatttggtgggacaaacatccgctcgtctccggcacgaggccaaccgtttggatggcttgacgcgcaaattccgttgggctggcggccaaaagggaagaaaggccgtcacgggacgaacgctgagtcagtttggtggccacgaccattggacacaccgtttggatggcaatgcccggacaatcggaggcgaattccttgcgcaagatttcggacaaatggacaatgaagctctgaagaaggggcacggggatggcatttgtaggggaattggcaaaatgggagtggcattttataggacaatggcattttagaaaaaaaaaaaaaatgaaatttggctattcgcgagaatgggaaaggagcggaaacggacggcctcgagaattataaaaaataatttcggtgccattgccagaaattggagtggtgtcgagaacatgacggaaatgggacattatttgaattctcgagaatgggagaaatgtccgggatttcggcatggaaaagcccccccccccctcccccctctcttccaaaattgcctttgtagaggaatagacggcgtactggtaccatttcatatacgccgaggcggacgaaatgtttatgacagcaccgcgacggcgtttgaccatttgtcggaggacaaaagaggacaaaacggtaacgggcaaagtgttgacaatctgtggcggaaataattggtgaaatatgagaattgatcaatcaaaaaatgattaaatatattccaataatcaatgatcacccaattaccgtcctttcggacaacaatttggtcgacttttcgtcaaatcgttccgggttaatccatttgggttgccccatgccgaccattgttcactgaaacgccaattttcaagtgtttctggtccattttccattaaccaccattaatagttggaaaaagaatttaatttttcgaccaaaaaatggtcaaaattattaataattttccacacaaaatgataatcttttaatttctttttttctcacccaaaatgccgaatgttcaagtcactgatggcaccaaaaatgtgccgttcgttagtccgccgggttggcgttggtgaagtcgaattgtatcgtccgcgagctgcacttcgccccgctgtccgctggtggccgaatactgcttcgagctcggtggccaccgcctccgatttgtgggccgagcgcgagatcggcgcctggttgaagccgcgcggggccgacaccgcggcgtaggctttgccgaatgccgttcggtggcgcc

SEQ ID NO: 2767 - DNA, 2392 bp, Heterodera glycines
taggttttttgaaggttttgatttttttttggtttccgccaatggtttgagttccgaggccccgaaaatgggtcagaaattgttgaattttgccccatgacacccgaaaaccctctacttttagaatcttgtgctttgatgttcgaatttgcttttgttttcgtactttggcgtgtctgtgtgatttgtgatgaccacgaacccccccccccccagaaacattgtcccgtctccattttcttgactccttttttggcgctgaattcctccctgtacccattgaatccatgacatgacattttcgcagtccaatccccaccatcccctctttttcccaccaatcacatgccaatgtttgtttaggcacttctacgttgttggcatcggcttcatcccctgccttgccaccatcgtcttcacacacgtgttttacggtatgtttggttttttaaatgtacaaaatttactgggaattctgtttttcataaacatttttgggggaatttacgtccaattttttgtgtcagcggtgaaatttttttttaaaatttgcataaaatttaatcccatttcaatttcgttttgtatatgttttccaatgtttttaggcccctgcgagttgaccgaatacccaaccgatgggccgccgccgcgctattggcaatttgagcggacaccgctcagacaggcgtacacgtggctgaccggcaaatcaggtttcagaaaaaatcgcgcaaaataaatgagtgaatcggccgcaacaaacaaagtggggctctttgaatttttttttcaaacaaggaggggggagggatggcaaatttgcaacaaaaaaaaaaaaaaaatcgttcgtggtggatgccgtatgggggggggggggggggattgtcatgatccgcatattcgcagaatacatcctacaggtacaacccgggaggctattgacaaataatttgcgattcatctgcgattcctttcgaatcgtttcgatttgtcttatatttaccttttgtctgcttctacaattttattcttattttatctaattatagcctactttcgtctcactttgttcagaatttggctgtcggtgaccccgtgggttccaaagcggcgattcattcggaactccgtgccaaattaggtggtcattacgttgtgctgtgttcacaggtaagcatttatttgccaaattattttaatttaatttttatttttctcaggcgccggcactttcattcgccgccgattcgattacgcatttttgcctcgagggacataatgtatggaaacaaaataaaattaacggacatttccaaatttgcgttttttaggctttgggttgtgccgtttttaaattgtgaaagaaaagatggcctggctttaaattacagcgaataatctcttggaatgctcaaatgttaactcattcattctcacgtcacttcactttcattctgtgaattggcgacacttttgtgatttatatacaacagatattttatttacaaatttataaatattgaattttatttttgtatttttgaatatttttaattcaaaaactgatggatttaccaaattgaaaatgagtaattgaattcctaaccttaaactataattagcaaagtttttcaaacttttcaaaagaaacattccatcgattgatcggacgaatgattaaactgttaaacagtgattaagcgagtgattaaacaattgataaacgaatgattaaatgccttttcattaagcgtggtccctcttttcctccttttagcatttgcaatagcaattgacgtcaaatggcctgcacactccgccggtgtacccctgctccttaagtcgtccgtttgtgcagtgaatgtggcagagaaagctcaggacgaattcgcatccgtggccaaacccgaaattactcggggggtcgtcgtgtcgacaactgttgggggggggacgggaaggagaagtgccaaaagagacaaatcagaggaaaagatggagtgccaaaagagaaaggtggaaatcaggggaaggagaagtgccaatagcgacaaactaaaagggagagtaggagtgccaaaaagagacaagggggaagcccaaaggggaagagtgatctctgaacaaataaatattccaacaactcacactctctccacggagccatttgcgacggcatccgactgatgcgtttccaaaattaaaaagagcaaaaaaagaaaaagaaaaacaatttgcttatttatacacggcataagttctttggatggaatgtggcgggggttgggaaggattggagaagaatgatcaatgcaggcaaagaattggatgggataaatgagagatacagcgcaacaaagacgaagatagcgaagggagcgattgatgg

SEQ ID NO: 2768 - DNA, 5701 bp, Heterodera glycines
ttggcagactacctcagccttcaggtcgacccgattcattcaatcggaaattggcaatgtcaattggggacacaatgtgagaggaggggaggtggaggggggaagggagaaggggaagggagtgccgaggaagggaagagattcaaaaggggaagcaaacggaagggaagggaagaagcgcggatggatggaggaaaagcggaagaaaattattcacccatggttcaggaaaacggcaattggaccggcattttgggcattctacagcagggaatggccgacaccatctgcactctctacccgtctctcgctctgcccaactctctgcccactctgatttcccccctcccctctttcagtttctcccaacaaaaggcgcttttcttcaatttttcccatcccgtcactggcgtattctccccccccccctaatggtcgctaattgccttttaaggtgcgcgatatgtacatcgcaaagcccaaacggaagagcttttcgctggtcctttggaatgcctttttgccctacgagcccaaactgtggcttctgctgctcatttcgctgacccttcagtgcggcttggcctcgttggtttgcaacatcgaattccgtctcaattttcgctcttcctattcacccctcgaggcattttggatttgtttttctaattaatttttgttaaagaaattgtggcattatttgcgtctccaaatccaccaagtcaccgaattccaaacgcccttccacctccaatccggtgactgttgccttttggccattgactttgccattggccattttccccaggcaatttggccttcctcttctacgccctgatccaggccactctgttcactcagttgtacaccgccgttctcctttcggctttgatccgcggtcagaacccaaacccatgggactcttacaaggaaatgattcatttggtgcgcgacggcacttactcttttgtcatggacaaacatcacctgaacaaggacaacaggtactgctcgaagaccaaagggtacagcgacggattggggagagaaatgcaccacagagtcaaatcggcacttgacgaaacgttcatttcgcacagcttctacgaaaccctttcttattacaacaatctgagccaactgcgaaatttagcggatgccatcaaacacaacccgatcattgtagtgcaaaatgtcagtcaatcgttggactttgtcgagaagtaagtcaaaatgccgagtcacttttcgcccattcccccccccctggcagaggaggatttattctgccgaccaaacagcacagtttggcctatcagctgagcaaagaacgatgcgacttcttttattttgaggacggtgagaaatgccatcggcgaataaggccattccttcccatgcgcagataacagccaaagctccactttttttctgttctcacggcacagcaaattcctgcgcgaatggaatagggccattcagaacaatcaggcatttatcaggcgaacttacgagaaagtgagcagcccaaacattggccaaaaggcattagtcagtgacccacccaatcactgggacgagggggtggcggttggtccacccaattaacgaagcaaattgggtacctggagaatggggttggcccatccaattaattaagcaaacgcttcccttccctgccagtacttcttcaacagcttcaacactggaaatgtgccgcaatgcaaacggacgatggccgaaattggcaacaagcagtacgagcagatggaatggttcagcggcaacagcgacgcggcaaaagacgcgtcactttcactcggtaggaattgttccgccctctgcgaaagagggcacttacaaattaggtcgaattggcggacaaagaaaaaattccagaaaatcattttttgctgtctaattggtgctgggacgttagtcaaaaaccatcaaatgaataatttttgacagaaaattattcataatttcgtctaaaatagatcaaattttataatataaatatttttcgatagccctaagtgttttctattatcctgcaaaattagaaaaaaattctttaagtttaaaaaaagttatgacctgagaagctcaaaaacccaagtttttttgaacatttttagtcataactttcttgaatcttaacgaaactttttggaattttgtaggctaatagaaagcacttagtgctatttaatgatatcaagaattaaaaatttagatgcttttgaacaaagttatatcaaaaaatattttcatttgatggtttttgactaacgtcatagcaccgtctaattggccctttcttctgttttttatcagacattgtgtccaccttcggtatttttctgatcgttttgattggcttttcaattgctctgcttgcatttgtctgcgaacttttggtggacgcaaaagcgcgccgcttccatcgaaaatggcacattcgccgtgctttggttttcaccgctactaaccccacccatttgatggcaatcgcgcggcaaatgaacgaaaaacggaagcgaatgggacacgttgttcgtttacccccccccccccccccaattcagtgttttggttatctttgaattcatttttcaaggactcgcaagcatcaaccgaaacgcccccgtcatttctaagagagggtaattaaggaatttaattacaatttgggatactaatacactaattaatgcttgtatattttgggtgcccctcaaatggcgaagagttggtggcagagaaaaacaaggcagcaaaaatcggacggacgatcgaatgcgatcattgcggcattgacttttgcggcgatttcgtcgttgcaaatggacgaagaagaggaagagaaaggcgaacaaaaatcagaagggatgagaaaaagaaaaacgaacggagccgaaaagcaaatcgaatggaaaagtacggaattttgagagggaaaagcaaatcggaaggatgggaacggaagagatcgacgcgtcatggaatttttagaatagcaacgcatttcttcatcattttatcttttttaaaatttcataaactgttcaaaaaacaaacaaaacaactgccgcccatgggaatgtgcttttgcagttgttttttcgcttttcctgctgatgactcatccgtccgtccgttttcacttccgtccgtttcacttccattcactcatcccttcgcttctttcttcgtcatcgctctgttcgacttcgtccgtccctttgccattcatttccatttaaatcattccgtcgccccatcaaataaaataaaataaatatttcacaataaaacacacaaatcaaaatgttcttcctttgccctcccattgttcttcttccattggcccttttctgcgtcgcttcccatggcttaacaaatcattcgaaagcatttggaaatgaaagcgaatcgaatagaacggacttttttggcactgaacccatggaaattccccgtcataaaagtgccgacggattcgacccaatggtggacgacgtattcgctttgctttctgctggagaagagggggaagaggagggaaatgggacgaaggtgggaattacggtggaggaggaggaggaagaggaagagcagcaggtgagagacccctgacaggcttcgtgcctttgtgctcctgctgatcaccccttcgtccagctgcttctccgttgtgccgatcagctgtcgccctttgtgccgcttttgctcgtgccgccccattaccatcgctgggacttcagttgccattttcaaggcaatttggcgttttgtttttgttgatttatttttaataggcaatcagtccgaaaagcccgccgatctttccccaaacaatgccaatgaaaatgccgacctcttcttgaaaatgtcaaagccgtgccgctccagccaagtgccgcttacttaaggaacgcactcaaattgttcttttcagtcatttcgcgatgccatcacttccgaacctaactgtcacctttttgttggttttgtcgaccatttccactcattccccacaaacactttggtcacaaaactcaacggaaaaactatgaacggaaaagaagcggtggttcggttggtatgtggtgaggagatgaagcagttcaatgaaagcaatgtgaaggagaacggactcaaaaaaacgagcggggatgaggaaacggtcagaattaatggaccgaggggaggggcaattagaaaattatttatctctgtgggggagagggccggggaaggcaaagcttgtgacatcataatcattttgtaacccattgtcccaatcaccacccccctaatcacatatgacataaccaattgttgccttgggggcggtccctttaatccagctcttttccccttccccacttctccacacaatcagtctctgactgcgaatcgggagaggcggtccatccaattgtataatactcttgaataaatgattgttaacaacacctctaccaaattgggaatgttaatggacccgcctggacccacagtattcacttgtattgtaacccgacccttttcagttcctgaagactttggtggttgttgagaagacttggcttcccggttgcttggctgtttttttcgactcgcgaactttggaccttcagctggacgaaattgccaaattattgtggaaagacggacagccgaaattggggacatcgaacggaaagaacaaatgggcggcatcaaaagtgagcagagaatggaggactgcgaaaaatgattaattaaacttctcatcttagtttgtgtgtggggagaacgaacgcaaaacattttatgaggagctgagaaaaatgaaaggccgaaacgagaaaatgggaaaaatattaatcattgaggacggggaaagtgaggtgggcatcgggggagacggatgatcagaaatgggaagatgggtgatcagaatatgggaagacgagtgatcagaaatgggaagatgggtgatcagaatatgggaagacgagtgatcagaaatgggaagatgggtgatcagaatatgggaagacgagtgatcagaaatgggaagatgggtgatcagaataagggaagacgagtgatcagaatatgggagatgaaccgtcaatgcacggagagggaggggggaggagagggggggggggtacggtaccccaccttccctaccaacccaaatcttggcacggacctcccctgcttatttgtaaggtcagaaatgttctcctgaagaagagtgacgaggagctgtactgctcggaacaggtaatttgcctcaccaatggtcattttggatttatttttccaaggccgagaagggattctttcaacgcctttgggacggattgtttggataaaacgggacgggaggaagagactgaaggaagaagaggaagatggaggaagagaagtgaggagaaagaagaagatggaggggggaggaagagactgaaggaagaagaggaagatggaggaagagaagtgaggagaaagaagaagatggaggaggaggaagagactgaaggaagaagagcagggggaggaagagacggaaggagaaagagggatgaacacggaaatgattgattgacccataaacaaaaaaagtctttccattcaaattatgtgttttttatgaatagaaacattgacaactttacaaattggacttggtaattaa

SEQ ID NO: 2769 - DNA, 4825 bp, Heterodera glycines
aagtttttggacgagccgagagggcctttaggtcggcatgttcgacagtacctttccgctatgagttaatcaaacgtgaaatgttgcggcaactagaggagaccgatgcacgcgaatggaatgcatttgatcagttgatgtcaggcattcggcgaaaaaatggagaagatttggatgatttggctgatcgcgtaattactttagtcagacgtgcctaccccggattaactgaccatctcgttgatgactatgcaataaagcatttgatcagaacctttgaaagctctgagttagctttaagtttggaaatgggcagaaggccgggaatgacattcgatcaatttgtggggatggctgcgcgcgccgaggcaacgcagaaagcaacgcgtcgcattgcatcaaataatgcttatggaaaaacgaattttggagcaactctaacacggcaaggtcctgaaccgaaaaccaattttcaacattccactggaaaccgtccaaaatgtttttactgtgaaaaagagggtcatattgcgcgaaattgtttccggcgtcaggcggaagaaggcaatcagaatcataattcgcaacaaaatcataatgtgacgggttcaaataaaaccccgttgtccttgtacccaagccaaagtcccgcttataaacccgaaccgaacaacgcaaatccgcaacgcccacaaaatacgcaatcacgaaattttctcaggcaaaattacttagtggaacaaaaagacttaaatcatgagtcagcggatatcaaatgtgctggagtgatcagcaacgattctaagatgttggaatttttccaaaaattttggaaacaaaacgatgagaattttgagccaaattcaaacgaaacttcgttagttgggaaaataatagcgatcacggtcacaatttttgatcaggaagctccgtctatgatggacagtggagcccaaatttcactagtgcaagcgatcttcctcaaagagctgttcgaaaaacaaaattttggaaaggaaaagatgattatttttcctaaaacgagaaatgtcgttgacgttaacggcaagcgcgtcgaatgctacggcataatttctcttccagtcgctcgtagagactgcgagcctattaacattcaattccatataacggatgctcccattggattaccaattctcctcggaacaaatgctttgggcccccttggtttcaaaattcttgattccaaacatggcgagcttatcgaatttgagcttgctagtgaaaaatctgattctgttcgcttaattcacactataatgctcgagccatattctacaaagttggtcgaactttctgtttcaaagtcctttgatcagaaaaatgttttaattgcgtcatccggcgtaataaacgatgtgaaagttgaatcatcagtggacagagtgagaaatggcaaagtgttcgcttcgattacaaatttttcgctaaattcgataattttgaaagagaatgaaagggttgccatagtggaaactgtcgatgaaattgctaatgccgaagactgcttaaccaattcatggctatttgataactttcaacaaaaaatcgactcggaatgcagaaatactaatttctcagaatggaccccaaggatcggtgcccttgacagtgataaagcaaagacacttgaaaaagtgttactggaatctaaggatatttttgcttttaatgacaatgaattgacccaaacggaaatgataaagcatcacattgacacaggagaagagagtcctgtcaaaaagcgaatgagacctgttccttacgcttaccgagaaaaagtggctacaatgatccaagattatttgggccggggaataattcgtccttcgctttcaccttggtctagtccgattgttattgtaccaaaaaaggatgggtcgttaagattctgtgtcgattacagaggtttgaatgcaattaccaagaaagattgctttccattgccaaatattgagcgaacactgctaatgcttgggggtcggaaatttttctccactttggactttatttctggttattggcagattaaaatggacgatgagtcaaccgaaaaaacagcttttgttactgaatttgggttgcatgagttcaccgtcatgccatttggcttatgtaatgcggtagcaactttccaacgcttcatgtcccatttatttggcgataaattaaatgatttcgtttttgtttatatcgacgatgttcttgtggcatcagaaacgttcgaacaacatttagagcacttaaagtttgtttttgagcacataaaggaggctgggctaaaattaaaagtggcgaagtgccaattctgcaccgaggaactccaatttttgggccatgttttaactcgcaacggaataaaaatggacaatgacaaaataaaaccgattttggacatgccaacgccaaaaacaaagaaggaactccattcatttttgggattcatgacctattataggaaattcatttattcattcggttctatggctgcaccactatttaagctgttaaaaaaggacgtaccgtttaaaatggataacgccgaaatggctgcgatttcaaaattgaaagggaaaattctgagtgatgttgttctttattttcccgattttaaagctgctatggaagacccgacacgaaaatttttgattatgacggacgcaagtaagaccggaatatcagctgttctttgccagcctgatcaacaaaatcggattcgaccaatatatttcgcatcaagacaatgtaataaacacgaatcgcgatactgtcccacagaattagaggctttagccgtcagattcggcgtaaaaaaattcgcacaatacattataatgattccgacaagagtattaacagaccacaaagcattaattcctatgttcaaaagtaaaaacgagaccggtaatgcgcgcgtcgacaaatggataatggaattaagctcccggtttattttggaaattgaatataatcccggcaaaacaaacataatcgcggatgttctttctcgttcgggcgcattaaaaccgaatgaaacagcagaagataaaactgtgattggacaaatagccattggaaatgaaccggactgtgttggaaacgaggcggaaataaatgaatggattgccgcgacaaaagaaagcgaatttggtcatatctatgaatttctgcaaaaacggaaattgcctgaagatcctcgggattctcagcgaattttggacacaatccaaaaattcacagtgctgaatggattgctgtattttcacgaatccaattctggaaatctccgtctttttgttccaaaaaaatttcgtacggacttaatagaagaaagacatgagggtaaatgcgcggggcacttaagtgggaaaaaaatatttggacaattagctgaaaattatttttggccaaatatgcgagctgattgtgttaatgcggcgttaaaatgcaggatttgtgctcatacgaggagtccacggtcaaacgtcccacaattaaaaccagtaattacatcagaaccatttgaactggtctgtatggacatactttccattggaatgtcagagagagggaacaaatatgtgcttgtaatggtggatcattttactaaatacctgataacagcagcaattcccgacaaaagcgtcgaaaccgtcgctaaagcatttattcagcaacttatccttattttcggttcccccaaaaggattcattcagacaaaggtactgagtttgtaaacaagacatttgaagaaatcacaaaaattctccgagttgaaagaagcatgactgcggggtacgatccaaatgcaaatggacacgcagaaagggctaaccaaaccattttaaatatgctcaaaaggtccacagaatcaaactggtcatgggacgatcgcctgccatttgtaactttcgcttacaatattgccccatcagaaactactgggttttcaccttttatcttactttttggacgaccggttaaatttccttcggcaaatggtgtgaattttccagttaatccgctctatacagtggatgaagagtcatatttgcaacttttccgtgaaaatttgcagcaaattttaatgaatgccaaagtcaacgcagataaagcacgggaaaaaatggaaaattggtttaattcacagccaaaagtcactgcaaacaagtacaaaaagggcgagcgcgttatggttctttttcctggtgccaatcaaagagtagcacataaaaagctaaaatggaacatttttggcccctacgaaatcatggaaatatctacgtcttcagcaaaagtcgttccggtggataaaaagtctgctgaacagatttctgtgccagtggaacgactaatacacgtcccagagggaataccaaacatttcaacagttccacgtggaaaaaatgcttacaaaaatttgttgaatgcgatgaccatcttgaaacttttggaactaaatgatgttgaggggtttgggaaggaaaatttggttgaaaatcggataaattcatcagggacgatgaataattcagggggagtcgaggaaatggacaccagcagggcggaaacacaaataaagtggacaaatttttgtgatggcactggagaacacattctctgcaaaaaactgatcgcagcagatttggaccctgtgttggacaagcagagtggcgtgggacagatgatagtgacaactccactacaaggactgatcacaatttttgttttgcgatcaaacatcgcaatggcggcgagcaaagaactgctcaaggtcctgctgaa

SEQ ID NO: 2770 - DNA, 1767 bp, Heterodera glycines
  unsure (1)..(1767): unsure at all n locations
tttgaattctgacccggattttcgaactgatcaantacgtagaagaacggggagattcagtccgatcgggctgtgcccgggagcagatgaggtggaattgatntggcaccactggacaaacaactgtacaattgtgcatgacgcattgaaggcgacaggctacggacagatcaaattggatgcgccgatcgcagtttccgagttgccggaggcagaccgaattgtgtggcaaaaagtgtttgatggtgggagttgggccctggaaaaagtgcgcgctgctgtcatccatggcaagacaactttggtgcaacagccacgtgttatcattggcgattcgagtggagcacaactgtgtggggaaagcgccaaccaaatagccgcacattttattgggaccacgaatggaagccttggcgatgtcatcagagctctggacaaggccattctgacgactaaagtggtgtcagcgctgattattttgggacgtgatgcactggtacgaggagagacgatggcacaaatcgtgggtgaatgtgaacgaattcgggctctctgttctcgatttgcgcatgttcgttttatttggataccgccaccatacgttcgggaacagcacgcgcaatacaatgatctgctgccatcgttggaaagtgtggccggggactggtttttggcattcaccgagcacgggcgtagtctggttgaactgtggaggttcggcgacacattcgacatgtcgcgggtgcgagcagacggaaaaatgttgcccgaaggtctgaagtgtctccgtgcctggatctttacccaaattcctcaatttcctgatgataattcccttggaattagccgtccatcacgttctgtttcctcttctgtctctactcaattgtcggaattgtcaatcactcgttctcatactcattctcgagatgttcgtgttcacccgtaccctattcgccaatcatttcacaattctcgcgggcgcagagatgggagagtctttgagaatcgtcgtcgtcactgagccatgtgccttggaccaccaccaatcggatttctaattctctttatttctgtctctcatcccaattaattgcttagacgagggaccgtcttctcataaagggtcggggtgtgatatcatttttggacttcattaattatttaatttattatgtttgttttggcgttccgattattcaaattgaccttaaataatttgttttggttattcgtgtctttaattcgttttgcataaagcataattttatcgtttcgatttattttgagacagggcaagcacctttgactgatcaacaaatttaaattgatcgaattgctttcgttgccttcgcttgccaatttggaaaataaagccaaagcataattgttcaaaaagtgtaacttggcgctcctggacgaccaaggtctggctcagtgacattttcattaaatggggataaacgcggtcataaaattgcttgaaaaccgacggttgaagaaatttgaaaaaagccctcgtgttggcgcattttgttgatttgattttgtcctcgtgtgggactttacaacttctgctcgacaattgtttanaagtactcgtgttgtactgagcctagatttanaggcatacaataaactcgtgttgtttgaaacagttaaatttctctcgtgcttgggaaaaagtgatgttcattccacgctcacctccattgactcgccaacgtgcacgaaatatccagcagcagcaacaaaacgaacaccaaa

SEQ ID NO: 2771 - DNA, 1733 bp, Heterodera glycines
ttttcctcaaaaacgaaaaaattttacccctaataattataaagttttaatcagctttgagccattagctatatttagtagagaatccttgaaaaattttgcttaacttattccaacaaaaattaagatttccctggcgattggactatcaattcctttttgcatgtttcataaattttgacaaaaaaaaatctcaaatttttataaatcatgaacgagcatacgaaatatgcaaaggaatccccaaaagtaccaaaataattaaataaaattttttattatgattttttggggaaaaaaagttctaaagcgtgaatacgtccttaaatgcaaaaaaataacatataattcggcatagaatgttttgaaaaattgatttttaattcctcgtgaaatggaccttgttctaaaaaaataaaagaagatttgaaaatgttggcaattttaattgcaacaaataacaagtaatttttaaaaaataataattatcacctgtgaggccttctgttcgtgtaggatctgtaggataacaagtcgtttggcttgagacgcccacttgaacccaaatattgttgtgtttttcattaatccactcccactgtcaccctaaaagtaaaaattattttaattttttttaaatttattacagtttcgattatgctcggcccaggctgaacacaaatgatttggtcatgctcattatcattagaagaattatcatcatcatcagcaattgaaagtctttttgctaaaccaatgttttaatttatttattttttgcttttcaatttaaattacatttgattgatgcactttgacaattctctggtgcactgattttcatttgaccgtacatcaattgtttgcttgggcctggcttactgtcattcgaacaatatggtgaagtacggccccaaccagcaacaacaaaggttgactgatcattggtgcctgaaaatataagcaaaatatttttaattttaaaaaagtatttaaaattatttggcaaccatattccattaaacaaatgggacgagcatttgctgtgaatgcaagtgggttcttcaactaaaattttattgtattaaattacattttatattgtgtatataaagaattcataaagaaaatgaaaaaactaaaaaaaaaccaacttttgcggactgaactatcaaaaaattaaaaaatgttttttaaattataaaagtttttcccattagattttcctgagttaagccgaatagaaaccagaaaaattcatataaatattttccttaaaattaatcgtgtcctaaaacactttataatgtttttatctgctttctcatgattaatttgaaaaaatgcttaaaaaccccaaaataataattgacaaacgaatttttttattcccataattacaattttctggtttttacagaacttaaaattcctaaacatccaggaaattgtcttgttgctctttaaggaattaaattagaagacgaattaataaagcaagcataaaaaacgaattcaaaattcgtctttttttatcattttaatccgcttttcctcactattagcgatttatttgaatttttacttcaattattgccatgtcatatgcattcggttttataatgacgtttttatctgctttagcatcattaatttgattgcgttgcgcgtcggtgcccttttgggtgcaatttaacggccgcaacgcccctgagttgttgctgttgtttcaa

SEQ ID NO: 2772 - DNA, 7055 bp, Heterodera glycines
  unsure (1)..(7055): unsure at all n locations
tctcactgatcaatttgaccattctcttttgatcgcccttcattccccattttcattgatcaaattggccaagtcttctccaatttgtctctgaacggccccattaatcccgaactcttcccttggtcaattctcccccatttgttcaaaaatgcccctttaactactgatcaattacatttccctaattgtccattgagtaatagcattgatcgtgccttcccccatttttccttgatcatttttgcgtgcatttcttttgataacttccattttccctatttctgtttgatcaatttgccccaatcttttgatcagtggccatccccgcccattttcactgattaaatggcacatacttttgatcagtgccattcctccatttttttcctgttcctgaaattgcgcgcaattcttctaattagtcgcatcgtttccccatttcttctgatcagctatctctccctcattttcctttaagcaaattgcgatttttgatcagtaccatttttctttcatcaaattgcgcgcaattcttctgaaaaatcgcatcctaccccattcccattgatcaatctcatcccccctcatttttcatttatcaatttgctccaatttcctctgatcagtcacacctcccatgttcctttgatcaaattgtcccaaatttattctgatcggattttttttttcggccatttcttttgttcgacttccccattttcagtgatcaacaaacattctcttttgatcagtaccatttttctttcatcaaattgcgcgcaattcttctgaaaaatcgcatcctaccccattcccattgatcaatctcatcccccctcatttttcatttatcaatttgctccaatttcctctgatcagtcacacctcccatgttcctttgatcaaattgtcccaaatttattctgatcggatttttttttttcggccatttcttttgttcgacttccccattttcagtgatcaacaaacattctcttttgatcagtgccatccctccccaattttcttttgattaatgccacttcttttgatcggttcccctcattttcagtgatcaaatggtgcgcatttcggttgatcagtcccccaccccctccattttctttggtcatggcctcattcattttgatcaatcttccttactgccatttcttttaatcagtgacatccctcacccattttcactgatcaatttggccattttatctgatcagtcccatctctccccattttcattggtcaaattggccaagtcttccccagttcgcctctgaacggctccatttttcctcaattttttttcccttggccaattctccctcgtttcactttgacctcatctactctggtcaacacttttcttcactttatggtcaattcgcccctctttaattctggtcaacttatctctttcaattctgatcaaacccctttccccatttccctcttatttctcaaaacatttccccttgttaattactgatcagtcccattttccctcattttcattgatcaatgccccattttttattctctcctgatcaagttgcgcattctctgatcaatgccattccccatttcgtttaacaaattgcgcacattcttttgatcagtgccaccccccatttctcattgatcaaattgtgcgcaattcttgccaattttctctgatcaaatttgtctaattcttctgatcacccaattccctcattttcattgatcaattgcccatttcttttgatcaggttggcccaaatttatttttatcggattttttttgggccacttcttttgatcaagttggcctttgtacccaccctgaggggttcacatattatctcacatttacgcgttatttttatgcgtttttgatcaatgccattcattcttctcttttctttgaccaatttgttccaaattttctgatcaatcccatccttccctcatttgatcaaatttggacattttatttgatcagttccttcatttccccattttcctttgatcaaaaggccaagtcttccccaatcgcctttgaacgaccccattaatccgggatttttcactctaccaattcttcttttattttggtctcttctatttctgttcaacaccatccctcatttcttgtcaacccatctctttcatttctggtcaaccccctttccccatttccctctcatctctcaaaatatttccttttaattaccgatcagttccattttccccatttattttggtcaacttgccccaatcatttcgatcagtgccattccccccatttattgatcaaatggcacaaatttagtttgggtcaatgccattcatcatttttctcaaattgcgcgcaattcttctgagcagcgtatcccttcctctttgatcagtgccattctctcccccattttcttttgatcaattgtccctcattgattaatttcatttattttgatcagttccaccccattttatttgaccaatcagtcccaattaatttgatcaggcccctccctctaattttcaattgattaaattgtgcaaatttcttttaatcagcgccacctcctccgtttttgtgttcgaattgcgcttttccttttgatcagttcccacatttttttgatcttagtgcgaacatttcttttggtcaatgccattctccattttattgtttgatcaaaattgcgcgcaatccttctaattatttacatccattcccaaatttatttaagatcagtccaaccctgaggggcccacaaatggtacctttcggtcaatcagtgccatccctttttctgatcaaatggcgcacattctcttttgatcagtgccatttccccattcttctcttcatcaaattgccccaaattattttggtcaatcgtcttttggctatttcttttgatcagtgtcacccctccccatttatattgatcaattgacgcatatttcggctgatcagtcccatcgccatctttgatcaaattgtgcaaatttatttgatctgtcccattttccccatttctatttgatcatttgtaccatttttcattgctcaaattgcgcacatttcttttgatcagtgccacgtctccccatctttcattgatcaggtacattgatcagtgccatttccccttttgatcaattggcacatattatctgttgatcagtgccattcctcaatttaattggcacatactatcttttgatcaataccattccccaatttttctttgatcattaggcacacattctcttttgatcagtgccattctccttttagtcaattggcacacatttttttttgatgctcctcttacccatgccaattgtcaatcatgagtctatcgtgtatggcctctccattcattcattagtcaacaaacattcattcaattacgcattaattcattcatacatgtagaaaagcacgcatgttcactcatgcttgccacattcattcacttattcatgccatgtgctttcatagagtcatgtgttcataaattattcatccattatttatatatgtgttaatattataaaatggtccaaaataagtttatctcattcagatgagaaccaaaaatctgccttctaagctttccaatcccgaagttttaacaagtgatgagagttcagcaagttttgaaagccctgcggggaccatttatgaatcattcgaggcgttgagcattgatagctcaaaagtagcttcaaacctcgaggggtacactaatgttggggctgaaatcgttattgaagggactgaatccaatgaaaaccctgcggggtccggatatgaagaagtgagaatcgaatgtagtagcgtcatcattgcctgcaagaagtcgcctaagtcaaagccaaatgttgaaaattcggataatttcatgagtctgtttgaaaatttggaattgacggattctgaaaaattagctaatcaatgggaaattgataaaatattagcggacaccgcaccatcgctagctggttcatcgcaaattgagagctcagtcatagggtttgtgtgcatctcacaccccatattgtgggcattggtacaaccggacattttgggtgaacagaatgagttattggatcgaaaacatttaaatttggaattcgatcaattgatttttcaaagtacaccaagttatgtaacggctattacactaaatccaaacaataactggccacatttcacccaaatttcattgaattggaacaagcaatccctattgggaacccggatcaaaacatcagatctgaggcaattaacttctcctcctaagatgggaccatcagtgaatcaaattgtcccttcgagttgttgtggaataattagggaggtgatacaaaacaaaatcacctcccaaatcatcgccattgatgtctttttatatggggaagaaaataatcaacgcttcttcacacaccaaatcgattcaagtgttaatttgatggaattagaagaaggcacacgggttcaaactacgggattttgggccaaaacttcagcaattgaatggcaaacttcgagtgatggaattcgcgattggtggactgagcagatctatgtcggaacaaacttaaaaatatttggcgctgatgaaggcgaagacaatcatcaatggctccaaaatgaacaatttctattgtcataccgttacctgtgtgccgccatggatttgcaacaatcaccaaaacggagatgaattaagtaaaactttttgttttcctcccttttcggttcaatggcattctttggtcccttttgtttcctttctcggtttttaaggcaattcctttttgttgccattttacttcataattatttaattagttaattagttgggtaatttcatttttgccccctatcatttaagcactttatttccttttttgcactcacaagttttttttatttcacccctccttaacttccggtgttcacaccgtttacgctgtgatacaatcagtaggaacactttctcaccacattacggtattaatggatttccgctatttttttctcacaaagcgatttttacattagttccgataaaggaattattgtaacacgggaacgacagccacgcccattatcgggggcctttaatctaagcacttcacattcattcattcattcttccattcatttgatttactgttctccactttagatactcttgcacaatcccactgctacttctcatctcacatttgctctcattatgtttcctttctctggtgggggtccacctaatcaaagcgcggcggcgtcaagcaatgcgcagacagaccctgaggggctctccaaagatttgcctgagttatcagtggttgataaactgatgtttgctggaaagattctaagcacgccagcacgtttgtctgatgagaacaaactccatatggacttaattaggactgaggatggtgtcaatcgcatgacacgtcaccttaacaggaagataaatcaaaccaatagggacttgactgaactcaaggatgatactcaaaccctgataactcaagtaaatactctcgcaaatagttatggtacagtccaagtgttgcaaaaacctaaccaggcaccaaaattcaataaccctcctatcttaaattatgcgactccctctccactcaagaatcagaacaatagctttagcaatgctaatgcttcggttcttgaagccatacctctcaacaacagtgaggaagattcccaagatgaagaatttcaattaaatccttcgggattccatcacattaacatgctttttgctcaaactagtcactctttcacattcacaattttctctggaacctcaccattagaattcgatcgttgggcaagaaagttcactgacttgcttgactgcaatggcagaaagtgggataaatctgaaaagttggcacgtcttaaggcatgccttgatggcagggctggacgtaactgattttcagttacggccatccgtaatccgtcattacggcgattttttcagttacggccatccgtaatccgtcatgacgggggtcaaaaaaggccgtaatttggcgtaatccgtaatacgtaatccgtaattttcaaaaaaaaatttttttttttttaatcacaaatcattcaattgagaaaccggttaaaagtaaattgtgatgaagaaacaaaagttttgcaagattttctggtaataaactctttctcaaatcatctgaaatcaggccggccgttgagaaaagcctctcactttctgaacttgttgcaggtggggaaagaaatttcagtacaacatcaccaatcattggccatttttgtgaattgacttcccagtataatgatggatcggccctggatttgatttttggatcccgcaaatattcatttacttcaacttcggctttttgtcttgtctccaaggcagatggactgggggatgttgccttaaattaattattatgaggggtatataaagtttatttacagtatccattatttgctcaaattctgcgtccttttcaaaacgagaaaaaatatccccagccgaacttgaaccactgcagtctcttacgtcaatttgtaaatcaatttcctaaaaaaattaagttacaaaaatagaaaaaataaaatcacatcagtctttgcgtggtaactctcaacttcacttatcaaccagtctttgtactgattcagccgactgctgtcaaggtaaatggtcttgaagcgtgggtccaaaatagtggcaagaactaagtttttttgttcttcagcttgtttaagccgcaattcgatggcgttcgcaattgttttcttaatatttgaaaaacgattgtccttgtcctcacgtagaccgaaagaaattgcctaaattttttaataaataggaaaaaaaattaacgctaactttaaaaagtggaatgataattgagcatgaagaacttctgttttgtaaaagaatggttgcctcgtnaatgggagaaagtacgcttttaattgatgacaaaagcagccaatcatcagc

SEQ ID NO: 2773 - DNA, 1903 bp, Heterodera glycines
cttgatggtgaacctagacgaatctttgacaatttaattcctgcccacaaagcaacttcttcggaagccattcaaaaaatcaaggaaaatctggacacaccacaaaataaagaacttacctatcaggcactaagcctgtgtaaacaaatggaaggagaatctgtagatgattttagtgcacgactaattcctttgattgaggccactacggcagaccttacggctagtgctagtgaggaggtactctgtcgagcatttttggaaaaattgagtccaaatctcaaatttctcacccgaaccttgagtggacccgtaagaagggacttcaaaatattgagaatgaatgcacgcgaagcagagatgatgcatagagagattccaaattctattccagtccctcttttcccaatttcggaacagcacaatccgagattcaataatactgaaccaccgaactaccaagaaggcaactttagaagatggggtcccacttgctctaacagggagcctataggtcccggacagaggaaccggaacaactgggataacaatgcccaaacctcgagaggctcttttaaaagaaacatttggcaactttcatgaggattaattggttggatagctaagtttaaagcacacttccattttctcacaccttaatcacaccatattttaagtatgtggaccaaccttgagaagccacatcaacttgaaaaatgccaacagaaattgatcacttccggaattaatgataaattgttaaaaaaacaataagtcccgcgggactatttattgctttatctctcttttatcagttctgaggaactttaacacatcttaattttatttaaatataaaagctaagtctttgcaatttttggaacagactttcatattactcacacacttctgtctaagccctgcggagctaattaatgaataaaaaagcagtgagaattgataactcaaagccaaaatgctcaaaaaaatatttttttttaaattaaagtagtgaaggattgatacatgaatcccgtgggatttaagtctttggatcagggacgatccgttgatatgaaggggaggtatagtcatacggtcacgcttggtcaaatcactccgtggtatggaactcggactcaacaccgcgaaatatatccaaatctaaacttcagtcgtttggacgcgaaaccagggttcccatcgtccatccttcgtttccaaggacgggtatgccgatttgcaaggacatagtggggaaaattcatgaaattcaaggacatttaaaatttttattatatgcaatgcaaaatggttaatatttattcaaatggcttgtatttttcaccggaatggattttttccaacatttttttgttttcacttatcattttcttcatttacgacgacttttttctgctttaaaaacgctttttttgtggcgcgctttttccaaaaattttgtgggacagaggggaggggggggggggggtccggcggtgccgacaggcgccgccggggaaaaattttgaaaatttgaatgcaatttgttaacagattttcaccaaaaactgcctaatttttgcgattttaagccatgcaacgacttttttttttgtccaaaaatgaccaaaatttgcgatttttggctaattttttaagaaaaatagtgactagtgacttaatgccataaaatttcaaaaattctcaaaaattacatttttaaatgacataatgccataatttaatcaaaatatcgttgaaaattacaaagatttctcaaatttctttgaattttttaaaaacttttctaaatgttcattttcaaggacgtccttggcatccaaggacattttttattttcaagaaagagggcccaatttcaaggacgtccttgccattc

SEQ ID NO: 2774 - DNA, 2945 bp, Heterodera glycines
ttaattaaattctatttttattattttcacgtttttttttctcctatttttagacattctcatccagctgtgctaccagaaatgcgaacaatcggacaccggcaactattccattcgcattgtgaacgacttcggctcggattcggtggacttgcgcctggaggtggtcgatcgccctgcaccgcccgaagggtcattgaaggtgctgaacattgggaatatttttgtaaacagaaaatgctatgagagtgacatatttgtaaaacaattaggagtggatttttttgttttttttagaaatcaatttttaacggagtattttcgtttttctgtattttatttttattcctcgcttaaaacaggtgttatgatgcatatttttgaatattttataaaaattttttaccaaatatattttttttttgttttttctcaagaatttcgcttctgctgatcatgttccagacaaagcatccacattcaaaaattttttttaaattgatcatttttttctttgtaaaatgttggtttaaattgtccccttattcaaaacgaaacttttaaatatttaatgtattacaaaatcatgaacaggagcgaactacgtccggtagcggaaggcgacgcgttggcagcaccgcggcggcccggcaggcacaggcggcagcagcggcttgcgctgcggacgaagaagcaccgaacgaggaggggcgacaggacgtggcggtggtgacaaaaaagatggcaattttggtaaaaaaaatttctaatttattggatatatttttcggggtaaacgcaattgcgaacttttcatcaaaatataatatttttgaccttttttatttatttttccttaatgcatcaaggaatttttgttttctttattttattttttatattatttaaaataaaaaaaatcattcatttcaaaccgatttaaagcatacatgcgaatgcgtcgggcgtaaatattagtgtgtttttttggcatgatgatcaattaataattttccaataattctaatcaggatttttattgaattgtgaaaaatttcgcagaattcgaatgcgaatatttattttatgttatttataaataaaataattatgtttttaatgctttaattaacttcaaaattaaagagaaatttttttaaattattaaattaatatttttaattaatcaatatattacagaatttaaattgcaaatatctttttatttatattttttaaataatgatttttttaatatatttatcataaattgaataaaaaacagtataatttaattgttttattgatttgtgcaaaaaaattgaagtcaacctggcttgagtcagataaattgaattttttctaattgaaatttggagaacaaaatttttctaaaaaaataaaatataaatttcgtcaaaataccactaatttaataaattcgtaaaattaaggcacttcggcgcgccaatgatgagcatgaaactgaatcatcagctgttgatgaagacgaatatgtggtcgaaagcgatgatgacattccggcggttgaggtgggaataaatttgaaagggagggaggggggtcaaaacgaaaactttgcaagagagggggtggctctttttttcgtgcttttttcatggaaaaactttatgactcttattcctgtctattttctattttttgtgcctaataacccaatctatattcatgataattttcatgagtcaagactctcgagcatcacacaaaaacattcatgagtctcgacaaaagaatagagagttgagacgaattttttagcatcgcagcagtgtggacatgcgtcgtgaatcattggctgaaatcctggacctgggcacatccggcacaccggcacggattgggtgagccaaaatacagcttccagcagaaaatctggcaccgaattttggaatggtgccaaaaaaatcggtgccaaattttgcatcactaattttcttttaaatttgactaaaatttttcaatttacaaaaatttggcaccgaattttggaatggtgccaaaaaaaatcggtgctaaatttgtatttaacaaattttcttttaaacttactgaaatttcaaaaaaaaaaaaaatttcagtgcctcgttgttccctggaaagcgtgaagaacgatgggtcgacccattaccagaaaagctgcaatttcagcagcagaagaacaaaattgccgagctgaaatgcaaatactcgcgcgccaatgccaaaggtgaaaagccatgggatttcaatgcttttattaaaattaaatttgaaaaataaatcatttttcattatttaaacaactgataaaatcataatcaattacttttttcatcaataaaatacgaaaaaaaataaatgagaaaattcaggatatattcaaatctaatcaaattctaaaaaaaataaatttttaaaaatttcttaaatttaatgccaaaatgtttttgtttcagtgcattggtacaagggccgcaaggagctgttctcggactgtcttaagtacaaaattctgatcgacaagcagtccatcacgctgatcatcaacaacccggacccggacgacagcggcaagtactcatgcgaagcgaacggagttccgaccaattcatttatcactgtggagggtatgttttggacgggcggacaaaaaaaagcagttaaacattttccacggacatttttggtttttaattaaaaaatttacttttttatctaattaatactttcattttatttaaaatatatatatttttttcaattgtgtatatatttataatataaaatttataaaaatgttttaattttttttaaataattatttcatattaaagaaaataaattattgcttttttttcaaattagataattatatttttcacgataattttatatagaatatgttttattaaaagaatgca

SEQ ID NO: 2775 - DNA, 3110 bp, Heterodera glycines
  unsure (1)..(3110): unsure at all n locations
cttggagtaaaatttaagaatatagagtgcttttttatcttcctcaacaaaaaaaaatgcaatttttagtaaaaaaacaaacaaaatattttacactttttcagcccaaagcaggcgagccgcccaccgaagtgcctcaagaacgatgggtggacccattgccagaaaagttgcaatttcagcagcaggagaataaatttgccgagctcaaatgcaaatactcgcgcgccaatgccaaaggtgattattaaaattaaatttgaaaaattgatcatttttcattatttaaacgactgataaaatcataatcaattacttttttcaatttcaataaaacaccaaaaaataaatgataaaattaaggatatcttcaaatctatttttaggataataaaaatatattaatttttaaaaaaataaattttaaaaatttcttaaatttaatgccaaaatatttcttttcagtgcgctggtataagggccgcaaggagctgttctcggacggtctcaagtacaaaattctgatcgacaagcagtccatcacgctgatcatcaacaacccggacccggacgacagcggcaagtacaaatgcgaagcgaacggagttccgaccaattcatttgtcactgtggagggtatgttttggacgggcggacaaaaaaaagcagttaaacattttccacggacatttttggtttttaatttaaaaaatttacttttttatctaattaatactttcattttatttaaaatatatatatttttttcaattgtgtatatatttataatataaaatttataaaaatgttttaattttttttaaataattatttcatattaaagaaaataaattattgctttttttcaaattagataattatatttttcacataattttatatagaatatgttttattaaaagaatgcattttgtttcagactcaacagaccaacaaccattgtcctacaccgcccgtcgcagcgagtcgcgcagaccgaaaagtgccagaaaggaagccgcagcattgacccccttggacgccatgcagtggttggttaaacaaaaaaaaacgaaaaaaaagtttaattcatttattttattttttagttgcagcagccatttgacgccgccacatcccaaaaacacggtgagcaaattcgggtttttaatttttttttttttttttgtttttttttcaataattccttggtcatagtaaagtttgttccgcaccctttttcgaaaattttttccattggttttcatgtcgttgatcacgaatccggcctccttttcgaccaaatccgaatcccggacccgaattcgaaccaaagtcggaaattgattcttcacaaatgctcctttagtgtccaaaatcgattcaaatacatgaaatggccacgattccctattttctattcaattcagtgcatttggatcgatttggacaataaggatgtattttggtaaaaaaattttgactttggttcgaattcgagtccggggtacgaaattaaattatttctattttctaaagaacctgggcacattcggcacatcggcaccagaccaaccattatcctccaccgcccgtcgccacgagccgcgcagaccgattgacatggcggcggttgaggtgggaaaaatttgaggccggagtgggtggggccaaatgttgcttctcaccactttttttctgtgttttttaaaattttttttggggggtttggcgagatccgatggtgccaatagtgaaattttgaaaatttgaattttgggcttaatttttttattacataaaacccagaaattgaaatttttgctctttgttgaaataatgagttaatattttccaattttttaggtgcgctgcgcggacgaaccgctgctggccaacgcgccattcaatgtgccagggcggccctacccaccggattcactgtacaccacctacaactcaatcatgctccattgggcaccaccgttgcgggacggaggcacgccgatcactgaatacgagctggagaaacgcgagcatggcaccaagctgtgggagaaggccgacaccaatgccgaccccaaagccaacaccaaaaagcagtgggagaaggacgcatttgccaatgtgccggacacacgattcaaggtgggggaaaacaggagccgttcgtcccctccctctcgtttcatcccccccccctcgccgtaaattttttttttaatttacaattagaaatttaaacaaaatcagaaaattttttataagacgtttcagcaattttttgcaaaaacagaaaatcgttagtttttcaaaaaaaccaaaagaaattttttttggtattttcttataaaaaatttttaaaatttcttgtaaatttcaaggtttgaaattttttttttcaaaagtttttccgggggtaaatgatacttgaaatttgtctaaaaaccactaaaaaattggtatcactgaaggtgaccagcgtcaaacggcagcaaatctacgagttccgcgtggctgcagtgaacgcggcgggccgaggcgagtggagcaagaactctgtgccaattgctgccacatggtccccctgtaagccgttgatcaccatgggaccgttggcatgcgacatgactgtgctggtgggtgaacaggccaagctgctggtgccctacgcagcgaattcttcacggccgaaattcgtttggagcaagaatggcaaaccgatggatccgcgtgacgacccacgcgttaaggaggaaaaaagcggtaagtgagcgcgcaatcctggcacttaacagggtggaggcgcagagccatacaataaaaaaagggaggggggttaaccaaaatttttgctaaaatggtctggaaagagggnggtcgacagggtgatccgccattttcggtttaattcgccgtttgcatcctatttcaaatgtttccattaagccacccatatacatagaaacgatgttggtattaatatatgaaccggaacaatcccggacaaaaattcttgatctgtgaaaaccagggaggtggtttctagtcgaattagagcccttcgtccagaaaaaaatatggttggaaaaaaaattgtttaaaaaaaa

SEQ ID NO: 2776 - DNA, 1825 bp, Heterodera glycines
ggggggggggggggtaaggcggccgattttgcgagatggtccgagccttgaatttgacgacctttcaaacagatttttttgcggtgcgctttttttaaaaaatagttaacgatattttcactaaaaactgccgaattgcgattctttagcaaggcgatggctttttttgtttttaaaaaacgttttttttcgctgtacaatttcttaaacaactttttttttgcaatttgttagaagattttgtctaaaaaaatgggcaaattttaaaattttggctaaatgctctttttaaattatttttaattaaattttatttttttatattcacgtttttttctcccatttttagacattctcatccagctgtgctaccagaaatgcgaacaatcggacaccggcacctattccattcgcattgtgaacgacttgggctcggattcggtggacttgcgcctggaggtggtcgatcgccctgcaccgcccgaagggtcattgaaggtgctgaacattgggaatatttttgtaaacagaaaatgctatgagagtgacatatttgtaaaacaattaggagtggatttttttgttttttttagaaatcaatttttaacggagtattttcgtttttctgtattttcttttttacaaaatattcttttaaatatttaatgtataaaaaatcatgaacaggagcggaccgcgtctagtagcggaaggcgacgcgttggcagtacagcggcggatcggtcggcacaggcggcagcagcggcttgcgctgcggatgaagaggcaacgggcaaggtggacacggacgaggtggagcgacagaacatggcggcggtgacaaaaaggatggcaaatttggtaaaaaaaaaatttctaaattattggatatgcttcaaattttttttattattgattacattatttataaataaaaaaataaatgttggtaaagaattgtggtcccaaatttaatttttgggctcaaaatcagtttccgaagggtgttgatgtgtttctaaactcggatttacccaattccggtaaagcttcaaattaagttttgcgccaaagattcgtgatcaataccttcgaaaccccacagaaattgattgctgagcccaagaaaactcaattttgggaccacaattctttacttttgcccaaaaatttaatattttctatttttgagtttaatttttgttttttttaagacggcccaaagtgaggacgagcggcgagtgcgaactgcgtccggtggtggaaggcgacggtgtgacgacagcggcgcggcggcggatcggtcggcggcacaggcggcagcagcggcttgcgcattgaaggtgcaaaacattgggaatatttttgaaaattacgagagaggcatatttgtaaaacaattaggaatggattttttgaattttttttttgaaatcaatttttaacggagtatttttgtttttgctgtattttcttttttacaaaatatttttataaaaaattgatttaaaatggttaaaaacatttttgtaaatattttatttatgaaataaattgtacaaaaatttacatataaaatagaaattttaatttactcgctttgggtttccaggccaagctgaaaaaacgtgacgacatgagcattagggcgttaaaacgacgaagtgtgcgctcggtagaatcaacttcatttgaaaaaggtaaatattaaaaaaaacggaaaaacttaaattaaattaaaataattactttgaattttatttaaagcgaaaagggtgcgagcgtttgagttacaaaaaaaacagtgcaccccaaaactccgccg

SEQ ID NO: 2777 - DNA, 2754 bp, Heterodera glycines
  unsure (1)..(2754): unsure at all n locations
aaaatttagaaatttttcttagaaaattcgaagagtaaaatattttcaaagaattttccagctattttttngaaaaaacagcttttcatcattaagttttaaataacgtaaaaatgcaatgtcacactgcaaaatttttaaattatcgcgcaatggttccattaatttttcagaattcgatgaacttcgagaactctgcgaccaggaagcagtcgtgtcttgggacgacttcgagaattcggcggggtaattgatggattttattttttagaatacaaaattataaaaattaaacattttggtcaagggtgaaaaaattacaaaaaaaaaaaaattttggtgaagaaagaaaaaatggctaaaagagtgattgcgttaaaaaatatattttatcgcgtttttgataacgaatttctgaattttaaaagataaattcgaaaaatgccgaaatttactaattattgacaaaaccctcaaaaatattatagattcgatttcgccgaatggaccaaaattggcgagggggcatttggcgaaatctttaaaggaccccttgatggcgcttgcattgtgctgaaggtgttttgttttaatgattagctctttttcaaatgtttttcaaggtcatcccatttgctgccaacgaggagcattgttcgaagctcgtcaatggcgactacctgaagccagcaaaattcatcttcaacgagctgctcatcaccaaagagcttgcaaagctatccgagaacaccggcattggcgtcacgccaacattcacacaattgctcatgagcaaaatcgtcagaggtagttttttaatggagagacatttaaaatgcacataaaatggtgtaaaaaatgtttggaaaactccaattgctaaaactcatatttccgtttaggctgttttccgcccgaattgctgaccgcctgggatgccttcaagaagagaaagcctgaattggcggagaatgaacgaccggacacttatgccgatgaaggacttcatttcatagtcatcggtctttcctatggcggaaaagacctggaggcgtatacggtagctttcaaaaaaaatgaaaaaaaatgttttcgcagatcaaaaatggccgagaatgttactccatcttccaccaaatcgccttgtccatcgcgatcgccgaagacgtgctcaaactagagcaccgggatctccacgccgggaacattctcgtggaggagtgctcggtcgatgaaaaaattcggtaagtagcaaaaccgatacactgggaaataatgcttattttaaaggtataagtaccttggaaaacaaatcgctgtccgttcaaatggggtgcgtgcctccattatcgactattcaatatcgcgcatagaaaaaagtaagcattaaaatttttctcattaattgtgttttcacaaaaccagaaggcgttgtgttcttcgctgatctcagcgaagaaacgggacttttcgagcaaaatggtgtcagcaaaggtggcgactaccaatacgacgtctacaggatgatgaaggcggcggtcaagttgagagaaacgatttttttacataaaaaattttttttagcgaaaattgggccaaattctggccccaaacaaatgtcctctggatggggtacgcggcaaagaagctgtttaacaaccgcttcatcagagcgaagagaaaacaagcgattgaagaacttttttcaaattttgaaaacaaatttgaaacaattcaccatttgcttgcccatcctgattttttgtctgtgttcacggcacatcaatcagcgacctacaggaagaagatcacgaaaaccggtaaccaattttttacattcccatttttcctgaatttaaaaattccaccaactttgggtgtgttttgttattttcagccaagtttcatcccatttatgagaacttctcttctccaaatagttactcagtttttgtttgttctttagccctttaattcatggagtgcgcgctgttctcaaccggacgcgaccaaaccaacttgcgcgggtggacagcaacggcagcagaaacaatacgacaagaggcaacggcgtggcatccgaagcaatgggttagttttaatgacatccaatgtgtgaatcataattatgttgtttgtaagaaaaaatgtttaccatccaaaatttcccaactcaaaatgccccaatttttcacaatttttaattggttggtttttacagaacaggacaaattttcaccactaaaagttttccaaaaagacgctgaaaatttataaaatttttttttcttatgatatcttataaaaacttttctcggattctttttcctgaaagaattcatagtttgcaaagttataagcgtgagtagcggagcggtctgtggttcacgctgtcgtgggtgtgtcgatcccgccagactcgactctattaactagcatttacatgaaaaataaatgtatcatatgaataatataaaaaattgcctaaaataaaataaatttaaattattaccacattgaacaaacaaatattaaaatgatctgtttgcatctgtcttgaatactcgaaaaaattttcgttttacacagctatttttaacttttctgccatatttataatgataactaaaattgaaatggaccaagttttaaaaataactggtttcaacaagggaattacaatattaaaacaatatataaaatatgttataaaatttacagaatcgataaacaaattcaaatatttaaataaaa

SEQ ID NO: 2778 - DNA, 5415 bp, Heterodera glycines
gattttcccttgtaaaatagaagagccgatctcgagttagaaaatacactttcaaaaaacaaaatagaattcgatagatgtggtcaaaatactggcctatgcaaaatttcaagaaaattggtcaataggaaaaattttttttcaaggacaacaaaatcaaatgtattacaaaattttagcataaaaatggcactgatgttgaggcagctctggaggcgcgtctttcatctgccaaggacaatctgatcagatttggcgacgaaatctacataaagctgagcggcgaccatggccagagttgtatgaagattaccgtctcattcagccaggctgctcggtcaaattctccatcaaacaatttcgtgctctgacaaaagaatcggcaaaaaagaatggagagaaaaaatggataattattttcacattaaaaaaaaattaaaaataaataaaaattgaaaaaaaaataaaatttttggtcaaagaaattttagaggttattttggatgaaaatctttaagtagtcactacaatgtacgattttctgttttatttttcgaaaaaaccattatcattattaagtccgtttcagggcgaaaaattttaacaaatttatgcattttaaaaacaacaaaattcaaaatgcacaaattaacatctcaaaacaaagttgaaatttgtaaaaattcctatttcatttgtaagtttacatttattcttctccaaattgtttcttccatttgtcaatggtccgtcgattaattttcaatatttttgcaattttctcggcactaatttttggattttctctttttatttgccaatacattttcactttttccattttttctttctccgtcattctttcacccattccaaattgtttcttccatttttgaattgttccataacttactccaattttcttacaaatttcttcataattttgactccattcttttgtcgaatattttcttcctttttgcttatattcatttttcattgcattaaatttttgaacaatttcaattttttgttcatccgttttcaatttgcattggtatttgtatattcttaattctttgatccattggtaaattatctttcgatttgtgcccaattttttcaaaattttatcattaattttattccattcttttgttgaatattttctctctttttgtttgattttttctttaattttgttgaatttttgaacaatttctctttttttctgttcattttctttttcttcccatttttccccaaatatttcttcaaatgttttttgttccaattttttcttttccgctacaatttcaatttgagcaattaaaaatacaattaaaattgaaaataggcataatttcattgttgacaatttttctttttcttaaaaattaaaatttatattttattcgatatgaaaaaaagaaataaataataataaaaatatttctcaaaaatgaatttttctctttcttataaatttacattaatggtaaaatattgacaggatcactatatccattaaattgtaaagtgaatttttctctctactgaatgatcgaaattaataattttataataataataatataaataaaaactgtttcaccattaattaaaattcaactagagaccggacaagagggtcggtcggtcggtttcggtataaaaaccgaaaaaaaccgaaaaattttcggtaggtcggtttcggttaaaaaaccgaaaaaaaaccgaaaccgaaaaaaaccgatgaataattttcggtatatcgtttcggttttttttgaatttttatttttgtaatacattttatgagatacatttccaaattttttgactcggtaaggcgctttgacaaagacggctttcgttttgcaattagtcggtcaacattcggaaattggtctcgaattttttcggcaattacgtgcaatcattttaaaagaaaaaaaacataaaagctaaaatttattaatttttaagaaaatttaaatttattttctttctctctcttcgctttctctgtcctctctcttctctctctctcacgtcctctcacctctctctctctctctctctcacgactctaattttttctcactttctcttttactctctcttctctctctctgctttctctttttatctctttatctctctgctttctctctcttcgctttctctgccctctctcttctctctctctctgctctttatctctctctttccttctctttcccttctctctctcacgtcctctcacctctgtctctctctcacggttctctaatttcttctcagaatttcttcattctgtcccctctcttgcttcttttttcatctctctatagttttcctcttattctcattcctgcacccatcataaatagggcatccaaaaatatggatataaaatcgcgaaatatggccataaaatatgggccaaaaatcgcaaaatatggacataaaatggcaaaaatctcaaaatatggaaataaatggcaaaaatgtcaaaatatggacataaatttttcaaaattgaatgtaaaatttcttcaaatttattggttgaaattgcatatgagatacatttccaaattttttgactcggtaaggcgctttgacaaagacggctttcgttttgcaattagtcggtcaacattcggaaattggtctcgaattttttcggcaattacgtgcaatcattttaaaagaaaaaaaacataaaagctaaaatttattaatttttaagaaaatttaaatttattcaatattctcaagaaattttggcaaaaaaatgattttttgaaaaatttttcgggttttgggctcaaaaaggctaatttagctgctagggcccgttctaatagaggttttttggaaaaatcccagaatatggataaaaatgccaaaatatggaaaaatatggaaatatggacataaatcgcgaaatatggaaaaatatggaaaatatggatatagaaatccttcctagaagcttcaaaccaaactaaaaacatgtttttcgtgcgtttcagacctcccacagtccaggaaaaaaatatggatttccatataattggactccctaatcataaacataaacaaactcgcacgcattcagccctgcgtgacaaccgcacgcgttactcattctaacggtgctatgtcgttatataaaaaccctcaaaaagggcgttatataaaaaaccgtcaaaaagggcgttatataaaaaaccatcaaatcttattgttaccgtattaatttagaaaaaacaatcgtgccaataaaataaaacctatataaaataataaagcattttttaaaaagaaacctttttattgaaaattcacacatagaaatactttctgtatacacactaacaattttataaattatttattattatcaataacaattattattattttttaattttttaaattctattttattcaaccaattttcatatacaaatattatttaacctatttttaatgaaatttttatttaaatttattcgcctttctcaagggctaacgagaaaaaatagcaatcaacaagcattcagtgaaacaggcaattccatttttgacagataaaataaaaatatttcaatttgtcccgatcgagtgtggcgtctttttgttccttttaaatctgaaaggaaggctgatttatgtggttttttatcagttctttcataccaaaaaaacaaatctcatccaaatttggcatggaccacatttcaccaatttttcgaaacaaaaattcattgttaaagttttccaaatcaattgaaatttcgcggtcgccaaacgaaaattattttgtgacaaaatcaaaaatgcaaagaaaaatatttttaatttagccattttataaaaatataatttttaagaaaaattaacccttttataattgtcaagccaatgcacaatcacatgaaagcacaaaattagaaaaattgatcactttatcgcaaaaacccattaagaacaatttaaagaattcacattatcaaagaaaccctaaaaaatcttgctgcagcaaattttgcaaaatttgttcagtttatcagcgaaaaccattaaacgaacaatttaaagagaaagcatttgatcaataattttttggaaaatttgctcaatttttaattaatttcttgaggattgattatagcttcaatccatgcatttccattaatatgaataataaaaaatataaatctagcgaataatttttttttagatgacgtaacatttacataaatccaataattgattacatttaatgtcaatattgtataaaaaatatttatttaaaatgatttattattttatataggttttattttattggcacgattgttttttctaaattaatacggtaataataagatttgatggttttttatataacgccctttttgagggttttttatataacgcccaattttgatgaaatgtcttacaatttgattgatttgacggttttttatataacgcccaaaacacaaggaaaaatcaataaaaacacaaaaaaaaccatttgagggttttttatataacgccctttttgagggtttttatataacgactcagcaccattctaaccctcccacccgcgccgacagagaaacaaacactgcactctctccactacccatcctttctctattaatctccaattatattttttaattttctgtttcttttcctctataaaaacaaaacaccattttaggcgcaaattcaaaagggcaaaaagtgggcggagctgcgcctcacttaatatatagtaagggattttgactggtaattgaatgaatgccaaaagttggagagcccttgaagagctgcatcggaagcgagtgccgccgttgctgtacgctcaacggttgctgtgcaatagaatttgttaaaaccaggctcacgaacgaatcgatcgatgccttaatcactagggctgctaattttatgtaaatacattttttttttggcttctccatgctctaattagtagaaaaaacactttctttttttgtgtttgctaacaaaagttgggactttttagtacatagttctcaatttttccgtacatacttatttttttgacatattttgggattttttaagaaaaatttaaaagtttttttaaaaatgtacacctaaaaatcggttttttttcaaaaatcatatatcaaaaattaatttttaaaatactaaaatgtgattcaaaagactattttggtcctttttatggcattttgtgattagttcactttttatgaagaatttttttcaaaaaaatgaacatttaaaaatttttatttacatattttagtacatatttgggggtttttgtatatattttagcattttttatacatattttatttacataat

SEQ ID NO: 2779 - DNA, 3579 bp, Heterodera glycines
ataggcatggatcattttttgctattttgagccaattttatgaaaaaataaattttggggccccgcagagcagataccgtattttctctaattatcacccatggaggtattatttttcaacctcctcggaaagggcgggatgattagagactggtagataaatggagactggtggattatttttaaatctcctcataaaggggggggggaataattggagactggggatgaaagagactgggtgataattagagacaccggggaggggggaaaattgaaattttgaccattttcaaacagattttcactgaaaaatgacgatttttaggtcaaattttgaaatttgggggccggaagtgccgtgccgggaaaaatgttaattttcaatcagtcataaatgtacagaaaatggagaaattaattagttaattacttaataaacgatttaagcataaggaataaaaagtcacatgcagaaaaacaacatatgctatttttcaggatttatctattatatacatatggattaccatatatacattattttctatatatttagacgtttgggcactttttcgtacataattcgcaattttggggtcattttttaagaaaatttttctacaaaatttcacaattttttagttttcttaacagttttaaagttttaaaatttaaccaaattttatttattaaaagatttacttctacaccataatttttaaaatattgatttttacgtgtgtatgaaatatttgattcttcatttaaaaaatctaaaagaaaatataaatttatagagatcggtattttgaaaaaagcctggacctggattccattttggacctggacctggacaaaaatccaggaaaatccaggtccaggaaaaatccaggctcctcgagacctggatccaggcctggacctggattttttgaaatttgttttaaaaggcaaacaaatgcttgaaaaaatcaattatttgctagaagcatctaaaaatatctaattaatagtaataatgtgtttttaaatttatttaatctgtttttgaaaacttgaaaaaacatcggtcacttgaaaaaataaattctaaaatttcgtccaggaaaatccaggttttttcctgttttgcctggacctggatttcctggacaaaaatccaggaaaatccaggtccaggaaaaatccaggctcctcgagacctggatccaggcctggacctggattttttgaaatttgttttaaaaggcaaacaaatgcttgaaaaaatcaattatttgctagaagcatctaaaaatatctaattaatagtaataatgtgtttttaaatttatttaatctgtttttgaaaacttgaaaaaacatcggtcacttgaaaaaataaattctaaaatttcgtccaggaaaatccaggttttttcctgttttgcctggacctggatttcctggacaaaaatccaggaaaatccaggtccaggaaaaatccaggttgtcgaaaaatggcctggacctctggacctggatccagaaaaaatccaggcctggatccaggtccaggccgatctctataaatttatattaaatcttcaatttaaaaagaaatagtttttgagaaattaaaagagaaacaactcttggaggggaattgatccaatgcaaaaaaaggaacagaaccaagaacacaaccaacttgaccacgcatgtgatatttgaacacaaatgcaatttaattttaccaaaaaccaatttctaagggcgtttaaaagtctcgtctcgaaaatcgagaccaagaccaaaaaacccaagacttttctcgaatcgagcctcgaaaccgagactctcgagcagcactatcaaatagcactaatactttggaatcgtgtaaactcataggatgggaatatttaaatgcattattgagactaattaaattataatatgagattaatcatctttcaaggtgttctgtaattggtcctttgctctgacaaaagaatcggcaaaaaagaatggagagaaaaaaatggataattattttcacattaaaaaaaaattaaaaataaataaaaattgaaaaaaaaataaaatttttggtcaaagaaattttagaggttattttggatgaaaatctttaagtagtcactacaatgtacgattttctgttttatttttcgaaaaaaccattatcattattaagtccgtttcagggcgaaaaattttaacaaatttatgcattttaaaaacaacaaaattcaaaatgcacaaattaacatctcaaaacaaagttgaaatttgtaaaaattcctatttcatttgtaagtttacatttattcttccccaaagcgtttcttccatttgtcaatggtccgtcgattaattttcaatatttttgcaattttctcggcactaatttttggattttctctttttatttgccaatacattttcactttttccattttttctttctccgtcattctttcacccattccaaattgtttcttccatttttgaattgttccataacttactccaattttctttccaatttcttcataattttgactccattcttttgtcgaatattttcttcctttttgcttatattcatttttcattgcattaaatttttgaacaatttcaattttttgttcatccgttttcaatttgcattggtatttgtatattcttaattctttgatccattggtaaattatctttcgatttgtgcccaattttttcaaaattttatcattaattttattccattcttttgttgaatattttctctctttttgtttgattttttctttaattttgttgaatttttgaacaatttctccttttttctgttcattttctttttcttcccatttttccccaaatatttcttcaaatgttttttgttccaattttttcttttccgctacaatttcaatttgagcaattaaaaatacaattaaaattgaaaataggcataatttcattgttgacaatttttctttttcttaaaaattaaaatttatattttattcgatatgaaaaaaagaaataaataataataaaaatatttctcaaaaatgaatttttctcttccttataaatttacattaatggtaaaatattgacaggatcactatatccattaaattgtaaagtgaatttttctctctactgaatgatcgaaattaataattttataataataataatataaataaaaactgtttcaccattaattaaaattctaattttaactagagaccggacaagagggtcggtcggtcggtttcggtataaaaaccgaaaaactcaaaaaattttcggtaggtcggtttcggttaaaaaaccgaaaaaaaaccgaaacctaaaaaaaccgaagaaaaattttcggtatatcgtttcggtttcggtttttttttaaatttttatattttttcgcaaaaaagcaataaaccattcttattaacagtaaaatgtttttaatatttatattgaatttttggaagatttgattcaaaaaaaccacaatttcggcctttaaaaaaccaaaaattatgcacatttaataaaacg

SEQ ID NO: 2780 - DNA, 2090 bp, Heterodera glycines
aatacactttcaaaaaacaaaatagaattcgatagatgtggtcaaaatactggcctatgcaaaatttcaagaaaattggtcaataggaaaaattttttttcaaggacaacaaaatcaaatgtattacaaaattttagcataaaaatggcactgatgttgaggcagctctggaggcgcgtctttcatctgccaaggacaatctgatcagatttggcgacgaaatctacataaagctgagcggcgaccatggccagagttgtatgaagattaccgtctcattcagccaggctgctcggtcaaattctccatcaaacaatttcgtgctctgacaaaagaatcggcaaaaaagaatggagagaaaaaatggataattattttcacattaaaaaaaaattaaaaataaataaaaattgaaaaaaaataaaatttttggtcaaagaaattttagaggttattttggatgaaaatctttaagtagtcactacaatgtacgattttctgttttatttttcgaaaaaaccattatcattattaagtccgtttcagggcgaaaaattttaacaaatttatgcattttaaaaacaacaaaattcaaaatgcacaaattaacatctcaaaacaaagttgaaatttgtaaaaattcctatttcatttgtaagtttacatttattcttccccaaagcgtttcttccatttgtcaatggtccgtcgattaattttcaatatttttgcaattttctcggcactaatttttggattttctctttttatttgccatgctgagtcgatctacaaaaaaactcagtgaataattaaataattaattttaattatatagaacgtgtcactgaattaattataattaaatttattttataccattatatttcaagataaatttaaaaagaacaaataaaaatttgtcatttttgttctaattttttgcataaatatcttttgtcatttatggcaaaaaatgaaaaaaaagggtaaacaaaaggaatggcatgaaatttcatactaaaattgaaaaaagaataaaataaaatggaatggcttgaaatcctaggagcaaaaattgcattcgatgagaatgaaatgttgaataaaacaaaaaaaacatttttcaactttgacttcaagttttgaagcaccgggatttgaagtgtttggaattgaatcatcaagctttgaagcatcattttttgatgcatcatctttttttgtatgcgcggaaacaacaattagcttatgcatgtaacggtttaatgtacaaaaacttatcttaatatctttttgttgcatttgttcatgaagtttttttaatgttttaatttctttattttgatagcttttgacgagttctatagcttcatgattttttataaattcttcaaaaccagaattagtagtaaccgaatactcaaatagagataagaaaaaaataaaaattttattcatttttctaggttagaataatattataaatatatattttttaaataaaattcaatgtatattaattttgcagttacaggcagcgaaaattatttaatattgagtgttattgatttgacacatgaattttgtgaagcgcataatataatacaaaattattattattcactgagatttgttgtggatcgcccacactgagtttttttgtggatcgacctagcaccatttatttcttaccattttatacaaataaaaatgtttaaccctgctcctgttatttcattaatcatttgcctcttttcattttcaaatggaaattcatcggtgagtttcactttaattgtttatttaaatccattttaattagattgatgatgatatgctaattgcttttatgaaaggccaacaaggaacaataattagtgaatatacaactcaaaaatatgaggcacaccttggcattttgtattttttgaaaaagaattggcaatgcgaaaatatccttcaaaattttggtgaatttgaacgggaagaatgcccaaaatatggaaaatatttgaacattttgtacgaatatttgctcaaagagtacgccggaattccaacagttaagccgaaatttgtgcataaaa

SEQ ID NO: 2781 - DNA, 3467 bp, Heterodera glycines
ttagggtccgttactatgttcatcgctccctaaatatggtaccattggacttctctcaccgagaggaatagaaggtataaaaaaaatttcaattaatcgaggctgtcagtattcttgactttttcctttgcttcattcacattatttagctttaccgatcctttgatgataccaccaattgctttgcaacatgtttacgccaccgctaatatggtcacacaagcaaatgtcgatcagagtttgtgaatacatttttttactatttctatttcaaataaaaaggaatatgaatacgaagcaaggaaatagatactgttaattttattttttaaataaattcggaacagtaaattcttttttttgaagatgtccaccctcttcattgcaggtaacaaattggacttggaccgtcttccgcccgggtgggaagtccgtctcaccgaagatggttcttaccgatattacgtcgatcgtatgagtttacactgtcctttttaaaaaaatattgcgttaaatagacaacaacgggcgaacccattggatccatccctttgcgcccgaagttttgaagccaaattggacaaaaatatttgacactgttcatggcgttgtttattataagtgttttgcattctcaatccttatgttaatattccatatttagtcatgttgatcaacggtcccaatttgaccatcctggatttatcaatggggcatttttaccaacaattcacggttcgtcttctttccaatcgctgttagaaaatgaacaggaacaaaattgcaacaaagacgacagagaggccgacgaggaatccgatttccttggagaggaagaccttaatctgatcaacaatgaaggtgccttttgattatccatcgaataatcgtattttcattcattctcaaaatttgtttaagatgttccggagtggctcaaattgtattcccaagctccctttaactctgatcacatgctcaatgtaaatgaattaatcctaataataatttaattgtttttttagttcaacttgttcaaattgaaccaattggaggcatatgatcgtaagccaacaaattacagttttttgtttatatacaaattgaaattgcaattcaggaatgatcatgagattgtataaacaggtaaagatccaaactgaataactttaaaatgtcctttttaggatgtgattaacactgtcgtcaaatacgaaggtccaatgtcggagattgacaatgaactcatgcaacgtcataatttaacataattgagatttaaattgtccccactttttatttcgctcaaaaattgcttatatttttagaattgctgcccaactaatatgatatgtatttttgaacctaattttcttgcctttttgttttgtaacacaattactgaaagaaataaaccggtttgatacgactacccataggatttatcattatataagagaattatacaaataataggactaaattgagagtattcttaataatctcatgtttattgttacattaaacacagaatgttcgtctcccaatcatttgccaaaagacagtctgatcttctccctcattaatcctcccttgtttagaattgactgctgttccgtcttcttcacattttctctttgcttctccagttcgatccgttcttcctcgtacctccgctttgattccagcatttccaagcgttcgtcgttctaaaataaaaatatccaataaacacgttttaaccaaaaatgcgaagttaggaatttcgactttttgttcgaattcgggtccgggattggccgaaaaggatgccggattcgttcgtgatcagctacttcaaaaacccaggaagcttgtttttgatattaaaatttttgaaaattttttttaatgaaaaggggggggggagaataaagcacagtattatccgttttgctaattggaaggtgtaattgagtacctatacaaatagtagacataccaatttcctttcggccttttccaattccttgatcttcgtctccaacgctctctccatcgcattgcagcgttcctgagactccttctaaatgtttattcggttccaaatatgcttttctatggttttacaacagttggcttgggctgtgcttacctccctccgatgaatgttttccatttcctcctttagctcggcttctatttgctgtctcagccgtttctccatttcgatctgattattttttcatttttatgggggggggcttttcaactttgtgaaacctttgcggattttacgcgttcgtgtacaatttcctcaatgtcactgattttggacgatacctgaaaagccgttaatgagtgatctctaaattttattactattctgaatataaatcatttgaacagcgatcaatcgctgcaatgccattaccatcgcttagcgtttatggccattttctgttctgtccagacggtgcccgcccgctatggtttaaacactcaataaatcattaattgatgtgcgttttacacagaacagtgccattccaaaacgggctggcccacctgttcgtttattttcgattgtaaccattccactgcccgcttgtcaagacgcgccatattcacatttccactgccaagttccaccgccacgtcggatggggcataaattctggctgagtctgcagcggaatcccgatgccgcgaagaggagcgagacctcaaaaaaggatatttggacagtcattagaagggatattccagaatgaaatgaaatgcttcattgtacataccgatctcttcgcctatctttatgagacgaacgcgacgccttttgacgcttttcgctgcttcggtcacgcgaacgtttccggttggagcgatgcgaacggtcgcggttagtattaggagttgtagaacgagaatggggcattgcgctaaacaaaattaattttaaggcaggtggagcaaaaaaagtgtaaattacaaattgacaaattaaatttttcgttaaaaaattcctatttccagacggatttccgttaaaattgacaggatcgggaatcctttttcccgttcgctttttctttattcccgtttccgtaaattttttaccgggctctattttaataaaaataaattggcattttgtttcatataattctgttggtggttgagctgacactaatgattggatcagcccatttaagttctcaattcgtttcacttcattcactttagcattcacattcgtccttttcaaaatcttcttctctcagtattcttattattaaatttttttgtactgtcgatggtaggccccttttgaatttttttttttgttttcaaaagacatcctagggttttcggggtcgttgatcacgaatccggcatctatttcgatcaatttcgaaccccggacctgaattcgaacaaaagttggaaaattcaaattttttgaactttgcatttttagttcaaaa

SEQ ID NO: 2782 - DNA, 6179 bp, Heterodera glycines
attatccgtcagggaattaattaattgaccctaaattttgatggttctggattagaacaaaaacccactcagaaatttgctttcttttttaaaaaacatctattccatctataaaaatcctcatttctcttcattggttattgcttttccattaagtttcgttggcggtgtgcaaagcaggcgctgtgcacaaaggccttcccttatacaaacacatcgctgagttggctggaacgcggaaggttagcgtaaacgaccggtacacaatgtgccttacaattatcactgcatctttagttgattttgcctgtgccggctttcaacatgattaacggtggatcgcatgctggcaacaaattggccatgcaggagtttatggtgctgcccactggagcgaaaacattcaaagaggccatgcaaattgggtccgaaatttaccaccatttgaagaaggcatgcattttaatattgttgagtgattctaagacaatgtctattttaggtcatcaaagaacgctatggattggatgcaacttcagtcggagatgagggaggatttgcgccgaacatccaaaacaacagagagggattggatctgctcaaagaagcgttcgccgcatctggacaccaggacaaggttaatacaactttttgaagtatacaatttatcctttaaggtcattattggtatggatgttgcggcaagcgaattctataaagagggaaaatatgacttggacttcaaaaagtggaactgtttttttttgcgttgtaaaattcattttaagtccgaacactgataaagcgcagtggctgaccggagaacagctcgccgatatgtacaagtccttcatcaacgactatcccgttgtgtccattgaagatgccttcgaccaagacgactgggaaaattggagcaagttgcaggctgccatagacattcaacttgtcggcgacgatttgacagtcaccaacccgaaacggattcagaaggcggtgcagaagaaggcatgcaactgcttgttgcttaaggttagcctgaagtcatttaacttaatttgacaaaatattggttgaggtcaaccaaattggcacggtcactgagtcaatcgaagcttcaaaactggcacgaaaaagcggatggggagttatggtgagagggtggggatattacaccaatggaatgaaatatcactttaggtttctcaccgttctggcgaaacggaagacaccttcattgctgatttggttgttggactcgccactggacaagtgagtgaacacattcattaaaaataatggtgttttctagatcaagactggcgcgccgtgccgttctgagcgtttggccaaatacaatcgtattatgcgcattgaggaggaattgggcactgacgctgtctacgccgggaaaagtttccgtagcccgcaaaactaagagcgtgtggaaacgaagaaaaataggactgttcgttgactattcgctggatgtttagtttcctgacattgattatttgttttcgaaaagtcacttgaatgctatgagtatattatttaattaaactgaataaaagttatttctctttcgtcaaaaccatgcaattaattaaaacttgggtaaagttaccccgaattgttaacaaaatcaacaaattgtggtaaatgttaattgctgaactttttctaaagataatgaaatttacaagggctcaaataatttgtttgaattattctggagccatttatacgatgttggtaagttaattcttgcagcgacctctttttgctgttcttttagacgataagtggggtcgcaactttcaacctttatttcacatgccccgatctttatggtgattgttattggacttccattttcgccctattgattctgttccaaatatgtgtcaatttgtttttgtttcattattatctcaaaaggaatcaggtacaaaacctctaacctaccaaaatccctggacaaattcacaaaattcaggtacaattttggaccgccaaaagcagttggttgtttgatcatcagaatttcgagaaaaacacgaacaaagcgctgaatgggaatttcattgacgacacttctctcgcaaacattgagcaaaaatggacaaagagccaacaaaaagggaacaaccgcactcactccattggaaactttgaacagttcacggtttgtattattttgttcctgtatttctataaaaatggatagatttgtgagaatgggacttatgtcgacttgaggggcgaattccacggggaaaactccgcggatggcaactcacagctcaccaaatactgctacgagtgcaaaagggtgctctttttagtccattgtttgttccttcggtacgtcccttttccttctatcttcagacaactcctggtcgctgtcagcactgtccgttgtgcaacatttgcgtgctccgcaaagaccaccactgttttttgctcggcggctgcgccggtttggccaatcaggtcgttttcccctgacccgttggtcataggaatgttgatcgtatcattttacagcgctatttcattgtcttccttttttgggcctcaattggcgctgtctatggctcctctttcaacttttcttacgtactgtatttatttgctaatccccttgaaaaatcggacatttccagctgagaaagcatgcctccccgtgtttcccttttggatggatttgttatttgggaccggtaattttgtgggtttcgcttttttcaccgttttgtctttgggtcgcgttgtgccgctggttttttggctacgactcgctgttcaatgcccttctctctgtgatgttctcaatttcggccgcttcttcgttcgctgcctttggatttttcgttttccaagtcggatctctaataataaccctcgtaacttccgtttttgtccagatgatttacacattgaatggctacacaatgcacgatttccatcgcgcgggtctcaggagaatggagagtgacggcgagttgtttagaacggtttatttttcaggtaacccttttgtcattcaggcgaagatttccgagagcgtcttgccctggtgttcggtaggagatggtggctcaatttcatctttccccaattctggctgcccaaccaaatgaatgagaaaattgccaaaaacattttcctgaatacctcaaaggatctttgaaccgtaaatgcaaagctgaacaaatgttttaaagaataaagcacaaaaaaagaaaccgttattgtattgtatataaaagaaacaatggatgcaaaaagttgaagttgattgtccaaatctcagacaaacaattttttattttgcttaaattttgaattgcatctattgtttcgaaagccaaactacatcaagtgatctcgctgttttttgaaacaacaataaaaaagatcctctaatccgactatcaataagaacaaagaaaacggaaaaaaggcaaactaggcccgtattgggttttaaattcagtgtttcagacatggcagcaaaagaatacatcagaaatgataatatgaataagagaaaaacaaatccaaacaaagaaaaggggaaagcaatgagaatttgggggtggggagggcaagaaatgttcagttaggaagggattcctaaacaatttttgtactcggtcaatgctattaatggagcattctggaaaggcatgggggataagaagtgaaaatgcatttacatttatttacaaaatcagcacattcgtcccgtcatagttctccgatgttctacgtgtctgaggatgggtctccttcataacccccgtcgctgtctcggcgttgccgtgaaatcattctcgacgattgttcagacggtccaccagactcatcgccggaacaagacgaatcggaggggaaataggccgttaacttgcgcggtttgttgacgttggattgggagacatcaatggacgaagaatgggcaaaactgtgcgacggtgtttctgcaaatgttggtttgttcaaactgtgagcagaacgacgacggaaagaagaggaaacactttcggagttggcattgtccgtcccaatgctgctgatgcccgtggtgtgtcgtctgctcgtggcgttattttgtttgttggaccgtggcgttccgttgtttgtcgtttttgtgggcgaatttgcggtgtttgttttccttctgctacaattcatttgttacatataattgtttccaaaaacaactcacctgacattatatcgtccatcgtcggaagaaattccggacaccgctacggaagtattagtggatgaaatgccagaatctttttcaatgtgccgcaccgatttgtcggtgtctacaattttctgttttaatagtattttttttaagtcgtaattactgtctatttttttttcattgtcagttaaggcatttcctgagctctcctcaatctcaacagaattcgtcgcctaaaagtgaatgatttttttcttattctaagttgttttccattttacattttgaacatcattgtaatagttggccaatatcaattcttgttgaacactttcgttgtgcatattttcatacatatcattgaacatttcatccatcagccaatgcttaaatgaaaataaataaataaactaataacaacaaaagttcacttcgctgtgtgtgtctttgacgcgactcgcagtgaattggtattgacacgaaatgtttggagtgcacagcaaattttgatcttctatttgactaagcaaaaagtcgagaaatttctgcagtcggtcgagaataaggtcgccttttttaagtttcaaaagccactcattaagcctaaatgaatgggacaatccgactttcacattattcacaccaagattattttaaaacttacattcgcatcacatagaccacatagtcgagggaacgcaaaaatgggtcggcaatacgaaggccgaactcgacggcacgaaaagttctggcataacgaaacagctgagccggcagagaagcacaagtgatcggctctttgagtgcttaaaagattttgagtggtaaggacttcaaatggtgcgtattcctacttttatgaagtatttctgggaagagagcggtggtcatgtcagtgctcaggcgttgctccaaccgcgccatgcaaacgccacattccgagtccaaccgtttcctcctcttcggagtggtcgcacttgcagtcgcttgttggatgttgaaataacttcgactaaaattaaaataaaaaataaatacaaaatataaataaataattatattttatttattaataccttcgtttcaattcgtcattcataagcgaattgaatttttgtgtgctcaaaattagacatttcgtacagggcgtaattgctttaaaaatcagaacaacaaattgtagtaataaaagaagactggcaattttaatcttacaagatgttgttagaaaacgcaatgcgtcggtaaaaccctgaagacatatcttagaacagatttcttgggaaggtggcacaaagcaagaacagaatctggaagtgaaggtcaaatgacatgaaagagtgattatgagggggggggggaagttaattgtaatttaacttcacatttacctgtagaaattctcattgttaaaacggatagaccttaattaagtgcaaaattatagaaaataactttgggaaaagccaagctcacgtgttgtaatagacaaagccaagaatgctggcgctggcatggtccaatgggcaaatgtcggactctgtggaaaagctttaggggtaaagaaaggggaagggcgggcggggagcacttagtgctataatatactagctagagtccgagcagcatcgctatcacaacttcgagattatgttctagaattatgttagttactcagttaatatccagggaggggataatcccgaactccgaccacaatatttcaaaattctcggaccatgtatcagttacatgcgttgatgaggacatttctagtagctaagcaatcgatatccagggacgttgctagtctccgaacctctgaccataaaatttcaaaaatatcgccccatggatccattgtaaatgcgctgatctatctgctgtgatgtgagcggttaatttagaaagcccattacatgagagtgatcagtcagaatcaatctat

SEQ ID NO: 2783 - DNA, 1579 bp, Heterodera glycines
taaaaaaattttcgtttattaaaaaatataatttattttttaactttttttactgagtcgtttattataatctttcctcagaattttatattttcagcacaaaaatcaaagaatggcattgattagacaaatcaatttacgaagagaaaaaaaggcttcatattttttcgctgctccaaaaaatatttgtaaaaatagttcacgtaggataaagaaaccttgaccatccacatttcaaattaaggtaggattgagaaaatgcgtaattgaaattcgaaaaaaaacaaaaatttaattggaaaaagccccagaaaattattttttatagtatcggtctcggaaaatttcgctctcgagcaccatttttatccataccctaagggcagcacacacgccagcgtgataaatgcacaagaaacctaaattgggcaagaattaaaaaaacaggatggaaagcgcttaccacatccgcacagtgacaaattggcattcgaaaaccaattattccgaaagttcattttctgggtttgctgcttaaaacaaacaaaaattcacaatgcgttagctcagcaaaaacaaaaagaaagatcgttggattgctttcatttaccacgagataaggaaagaatttccgctatgaaccactttaagcctatattttatttgatgagaaattgggatgagaaaaatgatcgacgaaagaaacgatgcgaagtgtgggcggagggggggggggaggggaatgaatcggtgataagcacaaatggacggatggatgggcaccctccgcccaacacgggtaacccttcgcgataaaacgacacgtgagcacatttaaggccaacaacagcagagcgggaagaaataaacccgattgtttatatgaggtaaaagggacaagaaacaaataaaggaaagaaaagacagcggacggatgacaaagcatcagaaattaaatacataaaagtatatgtaataatcacataagtgggggaagaggaaggagagagtgatcagaactcagtgcatttgtaatcgaaagaggcgtcgatggacggaggctcgaagcgtccgaacagatcggcgagcaacagacgccgttcatcttggaaggtgcccacaatttcggccagtttatgacgccttgttaaattctttggaacagtctaagggaaaaccaattttggaatgtttccggtaatgcctaaccattccgtcgtacgcttcttcaagaaagaacagaaactgtttgtcatgttcagattgtccgtctctgataacaattcaatgaaatttcgaaagtcacccgtatttctcacctgctgaaaagtctgccttccctcacagaaatcatccaattgtcgtaatcgaatctcgaaaaatactccaaaaacccgtaaacgagctcaccaattgttcggttgttgctgggtattgctgatagggaatgaattttgagaattaaatcctaaaaatagggtcaatagtagttcgtacaatgggcagtttgtacaacgtttcaattgcggatttcatacaaaaaacattcttatttagtaaaaaagaaagacaggctaac

SEQ ID NO: 2784 - DNA, 2602 bp, Heterodera glycines
gtaatgagagaaacggagtgatcgctatcattcttgttactaatgtgcaatttaaggccgacatgtaatcatatgctgactatagacgtgtacaatagggtatttaaggagaggccattcctgactaatttttgatttgctatatgctagattttgaccagaattaatcgtaaagttaaataatttaattccaactatgtattttgaaataatattttttaatttaattacagcgaatcccgactttcaaatgtctttaagcccttaccaaatgaaatctgcaaaacgaaaaaatcttaaaaatgatcaaagtttgcccgtttttgttcaagtcgacgacatttcatcatcggttgatcttggaaatgacgggataaatcctgaacaggtgggaaatgcgtgaatcgaatgcatgagaaaaagctgcttttctttacaataagctaaaaataattaattctgatttcctcagcattctaacacgaactcaatggagagtaactcgaaggaaattgaaatgcgtgaacatttggaggaaattgaaagccaaacgacaaggcggtaattaatggattttgtttgaaaaaaaaatctcttttgtccacattaaaaaaagtcaataggcgcatctgatcatttgctgggttaacaaaacgcataaaaatgcaacaaaaaaaaaattctcgtgtgttttgggttttttgaaattcattttttcaaattcaagtgaaggaattcttgaagggagcagctcttttcctccccgccggttacctccccgagaaattttaaaaaattttttttattaacttagaaaattttcaagaaaaaagcttagaaagtttttaataaggaaattctatgaaaaaaaaattttttgagaaaattcagcgcttttttggaaaattttttaaaaatcttagtttaaccacaaaaatttttgtttagaattttcctatgaaaaaactttctaagatttttattcaaaaatttctaatttagtattttttaaagaaatttctcgggggggggggaacgatgcggggggggggggaaacgtagtgcacccttcttgaaggggtaacataggcaaaacagaaaatatcagttatattttttctttaaagctttgggtaaacagtgattttgaattaagaatgagatcttcgggcgtacgtgcccgccgccgtgccgcacatccaccgctacgccctccaccaccgtcgccacgccctccaccaccgtcgccacggcctccaccaccgtcgccacgcccaccacccccgccccagaagagccatggacatggcaatggcacgtattggtgctgttggtgacggtggtgatcgccgccgccgcacttggtggtaagaaaatttactattttggttaaatattttatggtaaaatttaacttttcagtgggtttgtggtgtcggtatcgccggtcgcggacggggcctgacgacgtggagtcgcaggcgcctgttgcggtaatcataatttttacaaaaattcttttagaaaaattcttttttgggtgggtaataaaaatgtggggttgaaaacaaaaaatgctaaaaaaagttgctttatttttttttttatttattgtcaataaagaaaaagtcctcaaaagggaaaaatccgcttacattgaggacaaaacattaattaaaatgccctcaagaaagcgcataaacaattaaaaacgagatcgccgccaaaaaataaaatataatgtgaaatcaataaaaaataaaaataatgaccaaatcactttttgtttaatgaattaataattcgacttttatttttccggtcaatcttacagaaatgaaatagttttaattttatttttaaattgatttaatggtcttccagggtctggttttgatcacgtgccgcccgggacaaaaaacaatggggattgaacggatggtggttggacccctgcccctggatcacattcgttgtttaaaaaaatgggtgaaatgtatgattttttaagcgggggcaggggtctggacccccgcccccggggccttatactactgtcaacaaacattttttggcactttacaattactaccctgataataatgtctaattatttcaggcccttgtcgattcaattgttatttctcccccaactgacagtctgcaaattttcaatagccctgacgttcaagcgatgactcgaaaacaatagtacgtgaccagtaaaccaaaaaaataataaaaaatcgaaaatttcgatgtttttttcttgtcaattaattttttctaaaaaaaaatcatttgaaaatccacttacattggacagttacactggcgtattgcctcgttgcccagcgttcggcgaatgctttgacaattgggacgcaattttgcaaacacttggccaagaattggaaacactgatcagccgtgccaataacattgaggacaccggtgaatttaaaaaaacacctggtaattaaaaatgaaagtgcattaattccaggcatttcgtcggagtatgacgacactttcgttgagatggaaaataaaattgctgaagtgaaaacacgcatggaacgcataaacacaacaaaagtaa

SEQ ID NO: 2785 - DNA, 1067 bp, Heterodera glycines
  unsure (1)..(1067): unsure at all n locations
aaattcatgcgatactttcgcgagacgggcatcaaaatgcgtcgaggagtattttttaggaattttctattttgggacacatccttttcaatcgttttgtttttgcagtgcctactcaatagttttccgtgggaagtgtatcatttggctgaaatgcttgccagggggggggacgtagtgcacccttcttgaaggggtaacataggcaaaacagaaaatatcagttatattttttctttaaagctttgggtaaacagtgattttgttttgggtggtctatacaccaaaacaaatctgatacactgtatatttttcagctgaataactaagatttcagaattaaattttgaatccgaaaattttgtaaaaaatccaatttcttttctgattagaataccacaaccgcccccacaagtttttgatttccttgatgaaaaaatataattgtaatgatcttttacccaagggcaaaaattgatttcttccccgtctttggtccaagtctcagtaattaaaaggatgtcaattttttcggtttctaaaataagtgctatttcatcgattttattcattattgaccttatgtttactagacagcatttaacattccctttattttttattaaaaaatttggataattaattttttggtaaaaattttttactgaccggaaaaatttttgtacctttgtgtaataattatgggtaatttgaagtgatttggttggacaatttaaaaattttttcgaatatggtcaatgtcctgtctcagcacgacctattggcataaatcacccaatcaccgttgtccgcctgccttttcttcccgcattcttcgatcagtttccgcctctccgacagttggtccttggtcatgctttcgcggacgcggacattgtggagaccattcaatgcttgcacctttccgcgcatgcggatgacgtgccgcgctgcatgtttgctcgggaattccatcttgagggggcgcggtcgagcatccattcgtttgccgacacggaagacaattggtgcctgatcaacgttacctccccgaganaatttaaaaa

SEQ ID NO: 2786 - DNA, 967 bp, Heterodera glycines
ccccccccccccaccccgaaattttggtgaaaaattgcaaaaaaattcctgtttgtttgctctccggtgccgtgttttgaaaatctttaagtctgaaaataataatgagggaaagtgtactgaacgggaacaccccaaaacgtcgccggacaaaaaaaaatttcggaattcccgaaaaaaaaacttgaaattattttaattttcttggttttaacaaaaaaattttttgattttttctagtttttttcgtattaggctaggtaactaaatttttgatgatttttttttgatttttaaaaaatttatttatttttgttgtaaaatatttcctcctttaaacaggaagagatggaacaacttcgtcgacagatggaccacctgcaaaagcaaattggcaatctgaatgagagtgcacaacaaattgtacagttggccaacaatttgacggcggaacgggcgcacaaaattcgacggggcgacaacatcaaggtgaaaatgattttccagaagcttgaaaataaagcttgaccctttcataaattaaatggtgctctatgtttcctcccccaggcccgtaaccaaaaaaaaaattcgggaggggcaaccgaagagacttttttttgggttaataattttttctctagtgatatttcaaaaataccagtgccaagagagcataaagcagggatttgtagccgtttttcaccaaaaaagggactaattttggttctagtcagttttatgagtcccatgccatattatgcgtcccatcaaatattatgcgtcccatgaatgaatccttagtttcttaggccataactttttgttacttgatccaatacctatattcttggtatcaatcgaaagataaaagtctcgggattttatcaatgcaagaaaaaataaaaacaggcatgaaaaaggaaaattacaatgagaaaatatgaaattcaacttttcaaagtat

SEQ ID NO: 2787 - DNA, 3170 bp, Heterodera glycines
taacttttttcagaagtaattagattaaattttatttctataatttcaagtccactatttaatctatttatctttaaaatttcaaaaatttcattttataacacccttgacatgaatagatattccaaagatttctctattattctgctaaatttcaaagaattttatcgaatttcaaaaaagttagggacaaaattagtaagtttaaatttttcgaattcttttagttaaattttttataaatttttgagtcggttttcgaatgatattatttttgttgagttatctcaacaaaaataaaaaaatgtaacattaccaaaataatttatttttaattaaagaaagaacaaaatatgaaaataatttgatttttaaaacccaattataatctagaattattcgatggtctgaaattcattaatattaatttttattcttatttcgcgcacagaaataccttttgtacttttggcttacaacggaatatatcgaattgtgaatatccaaatcacttaaaccacttttatctttcaaaatttaaatagcaaatcgaccacgctttatcattaattattttcattaagttttagcacttgcatttcgtacttctttattattatagtcatataaataagattaaaatgattaatttttgtttattttaattttaaaaatttgaaaacgttgaaaattaaaaagaatatttattaatatttaaaagaaataaaagaattaaatacaagaaaatatattaaatatgcatagcacttataaaataggaggaaatactattggacccaaacgaataaaatcccttgagattaaaagaggaaaaaagctaaaagatatttacattataaatttgatattgaatataacttaaaataaaaggttattaattcaagacaaaaagagtttttcttttataaatcaaatattgtttcttcttacaaacaattataaacaaatattattaatagaacaacagcttattaaaacaaacttaattttatttttgtatagaaatgtttagggtataatgaattatacaagattatattgcaataaatttgaaatttaaataaatacaatcgcacgagttgggcctagttttttcttgtgcacaagaaatatgacttcaatttgaaataaatttctagactttattcattataaatttaaatgattataaatataatattattctataaataaaattacgtcaaaagaaattaattattaaatatgaaaatctaaagaattattagtacctaataaaaccttttgttaactgaaagaagaagaagctcaataaaaatcaataaatgtaattatttaaaaaattaaattcattttcaattttgtttttatctaaaattcttaaatttagaaaattattattttttaaatttgaaggctctccaaaatccctaattaaggtgtaatatgctaataatttttttaaaaatttcgatgagggccggcagtgccgttaggcgccgacggaaaaatttttgaaacttagactagagtgcatttttataacataacttatccataaaatttagcaaattttgcaattttagccattgttttaataaatttaggaattttgggtacggcggcgctgacaaacgcagccgggatatttcggaatttgttacaattttaaacgattttgcacctaaaagaaatttttttgttattttcggcttaaaaaatttaattggttttgtttttagttgttcaaatagcttctaaatataaagtaaaagaagatggttggcggtttaataactgttgttggctgctctagcagaaaatttacaatttcttttgctgtcgtttttctcatggttggtggttatttgaccaggtcaaataactatggttaaaccagggctcccagattaaaattttcaaaagcctcatttttacaaattttttctaagcttaaaacgttcaaatattacatgtattttcaatttattgttagaaataagcattttatgaaattctaagcatgaaaaatcgaagttgatttttttttgcggcggtttttccaaaaacttttgaggtacagggggaatccggcggtgccgatagacgctgccggggaaaaaattaagaattttgaccatatttttagcagattttcattgaaaatgaattttcggaaaaattgattattttctgatttttatgaaacatttaacaaaattttttgcaaaatttggatgagattttcgttttgatgctctattaaaaacccaaattattaactgagaaaaatgctagatgactaacaatatagcacagcactttatctccttggcattttggcaattttgggggtaaaaacccttaaaattgtacaaacttaaaattttttagggtttgaactagtttccggattttgagttttgcctttagaacccctgactaattaagttctcatgagagcaaatcaaaaactgaaaatatcatacccaaaatataaaaaatattttgggcatttacaaaccaaaacgaattaatctgaaaaaatttattttttattttttatttatttttatgtgttataatggtccaaataacgtatagactcttaaatataatatgctaaatattgcaatgaatttaaattattctttaaaaaattaaatttattttttccccaaccaaaaattttgttcatcaacaaggatgatccagagctaggccctgttcagtgttcacagggccctgcaatctattaaccttaattaagaaaattttaaacaatttttcatcataataatttataattttttaaacgagtataagaaaagaagaattactcatttttattattgggttgaaaattaaatattaaaaaaaatcatacaaaaaggacacttctaattaaaactaaacaaacatattaaaaacgctctacaatattggaataaaaataacaatcgtcagcacggtgaaaattacaataagaaagaagtaaatctgaaaattttaattaattaaatcaaaataaaaatcataggaaattatgaaaaatatactaagcaaaatgaatttttataagttttcattatgaaaaactggagatttagttgtatatcattttgtcataaaagaacaattttatagagatatcggaaaaaatgacaaca

SEQ ID NO: 2788 - DNA, 5819 bp, Heterodera glycines
  unsure (1)..(5819): unsure at all n locations
catccctactcataattattaaagtttaaatattgtaggctaattatatatttattaatccctctgggctaaaaagtattaaattgtaagcgagaataacagccgcgggagccatgagttattatgacccctccgggctctcttatttactcaatctataattgaactaaatatttttggcatacagcaaatattcgttaaataattttaaaaagaaaatattcaattaatgcaaattagttcaaatgtcgaaaaaatttaaatatataatattttatttcaataataaaattagagaatatgttttatcaataatataccatttttactgttgattgattaaaaataaaatgacaaaaaaaaaactacaaaaaatttttaaaaaatgacgaatgcacaatgataaataatttgtcgctttttaatttagtttttttgtttgaaatttaatgcttaatcaagtttttattcagtcaaataataccatatttttttaattttgacacttatgatatttaaatgcatttacattcaatataattaatttaaatgaaaaacaaatactgactcataaataaaaaaaataatttatttaaattaaatttgttcattaataaaagaacaattgtttaaaaattttaattaattatagtaaaaaattacgaaaacttcaatgaaatcaaagtaaaaatttaaaagcctataatttttaccggattaataaaatcctaataaatttgttagaaaatagacaactttacacacatgaaaaattaccaagagatttaaataaatttagatattttagctaattaaaataatattcattcaatctaaactgaaataaaatatttatctcttcatcaaatttccccttcccctttttagccgtgagattaaagagcaaaaaagagataattaatattcaataaactaatttgactattaattaaataaagaaaagtatgaaataaataattattcaattaatcatatttataaataatcattaaagcaaaccattaattcttttgatattttgtatttaaattaaaactatttattactaaagaaaaattaaaataattgctataaagtaaaaataaatgatctaataaaataaaatagagacacttgaagagaataaattttgcagaaaattttcaatttttgaaaattacttttacgaaaaaaaatctgatcggaatttgtatttcatttgagaccggaaacaaattaatttatttttatggaaagtcgatataaaagaaagcaaaataattaaacataaatgtaaaaaggcaaaagaaacaatttaagaaacgaaagttttttttcgatggtattttcgcaggcctggttataaatttggtcgtattcttgcttttttgcctcattaaggcgatatagtgcataatttacccttgtattcatgtttttattttcctgccctcctttattcctttgcttacttttagtaattctgttttatttgcacttgaattttgtggcaaaatcgtttgcttcacttgtaaaattggaatttccgttgacggtactttttgtctatttgtttaggaatttcagttatagttggtttagttgttgtaggaattttgaccgattttgttgggggtggtgttgtacttttcattatgcctacagtagttttggttttctttgttgtgctcgttactgtagctggggtagttgtggtaacttttgccggattcaattttttaaattcagttccctttgctttatacacttgttgagtttttaattttgtttcccttttgtgatttttttaattcaccggaaaaatttaactcaatttacaggtgtaaccgtccaatgatttaaatatttccgtttgctcaactttgtgtgaaaaattccacctgcacaattgtcctgtgtgtccttgtcgcaattcctccggcgatttgtgtccaccaattcacgacttcgaccagcgcagtagcagcgacgggaacaattcaacgctttctcggcacaaacagctttcgatgagttgcagcaaaacttcgcagtacacggcaatgaatgtttgaacggtttattgagagtaatgtgatatcggccgataataagctaattaattgcttaattgcttcaatgctttttcatttcttttaattgttccaattttgttatttttcgtgatgacccgggaagatttttcttattctttgctcattaattactcgctgatctctgctttccctcgaaatttgcccaggcgaccccttgtaatcaccagtcggcgcctgacttatatcacaggaaaattatattaaaaaatagaaaaattaaaaaaactaaaaaaaaatgaaaaaagtcaaaaaataaaaaagaaaaataaaaaaaccaaaaaaatcattttaaaaaaaatttaaaaaaaatgttcggccccaaatcaacggttttattgcttttggcgaattccaaactattacgaaattagaaaatttgactaattgatttgtgtgaagtaagaaaaaaaataccgtattggaaatttaaacttgaattacttttatttggaaatgttagcatgttggcaattaaaactcgaattaatttttatgactttatttagaattattttaattttcaatttttcgcattttctttctctttgacttgtttttaacatctgccaatgtcgtcgcgtttctcatcatttacaaaagaatttaatgaatagaatttgcaaataattaagggaaaaatcgtttgcattttaaaataatttgaattcgtctccgtctctccgttcattcatagagcattcattttgttgagctgaacaatttttgtgtccttttggatttatttaatttttgtccaaattcccctttttaatttttaattaattagaaaaattagcaccgaaaacataatttgggaatttaaatctaattcacaatgtgccgtgggctgctcgccaccaaacatttgctttactcccgtcttgtatactgccccgatttgtgtgtgccacctggtgttaatcctaactctctttcgcactaccattctttttcgaatggcatactcattctgcttattggcatgcttttgctttgtggactcattatcggcatgcttcttgttttgctcattatttcttgccgccgttcgttgcgccccaaacaaaaagtaatgcttctttctcaaaattatccttagaaattgttactcattttatagttcgtttccattcgccaaaatgtccattctcgtctgggcaatcgcactttttctcgcccttctcctttgactgttgtgagcctttttttatttctttgcgtatgagtcattcaccgaatttccattttagccaggctcaatggttagccatgtctgattatgcgcgggtggacctttgcttttgttgttactcaattttgccgttttcaacattccttttatcaccggcttttctcttttattcaaatatctttttttaacttttaaacataatattctggttattctttaatttctaataaaactattttcattctctttttgtgtgtgtttatttaaggaatataatataatatgcacacgaaaataatggttatttaatttacaaaattgtacaagagtctctgcatttccgatggcgggacctccatgaatgttatgtgtcaccgtagggccatttgtgtccctttatcccccattaattcagtatctaacagtacgcctttattctggggtaaggatacaatgcttaggccctcttcccgattcggtctcgggagcagagactgccgggggagaggcccgatgtgaataataaagtgatcgagagaaagaccccgggggcgtaattgaaggtggagggggtgatcaaagaaccgcccactaggagagagacaattatttgggataagataaaaaggtgtgatagatcgattacgtaataattggtgaataattgattaaatgatgattatatattaggatcatgttcaaaatattaaaaaaaaaaccaaatgccacaaaaaattaattaatgttacttttttaagtaaaacaaaaaatgaagatgaactaaaaatttaaatgaaaacattttttagatcagaatattaaaagaaaaaaaattatttaataaacactttaattctcatcgataaactgtacaattaaaatacaaaaaatatttttatgttttttaaaataatttttaaattcttcattatggtaagaaaactgatgactaacaattatctggataaataaatactcgcgtatttgtcatcaaacaagttggtgtaatatcgctctttaaattttaatttcttcaatttattatttttttatttatagttcacattgtaatatttttggctcccggacatttcgancaatgaccgtttcgancatgccgtttcgacaataaaattnaaatatatttttaaaaataaaattcaaatttctgcaaaattatatggacggtgcggatttgggatcaatataaaaaagtttttttttcgtttttttcaaaatagcattatgagaatggctttagtttgtcaattttcggcgcaaattgcttatttttttttaattaaaaattgaaacattgttttacacctaaatagttgataatgaattagaagcttttaccctgaaaaaactattcttgattaaaaaacaattttttttgttcgaattcgggtctggagttcggaattgggcaaacccgagttaagatccgttatcagcaccctcaaaaacgcctaaaaactggttttgagcacaaaattaaaaaaaaatgaaaattagggacaaccattcttcaggattgccgcctgggtaaaaagaggacactacattaagttaaataaatggtttcattttggatttatattataggtccgtctcattttgtcttctttcttcactattaatagggctcggaaggcgatagataatgcattcattaaatttaaaaaatataattacctaattaaatttttctctttaaatttcatcaatatttttttaaattaatttattattttttatattcattttattatatttaatttgatattttaaattttggcaatatgatatagtcgtaaatggtcattgtcgagacggcattgtcgaaaaggtattgtcgaaacggtcattggcgaaacggtcattgtcgaaatgtccagccacccacagcattacccctgctcaatatagtgatggatgattcaatcttgcaaaaaaaggaaaaaataatgaagtggaagattcttaaaaaaaattctcttttttaaaaaaagacacaaaaatttgacttttcttactttttcggtcgcgcatgcttaatttttttacatctgcatgaaatcgaaaaaatggataaataaataagattgcttaaagtcaaccaatttaatcaacttgatatagttgaaagtcggccgtcaattagcttaaaatattttttttaaatccaccggtccttaattcttgaaaatttctaaaaatctatgccgttatgagcacgccttattagttaatgcgcctaattaatcatgagaaaaatttttaaaaaaatcaacaatttatcaacaacagcagagttaaacaacgttcacaatgaatgatttttcattgttccattgttttttattggatcaacaaattttggcgaattttttccaatgtttcaccaattttcacaatgttttcaaccgttttactttggtccaaatatttgaaaatttggaccaaaatgccgtccaaaatgccttcttccatcatctgcaattcat

SEQ ID NO: 2789 - DNA, 4113 bp, Heterodera glycines
  unsure (1)..(4113): unsure at all n locations
cggagcgctttttcaaaaaactttntgggaaagaaggggtccggcggtgccgataggcgccgccgggggaaattttaaaaatttgggtgcaatttgttaacagattttcaacaaaaaaggttggtttttgcgattattaagctcaattggtaggattttcatttaaaaaatgataaaatatgtatcaatttaaaaaaaaactatgagtaatcatattttctctataggaaacccacgagtatacaaaaaaaaaattgaaaataatctaatttctgtagagggatcgaaccaggggaaagaagaagggaaagtcaaggcgactagccattaggccatttgcacacttgggcagtcttactttagtaaagccgtgaagtcccatacccagtgcttaatgagggatttagtccagaggagccctcttacgcgtccgtaattaggccccgcagggcttggaagggaagggatgttgatggatgcctgggggcgcctcccaggcggggatcgattagccattccactgaatgactcccgactgaactccgattgtcccctttggctggttatccgttgccttttaagcgcccctcgggatgggaggagccctatcggagagataaaatgggggggggggggagggtaaaggccatttccggtcccggccttacacctccggccctccaaaagaccgtccctggtcgttaaaatttaaataatttccaaatttaaatgaagtcctcagactttttctttcttttgattttttttttacggtgagaaatttgttttgattttaaagccaaactgaaaataaaataatttaaatatttatttaattactcnaaataaaaatggaaaatgccgagcctctaatgggaatgaacccattcctccaaccaatccacagaagctctgtcattgagctactaaaagaaatccgccctttttttaaattaattttcttgaaattctgattcaattggatttgaattaaattggcattgcttttcaaattatgagccaagagaaaatctgatgaaatttaaaacttttaaaattgtataaatttaataattgttttatttaatttccaatcgactaaaatttggatttttgatataacccggtgtgactgtatgactatacctccccttcatacctgaggatcgtccctgatacaagaacttaaatcccacgggattcatataccaatactccattcatttattttattttaatattattattattatttttttgtttaaatttatgtattaaacttttccctttaattatcatttctcacttgttgtgtttttgttttttgtgtttatttaatttaatcagctccgcagagcttagacaaatttgtgtgaatatatatgtagagtagctccgcagagcttattttaaaatatcaaatataaatgcgagaaataacaaatgaaccattgggacgaatgatgtcagggtgccatcggaaaggtgaatttccgggcaaaataaaggatgggtgaattttaattccagatgagagctgaacacttttgagaacaacattgacttgatgatctcttctgaagtgttcaagcggaaaatttgcttgacgtcgtatgacctttgttgggcaagacgctgatcccgaagtagtcatcacatattttggaatgacctcggttggtgtaaagcgttcattgatttcgacaattgtgccaatctcagtgatttgttcagattgccacatttctatggtaaaatatatataaattttcagaatcttagacttagatatttacttttgatgtcaattacggtcgcttggaccgccaaaattgaggaatttggattgatccaaagtttcctctcctttgtcatctccgtgacgtttgaagccaggatggcaaatctgttgtcggcttccaatttaccaggagtaaagaagtcacccagaccaagaccacttgacaataaacgatttgggagcagaacaaagtgcggaaagctgttgtcaaaatcaattttagctcctatcagtccattggcaagctcttgtgctatgagatagacaggagcagacggtggttctgtgacaagagataagataaagaccaaagtttcaaaattatattaactcctcagagttttcataattataagctattgagtcctcccgtttaccaatttgcctagaaggaccagcaacactttgctgctcatttagcattcgcatcctcaagctcatgaggatattgcccatccaatttcgcccaaatgccccattttctggtgtgtagttgtgcaagaatggatcgtctttgtagtatccgacagcccactttcgatctttacacgcttccgcaatccacatgtcgtttgtcgctagcagaagagctgccaagtgctgattttgccgaaacttcagctccacaaagaaagcgatggagcttctttgtgcgttctccgaccagtttcttttagtggcgggagaggctctctcttcggcttcgcgtccgaaccattttagttcacgtgggtgaccatcgggccaccgcggggagtttggtgtggagtcgtctttgtggacaaatcgcatcacttccgccgccactccattgagttcgtatgtacgaactttcttcattacaaatgcctgctccacacagcagtaactttctccctcataaacaaatggcgaaaagtagaagttgctaaatgggtcttgcatcccctgaaaagccattaaggaaaggccatcaggaagcgaaattatcctcatctctcccagattataattaacgaacgccgcggcgcatgacattttgctatgtaaacaaaacggttagtgagaaaaatacacttctttaagacttaaagataattatccggactgtcaaaagactgagttataagtgatcaatttaaagagttgaattagaatattttataaattaagatgtgttaagttcctcagaactgaaaaaaatgaagcgataaatagtcccgcgggacttattgttaaaaaaaaatttcattaaataattccgagagtctgtccaaatttttttttgttggcattaaagttgaaatggcttctcgagaccagtccacgttcttaaaagacagtatgtttaaaaaaaaaaaaaaaaaaaatggaaaaaatgattgaatttggctatcccatgaaattagtcctcagaaaagttaccaaaatgcttctttttcctagggttttcgcggagattatgttttgagcaaagatttctatttaattctttttcttttacctgattattggactgtggagagggtgagggattaggggtgagtgcaggtgcgttttctattaatactgtgttatcagagattttttgataggaatcatgagaatagccaggtacattggtctgttctcttgattctaattcctttagtgcttgttcttcatctttttgaagatttttcgtggtgcaagggggtcctgagtactcaaaatactttttaacttgattaatgtgtacaattcttgggtttgtttgaggtgatgtgcagctgacgattgtgataaggacaccattaatctctatcactcgatacagtcccttccaaggtaattgaaatttcttggatgttttgacttttcctgcgtaattgcgtaaaagaaccctatctcctatttggacggtttgattgcgtactaatttgtcatattgtacttttgaccgtaactgagcttctttaatgaccgccgcagcagattcccaagcttttctgagagacttaactaatttctgcttgacattgtcaacttcactggtgttttcgggttcggtgttgggattcagaatttgctcaatgcaaaatattgggtctcgcccaaagaccaaaaagaaaggtgtctcctttgtggaagagtgaattgatgtgttatagcagaagttggcacattcaagaaattcatcaaaatctggttcttcatttgaaatatatttcgcaagtatattgtgaaatgtcctaaaagatcgctcaactactgcattgccttggctccaatggggaatagcataacatttataagtatagagaagcgaacagaaggacttaaaaaaatcagag

SEQ ID NO: 2790 - DNA, 3489 bp, Heterodera glycines
atagccaggtacattgatctgttctcttgattctacctcctttagtgcttgttcttcatctttttgaagatttttcgtggtccaagggggtcctgagcactcaaaatactttttaacttgattaatgtgtacaattcttgggttcgtttgaggagatgtgcagcttacaattgtaataaggacaccattaatctcaatgactcgataaagtcccttccaaggtaattgaaatttcttggatgttttgacttttcctgcgtaattgcgtaaaagaaccctatctcctatttggacggtttgattgcgtactaatttgtcatattgtacttttgaccgtaactgagcttctttaatgaccgccgcagcggattcccaagcttttctgagagacttaactaatttctgcttgacattgtcaacttcactggtgttttcgggttcggtgttgggattcagaatttgctcaatgcaaaatattgggtctcgcccaaagaccaaaaagaaaggtgtctcctttgtggaagagtgaattgatgtgttatagcagaagttggcacattcaagaaattcatcaaaatctggttcttcatttgaaatatatttcgcaagtatattgtgaaatgtcctaaaagatcgctcaactactgcattgccttggctccaatggggaatagcataacatttattaatatagagaagcgaacagaaggacttaaaaaaatcagaggtgaatgccgtggcattatcagttaaaagactcgtacagcctccaaactttaaataacagtgtttaaagaatgctagtgctattgtttgggatttagcatcagggataggtacagagattacatatttggtaaatgtgcaaattatgttaaggatgtgtttgttacctttctgcgtgaggggaagaggacctgccaaatcaagtgcaatttgagcgaagagagtattttttggtggcatttgcatttctgcacgatatgaaggattgggtgaatgtcttagttgacatgtgatgcattgtcttgtccaatttgtgatgtcgcggtgcatcattggccaataaaattttctacatttccctaatgtctttttgatgttcatatgaccaccatttatttgtgaagtatgaaaagcttcaaaaattagtggacgaagagaaagcggaatgtacattcgagcattttgatctggtaagtgttgatataatatgcctgaggaaagactcaaattttccgctcttgatgcaatatcttccttttcaacttctgtggtcccctcagggaatgaaccaaaatttacaaattcaattaatttcctaacctcagaatcgtcattttgttctttccgaacatcaatggcgaatgtttttccttctatatcacgagcagtgatggttaaaagaaaatgctcatgaaccattcttggcttcatattcagtgcaagacagacgggaaaatttgctatgtcttccaattcagccaaatctctaatggcaatctcttgggttctttcatgtgggtaccgtgataaaccgtcagctaaaagattctgcttccccgctacatgaattattttaatattgtaattctgtaactcaattaaccaacgcgcaaggtgtggatgcgcttctgcctttttaagtaggaaggcgaggggtttatgatcacaatgtaattcaatttctgtcagaaaaatatagggtttgaaatttcgcagagcaaaaattattgctcccaattccgcttgtacagcaggccatttgcgttcagatgctgacagcgttctgctgcaataagcaataacttcatatgcttccgccaactcattccactgcatgagtgccccaccttggccaacattagaggcatctgtgaatatgtgaaagggtttatcataattgggaaacaccaatattggtttctcactcaaaattctttttacttcattgaatgccgcagcctgttctgtaccccactcgaaattgctctcctttttggttagtctggtcaatggttctacgattgtagaaaaattaggaacatgtttacgaaagaatgaagccattcctactacatgtttcacatctcgagttgttttagggtctggaaggtttttaattatttccactttgcttagactaggagtgtagccgtcagcattgactaagtatccgagaaaattcatggtcgccgcagcgaatgtgcattttttagggcttaattttaggttgaacctcctaaatctttcaaaaacacttctcaaagcattgagatgctcgccaaaattatcatccctggtgtataccagaatatcatcgacatatgcgattacacaatcgtccaaacctgtgaggacatgcgccatgcatctggcaaacgcactggttgcatttcttagaccaaaaggaagattaaccatctggaaaattttgttttcagtaattaagccacattttctggaagccctttctgttagtcttatttggaggtatccacttgacaggtccaaacttgaatagtaacggcaattacctattcgttccataattgtttccaatctaggaagtggataatggtccggaacagtcacttcgttaagtttacggaagtctatacatggtcttaacccaccgtccttcttctgcactaggacgatatttgagacccacggagtgtccgactcaaccatgactccggatgccaaaagttgatcaatgtgtttttggagttcatcacgatacttgaatggtgttcggtgtggcttcgacgacacaggagtgtcagacgtggttactatgtcatgctctcctgcagtgcaagagcctaagtcatattgacttttgctaaaaatatcttggatttcttcacacaattcctttaatttgttaagattttcacctgagactgatgattttgaaaaatcaactttaaatgacggatctgcgtgaattattttttgtgactccctcaggagattgatctcacccgaggtgcatttcattacgagattaggatgatcagatttgtttaattcacatgcagtcgcaatgcatatatttttgattatatttttaggaaaattggttggattgcaaattacaatgttcaataaattttccttaggccttgaaactgtggctggtgtgcttaggtgttcatcagacaatcttgggtccaaattttctacaagaatgtccttgtctattgacaagatagtatctatcctggctttggccagtatttgagtaccaggaggaattcggtagtgctctagagctcgaacttttaggtttgagagggtactatgacttgtttccatgtttagttttgacttacctatcataacttccttttttgtgaagtcaaatgttattggtggcaggttaacaaagatatcacatcctatgattatttcataatttttcatggctcctgcttggtcatcaggtataaaattaattgaactccgcagagatatatcacc

SEQ ID NO: 2791 - DNA, 2775 bp, Heterodera glycines
  unsure (1)..(2775): unsure at all n locations
tgatactttttttctttttttcggcattttattttgacttttgaaaatattataaataaaattttttacttagggtggaacataattttgatacccaaattttttccaatttttaaaaatcataactccgttatttctgcgcctatttaaatgattctttttttattttgttcttcatggtttcctcttttatatcttactatcgtttcactttttatttgattgatagatttttctgccttttttcccgaccatgccaaaattgaaaattggcccactaatttttctcgaattttttatggtcaaaaaccaaagctgatataataaaatcttggtttttctatacaatttagaccagtagaatccgaatatggccttaaatgggacctatcttttcaacctgagcttgtactgctccaactccatgcatgaagttcgagctgtacaggtttgttgcgatcccagagactttgtgtaattaaatttagaatgttcacaggcagcaaaaaaggaacaaaacaaaagtaaaaaaagcacatgccaaatgcaataaatatactgtggaatagctatttataaaattgtaacgcattaatgaaagcgaaaacaattagtaaccgattagtaaaaaatggccaattatttgttaattactgaaattaaccaattaattaatcagaagggaaattaacgtaaattggaaccaaaatataaaataaaaaagcatttattcagatatatttcggaaagtaatttaatgatttattttaacaaatttttattggccatttaacttttgggttttggggagagaaaggactttcgtccaatttaaatatttaaatttttttttctttgaaatgccacaaattggccctttttgagttgaagtttaaagcgtgcgntctctttctcccccccccccttttgctcatattttatgtttctgtctccccccgcttttctccgcttttccttccccccattttctttcgccgcttttccccctaaatctccccggagatttacccattccgcccaaattctgtttgtattttggctttatgtagcggagtaacaacaaattcgtgatttatcccattttataattttgcccgactccaaaaatatttctcctgtttctgaattttcatcccatcgatttaaaatttatttttattttttgccgaattgacaacaaaatgccattaatcttttcgtttcaacgaagaaaggtgagcaaaaaatggcacccaaagtacccaattcagagctccattcattcatccatcacaaaaagaaaaagcgaaaataaatctgccgattgaaattaatgaaaaataaaaaataaaacattgaattgtttggcataatgccaatgaattttattaagaaaaggggggataaatgtttaaaaagtgcaaatattgatcaattcatgctctgatttggccattctttatttttgggagcagcccacacttggcacttttattttcttcacggcaccattttttgtcattttaatttattttaatttttttgtgtcatccttaaattaatatttttttctttttttaaaattttttatatttattatattcatcatttagttctgtttcgagcccaattaatcggaaagtgaaatcctgtgaaaataaaataaaaatgcataatttctttgtcccgtgcattatttaattttattttctcgggatttcactttccaattttcaactttatttataaacaatccgttcccattttccatctttttccaaattgtccgatttcccccccccctttttgggcttttcctcgtggccatcttccgctgggattaattcgaaactttgtccaataatttttttatcgaatgaagcggacggagcagctcttcctcctcctcctctttcgccttttttgttgcttttctccttctgttctttggttttcgcagaaggccaacgaaattggccaaatttgccaaaaaaggaacgaaaaaacaaaacgaatgtttttaattaattgaccaaaaatcctaatccaattaattattgccatttttttgttccattcgcatatgaattgtgaaacgaacagctgagaattgtttgtgcttttcatttttcagctgccgcgcgactttatagataatatttttaattaaaaaatctttttttttattttttaataatttcaatttgcgtcatcattgtcatgttcatgattccttcagctcatcttcacatatcgcatgtttgacctcattaaatgccacggcttcttcgcccccatttcttccctttctcacgtcatcattagcattaattgtatttatttgttatttttcttaattattaatttacattttcaatttcctattccacgtcaccccttcccccaatttccccccccccccccaattccttccgcttatttgtacagttcaaatcagtcctacaaaatgtcacttcccccatcaacagtttccttctgctgataattgtaaatttcgaaactttgagtgtcactatttaaatttgataattatttttccctctctttttgccatttaaattggcaaaagtgccaaaaaattttgctgaaatccgtggcaattttttggcacttccgtctctgttttcctctctcctcctccaccttttgacgatctgtgccacttttgccagattacggacgaacgcctcccccctttttttcgtggatattgatccctcgggcgcgacaaattttcaaaattttttttctggg

SEQ ID NO: 2792 - DNA, 3573 bp, Heterodera glycines
tgcaggcctttgttggatttttttttttgcaatggaccatgcattttaacttagtcacattcacatcatttctttcactttttattcgctgaatttttatttttattttttaaatttccatttttgtttctaaataattaattaattaatcattttgccaatttggcttttacttccaaaaatgggttgatttgttacatttgcaatttgttcccaatcacgaacattgttccatcaaatttccaaaattggctgcccaattagtcattcggaacatccatgcaatccccggatttccatgccgggccccgtcacggcatcggctgacttcccctccccccgaggggcccttcccaaatttggccaactcgtcgccccatttgtcctccccatttctcggaatgcctttggccaattcccgcgggaaaaagttctgtggtcgaataaaatgagactaataataggcgcagagcttacaacaaatgcattttggaaacaaatacaaataaaaaattaatattaaaaaataaatttgcactttaaaattcttcgattaatttggacattctaaaaaatattttcctttttaattataaatttcaaaaaagtatttttttttaatttgtcttatttttgttccttttcttcgtcaccttccgctgacaaatctctgccgaatgcgaatagcaaaaaaaagagaagctttctctcgcgcggtataatttggcgcattttgctccatttttcctttccccgccggccccccgggtccaattaatccttcccccccattttccccgtggcacatttttccgtttgttaatcggtttccgctctctgtgacaaatgccatcccctgctcagatgtcttccccatccccgccgaccttcgcttcccatttcaaatactccgtcgccgtttgtcacggcattggcaccgccggtggacgacgctcgccgatgcgccgcgtttcgctgccctccgcgctgccgcacccgcgcacgccgaacacgctgagcccaaagctcggcttcctcaaggtacagcccaactgctgctgcttaattatgctcattagtgaattgattattttatttatttgattatttttgccatttcatttggcggcaaatgtcctttttaacacattttcaccgcataaaattacgtttttgcttaaaaggtaaaagtttaaaaagctgtccttttctggcactttttttacgttttttggccctaaaatattttcacaaaaaaaacaatttgtccatttcttatgtggccaaggaatttctacatatattccatgatttgattacgtaaattgggcccatccgtccacaaataaatccgcgcttttctcggatttgtgccaatgtttgatgacttgcaagtcgcttttctcgcattccaataagggtttttgcggtccttctcccatttttgccattttttgatctcacattttgccaatttcaggaaatctccgaatttgacattgacccgccgttcatttcgccggctgcttcttccagttcaaggtcagtcagcagagatcaatctaatgaccctttaattagtcttaattgctgcattaatcacccaattatctgtttaattgtttatctcattttggtttgttttgcttttttcccctccaccgattgttgtgtaatccaaccctaatcccatttttggcggtgtcacacatcgcttggcactcgccgtgggaaaatgagtgaaaaggcatttaattccgcccattttggcatcatcagacggcacagaatgatgatgacgatgatgcaattggcatgtgctctccccccccccccccgctgtttttgtttttcaaaataagcataagcttgcgcatcttttgcggcattgcctttcgtacaatgcaaaattattttgttgggaattggacaccaatcttccgcatgtcggcttttcctcaatgcttttcccccttcctcccactgtctcagcttttcctccctatttttcttcccccctaatggttccttaatggtcgcagctgagtttacgaaatgccgaggggtccttaaccggaggaggggggcagtgccggctaattggattttacaaaatgagtgtaatttgtgagagatcacctcggccgggacgggggggggcgagtgacgtcaaaaatgtgccattggttaatgcaatttggcaaagtgtgtgtggcaccaattttgggagcagctaaaaatatatacataatgatgatggctttgaaagtgacctaactaaaaatttgtcgataataatttgctaatttttatttttattaatttcatttttggatttaaataaaattttaatattttttcctcctttggcattttgataaaaaaagtgccaattatctgtcgacccaagaaacttttagcggcgttttgcttatatataaatttaattttttatcgggcatcagcatcatcattaattattcgcgcttgcctgatcgttttgagccccgcgggtttctttccatggacggaccctcggggcaaaaggaaaggcaaaatgccaaatttgaattgcaaaataatgaagagtacgaaacgaatgactcatttttacgtcatcaaaaaatacaaatgaaaaagaaatgatgatgtgcaaataaacatacataatagaagagggatggtgaagcgcagcagacggacggagcaatgagctcattttggcatggaaaatgccaaatttttcagttttttttacttccttattttttggttttattttttatttattttccttttccgaatttattttccattttgttttaactcttttaaattaaaataattcaatttaatttttttaattttgaatttttcagtgccgacacttcgccaatgcttttgtcgccctctttccaacggccggcttccgcgcgcctttaccgtcgtaatccgcagcatcggcacagtcagcccaactcgccgggctcgcgcaaatcgcgctttttgaaccgccaaccgccgccgatgggcgacggacgaacggcggcagtggcgaaagaggcggaggacgacggattccgctggacggatgtggacggattttatggtaggaatgaaaattgattattatttttaaaaatactaattgctactaatgccataggtaattagctaattagggtacgaatgacataaataaacgtaataaattttgtttaaggccgaaaaaattcgatacctctgcaacaattgttggccaacgatcttctgaacggcgccaatttgtttggcgatagacacgacgagttgaagccgaacagagggaggatgatgatcagcaacggaatggacaacaatgagaacaacgagacggactatgacaacacaatcgacggcagtctgctgaatgttgagcagcaacagaacgaagtgagtggaaaacggagaaaacgacgaaatggaaaaatgccaaaaaaatcaacaaattaaatgactaaaacaaatggaagggtcgaaatggcattttgatgtttaaaaaattgtttagatgaacataccatcggacataac

SEQ ID NO: 2793 - DNA, 1379 bp, Heterodera glycines
  unsure (1)..(1379): unsure at all n locations
tggaaagcatttaatggtgatcgactgatcagcaccaatttaaaaggacagactttgcattatttntgctgataaatttaatttgaccgttttaaacggaaaagcatttttgatcagtgttgatcagctcgttgatgcgaagtccaatcaatcatatttatttattattattttcaaccgggtttttttggttcatcccaatcatttttcacccccaatttgtccgggcatatccattccacaaaatcatccaattccttatacatatttattgtatactgtacaatttccattgctacaatacaacatgtgactaaattttaaaatgaattcaaaattatttggcattttatttttcgaaattaaattttttggtattatttgaaaaagtccgagtccgagtcgctgctgtctctgtttgccgtgtacatttgtggcacagtaactgccggtacagtagggcctgtaggaggaagggcgggaggagccgttacggtggtcaacggttgctgagagggcacgggcttttgttccttaattaaacaaaaattaattaattatttatttttaaaattgcgaacccttctcggcgattcagacgatgatgattccgtcaaagaaatattgaatttcctcgggtttttcaacacctcaagcattttccggaaattctcgtcctcttgctgcttctgctgctgctgcttcattggctcagccttttcgtcttcaaaataaatgattattttttatttaattattttcctaattattattgcaatttaaatcgtcccattaacataacaattaacaatttgtcaaagtttcaaaaatagtaatcaaatcagcatctgctgctgttttggactgatcaacaactgttttgcccaatctgctgatgctgactattgcctgtcacactttggcaaaaaaagtaaaaaaaatttttgaaaaaatttttttcttggcttaatttgaaagatattccgttttgacattgtaagaccttcaaaccaacgcagttctcgaaccggataagctcgagtgttttggcgtcgtgattagaaagattcacgcattctctcccgggattactatttaaagtgcttaaaaggaggaaactaattaggctaattaggaggtattattaaatttataaaatacagtgtctatctagtatgttattgtatctcattcattgccttgcttcctcctctccaattcatcgtccgcatttctccgcttttcctcctcttttgcttcgttttcgttcctttcgtttacagtatcccttggcttttcctcgcttttcgctacagtactttgttgttgttggggatactgttgtgaatccaaagcctagcgatctccgcccgntgctt

SEQ ID NO: 2794 - DNA, 3857 bp, Heterodera glycines
actttgttgttgtttttgatactgttgtgaatccaaagcagcgatctccgcccgtgcttcgtctcgaccaactgtagtaccgccgagaattagtggacggatcggctcaaatgtgaccgcaccaccaccaacaccggtgtgaacagcagacccatggcttagtgcattttggtgcactgttacggtaggcagtggtggagacggtagtcgtacattttgttgaccgaccgtcggtctgtctttgaattaatggattttttcgggatactatttattatgtgaataatatacctcgagcatctgttgtcccacttgcaaattcgctttgtgccatcctttgcgaatgttcgtcaaacagtgccaaattcggctgcagctgatgaggttgccccaggggaggaatatcatcataaattggataattagtgggctgctgctctttaacaaaatgcgcgcgattaaacaatgaagcggagggtggtgcagataattggcgacgagtgggcaccgtatgcgaattggcacgccgattacggtactcgtccaacagttcacgaacctcaagggattgggaaaggttaagtttccaattaattactaggctataattcttcaattaattactaggctacgctatcaaacggagcattttattatatataaaagcaaaatcggttagaaaattttttaggaagatataaaattattgtaaataaattaaaaatagtgaaaattaattgcccgatcattggctaatttgtgaccggcccttttgcctttttccccgtctatatttatgccgacctcttgcatacgtttttttaaatttttaactgtgttttcctgatttgtactcaatgtactcaaatccccccccccccccgctttacccttccttcgatgtgccattccatgttgaggagacgcgaccgaatttgcaccatcgaaggcggtggaaaagatttgccaaattcaccagcacttattctgaccatttgctgttgatcactcattactctgctattgctgaacactgattgaggtcgacgagtcgaactcaaattttaaattaaatttaaaaaaaaataagtaattaaatgcccactggtaatattcgctggtcggcccgctgagacggaactgtttcagctgggacaaactttgccgaatctccgccaaatgccgttccattgacggcacatccgagtccaacaaaatgccacttaatgcaattagtaattgattttaattgataattgcccactaattgtccggcattgttgtcctcagcggcctcagcagttcaagacgttggctgagactttcttgacggttttcgtggcggttggtgtcccaaaaaagtgccgaagtttcgagacgagagaacagtgacggcgggaacaaaaaaaataaaaataattaattgcttctttttattaccccttctcccgggttggccaaatttggcttgctctcggaatggaaaatctgtgaagtttgggcatcatttttgctgttgttttggtgccgctttgtgttttttgccagtgagcgctaaaaacatttttcaatttaaaaaattaattaattgattaattcgtgccgatcttcgtcgataaatcgtcggcatttccagcctcgtattagcagcactctcccgttgcaatgaggccaaataattatcctttaagtaaatttacggcacatttattcatttaaaatacaaaaaaaacccgcgattgaatggcgcgccttagccgcgcttccaattgttgcagccgctgtttttccccattttttgcggcatttttcattccaaaaattttagaatttacaaaaatttaaaaattttcctttgtttctgttttcaaaattgcttaagttattggcataataaaagcatgaggcattgcattggtggcatagttatgcaaacgaaacaaaatttctttgcccgcggcgcaatttgtcaccagggaaaccgcccccgggggcatttaacaattttacccatttgtcaaaacaaaacaaatgaaaaaagatgtaacaagaaaattgtataatatttatcatgaaaatttgctaaacaaaaacaaaaacttccaaataaattttcttaaacaaattgcaaaattgggaaaagcgtaaaaattaaaattgggataattattcaaattattatttttgtgtttaatgcaaatggcaaaggaaattggtgtgaatttgttcatttatccattaatccgcttcttcatcccctgccgctgtgttcagaaagcccaactcttttgatcgctttgtactgatcgggaatctgaaaagtgtgtgaatgaatttattaattaatgacccatttgctggcattttgcaaattgacctccatcagtgcgttcaatgcgaaggacgcctgggggtttggcgcattgaacatcacctgaaaatgtgccaatttgaaaggcgaaataattgccgaaaaagtctgacaaactgatcagacccaaccaagcccaaggaccttgtggaagtcgacaaagtggaaattgtcgaacaaccgtttgggcagtgtctcgtcaaaacgagtcatcatgtcccaggggccgtctccgacgccgaccctaacattgaattaatttattatttaaattaaaaataatcttaattgaaattgaaaattaaaaaaataaattaaatttcattttaaaatctactataaacaaataacaatttttaattgaaagattgttttgtaaatatttttaattgaataattataactaatagttcattaattgtcaattaattagttaatatgctgtgctcacatgatgatggacagcgggtaatgtgaagcctgggcaattgcacgttggtttatcttctcgttggtcacctgaacacaaattatttcgttttttttgccacatgcaaataatgccaattcttttgcttggtcacctgtccgtccgccacgatgaccaaaatgtgataggaatgcttttcctcgcaaatttcgatggccctctcaatcaatggcacaaaatttgtcggtcccgacatggcaatggtcggcattcgctcgttgtacacgcggagcacctctgtttgacaatttgtaatattttggcggttcggcacccattgagcccattaagaccttcaaatccgacacatgccgagtccacgtcgtcccggtccaccaagttgaagcagctctgatcagtgcattcctcgtcgccgaatccgtacacggggatgatcccatccgcgtcaaaggaggacaacgttttcccgacaatttcgatcacctgagcaatgggcaatcgatcattaattaactaattatgcccacttgttggtatgggttcagttcgttggtgtccaaatggtgcagcgatttgccttcaaaagtgcgttcgccctggtaatagttggagcgtgtgtagtcaatgccaaaaatcagattcgaatactcgaggccagcctttggaattaaagtaattaattaattgtccctggccaaatgatgctcttcacctccttaatgccggaaatgatgtcctcgagcgttttaaagcgtggcaaattgtgagggctgccgatgttcagcgccattagcagcgaattgcgccggacgggcgaactgtaaaaataattaaatttgaaaattcattccaattaatcaaaatcattagcatctgatcacactaacaatgatggcgcttcattgggcttcagttcgtgccgtcggtccctccgctcctttttcatcggctttttgatgatcgtcgggcggcccaagcgcagttcgtccgcttacatcagcatcattttctcagtcacttcggcagcaaaactca

SEQ ID NO: 2795 - DNA, 1678 bp, Heterodera glycines
  unsure (1)..(1678): unsure at all n locations
aaggaattgtgtctgaaatttgccgttgtcgtcgcattataactcaatttgccctcttcgtcncctcccccaaaatgaacttttgtcctcttcccccctttgaatctttaaatgctccaaattctcttcccttccattttcaaatgcttcttcttttgtgccctttcattgttttgtctgatttcccctctttttctgtcccttttttgctgctcattccccaaattcctccacttcacttcgccaattcgaccgtccgtttcaaaaccaccaaaagagccgaggacaaaggacggacaaacctttgggggatggcactgaaagggcaatgagttagcccaacagaggacggacggacttaaagcccactaatataaattcctccccctaattgttttaccccttttttcctaccgcctttcaagtttttttttcaatttgtttgaacacaaattcaattaaacaaataataaaattagtccttctcattctcaactcacacttttcccacaatatttttttttcacgaagtgcgccaattaacgcctttcaacttaattaagggactaattatttttggcaaagagtaatttccgttgtctctgtttctcgcaccactttttggcattacccaccccatccgacgatcacaaaatgcctttgctttggccctgtcgctgtctctggctttgccccttgcgccccctctcccccgattggttgtgccgatgatcggccccctcctcttcctccgcttctccttgccttttctaggctttgtgccgcttttccgctgttcccatcgacaagtgttcattcccggtgatatcattctcgggggccttttcccaatccatgccggcagtcgcaacacttcggacggaactctctgcggccgcataaaggctgaccaaggagtacagagaatggttggcactcgcagcgaaagggcaaatgaaatgaaaattgctttaaggtggcaatgctcttcgcattagaggcagtcaacagaagtccgcgtttgttgcccggactcaaattgggagcacaaatattggacacttggtaaggcacaagggcaatttgccaagcgaaaaaaacgacaaatttgaactgcaaattggcgcccatctcttaatttgaaaatcgaaaagccaaattcgaacagttccgtcgaaacacatgctctcgaacaaagtttggagttcataaagtccgttcggctcgggtgtgcggacgacgaattcgacggcacccaacgaatgtttcttccggtggaaatgcgcgccaacgggccgaaaaatgtgcaaattcaaaggaacggccgacggcaaaaaatcaccgccgtaattggttcagcatcttcacaagtgattaattcatttaaatgttcgatggaaaagtcgtttcaaccctcacatttttcccttaattgaaagtgcctttgtcaggtgtccgttatggtcgcttcgatgcttcagctgtttaaggcattgcttttgccgcttatttgtcttctcattgctttgtcctctttctagatcccgatgctcagttattcttccacgggagttgagctcagtgagaggccaaggtggattttggcatttgactttggtatttttccctcccctttcattccttcgtcagatttgcctatttctcgcgcgttgtccct

SEQ ID NO: 2796 - DNA, 2307 bp, Heterodera glycines
  unsure (1)..(2307): unsure at all n locations
cacaggcagttacggggagaggggcatgcacagtttccggggggcggccacggaattgggcatttgcattgagggcgaagtgcacaaaatcagcagacgatggacagacgaccaattcgagtgagaaaaagcgcaaattcgagagagacggaccaaacaaatggaaacatttggccagagaattgctcattcgaatgcgaaactcgaaggcccgcggggtggtgatgttcgtggacgaagacaacctacgcagattcctctccaatctgaagagattggccgagggcaaacagcccgaactaagcaattacttttggtaggcaaaatgacaaagcaaatgatgggcaattagaggacattagcaattaaaagggtttaatttgttagctaactgacaattgtaattgcaggtttgtggccagcgacagttggggcatgaaggggtccgtggtgaagggatttgagcacattgtgaacggcgcaatcactgtggcacccaaagtgcgctttttgaacggtcgttgtccctcccccccccccgcccggcacttttattttcatttgttctttttcggtaggcttcgacgattacttcgcttcgctgtccccttccaacactttcctcagcgaatattggcagtcaatgaattgttccgaacgctttcaccacaattttggcttatgctttcagtccaaagggttctcctccccttttgcttttgctaattcgtccattttctgctgaaggtaccgatttgtgcaggaggcgtacgtcccttttgtgcacgacgccgtccaattggtggcccgggcgttgcacaattccatccaagtgggcattttacccttttaagggcattaatcactcgttgcaggaggagtgcggcttggaggggcagtgggaagagtgtccgctgtcctcagtgggcttcgatgggcagcgtttgcagcggtcctaccgaaacatgtcactgttcggttcggatcactcagtggcattagcggccaatttaatcatttagggggccaacccccgctgatcgggccggatggagatggcaccggacagtacaacattttccaattggacagtcgcggggcgtaccgaagggtgggcggatggatggacagtggggagcagcagttgaacgtggcggaaatccgcctcgggcttcaagttggtggacttgctgaatgtgtctgaactgcttttagcgtgtcgacggctttttgtccgatttcgtccctttgtccgtgtgcagttcgccatgcccccggggccaataccgcgcctaccaagaccaaaactgctgttggacgtgcattccttgcgacacggccacttccatcgttccaaaccagaccaggtgttgttacctccttcttctgctttctcacaaatgtttgtttgttcagctgtgtccaatgtcccctcggggaagtgccaaattccgatttgaccgtttgccgcccgattatgccaagtcatcttcattgggatagtccgtaagtcttccgccaatgtttgtccgctccgctaattgccattgctcagttgggcccttgtgccagccttattctcttcggtcggtctcttggccacttctttcgtcactttggttttcctccgcttcaattatacccccgtggttcgcaccatcgaattctcttccatttgccattttttccaggtgatggcttccggaagagagctttgctattgtatgttggctgggattgcgctttgctattccatgactttcgtgttggtcagtcgtccttccgaattggtctgtcttttgcctaattggcatttgccgaattcggactgagtttcccactcacaattccaatttgttgttcttagatttgtacttttactcgtcttttgcccggtctctcaatggccaccgtttacgctgccattctcgtcaaaaccaatcggttggcccgcgtcttcaagccgaacaatgcgttgaggcccaaatggatcggtccgactccccaggcaatgattaattaatacctaattagtacaatcattggtgcctttaatgaaactccgtttgcaggtgttcttctgcacaggtctcgcctccgttcagctcgccatcgcctccgtttggctttggcttgagccccccggcactgccattcagtacccttctcgggtcgaagctgtgctcacctgcaaagtgtcccctgactgtgctgctttttcactttccgactttgtttaggctaccatctcccaattgttggtctctctcttttactgtgngcttctgataattgcctgcactatta

SEQ ID NO: 2797 - DNA, 1373 bp, Heterodera glycines
tttgtctgttccaaccatacaaaaatgtgcgaacgcggagttcagcagtgggaaaattggtcaatcagcaaatgcgatttataaggtacagagggagcagagaatggcattggcaaaacggaccatggcacggcattaaggggggggggggggtaatcggggtaattacgattgactccgtacctttgcctttttaataagtttttattctccccatttatccgtctttacctttgaatttgttacttttgtccacccaatccctttgttttcccctttcaaatatcttttttaatatgtattatttccctttttctccttttaattttccagtcaaatcacaagtcccgtgaacgacgggcgaacggccacttctttggttgtcaacagcgaatacgcaggtgaattcagagttgtgatctataaattttgaaaatttcgaatggtcattaaagctaaaaacgggtccaaatataaataaatactcaaaataaatactcaaatgtccgtttgttttgctggtaaaatcagaaaataaaaattgtgttatcattgtcaactcatttaatcatctctcccccttttgttgtggtcttaatgaactaattattctgtgaatatttcccaatttttttgttttttttttgcgttttcaaaaaaccttttgggaatttcagaaagataaaaactgaaattgcaaaacgaattgcgacctctaaaaacatttggtggttcagtcgcaccgagttgctcgccttcggcggcgtgtgccgttcacccggcacttcggagacgttcttcggcaggtgcgttgttcagtttgacaacgcccggcggcactttaaaatgttcgacgttacgcccattcggaaggggcgaaaaacgaaatttgcgacggatggaaacagttacgaccggcgcatgggccgacgacggcacaacagtctcttgggacagtcgaaacggcacacattggcaacagtcaacagacaaagaagttgcggcaattgctagaccaaacaatgggacaacgcgggggtaaataaagggaagggaagggaaggaaaaatgaatctaacaaatgggagatgaagcagagaagaagcatttccggggagggggaggagagaagcatttagggaggaaggggaaaataagcatttcggggggggggggggggggtaaagcgaggtatttagcagaggagaggaagggaatgaaaagaatatataggaaatatctctaaatggctgaacgccaaatagttactgactaaattaagtaatatgacatatgagcctataaagacaattttatgacatcattcatattttttgctaaggtgaatattttttttctatttgtttttttta

SEQ ID NO: 2798 - DNA, 3604 bp, Heterodera glycines
ggaatggaccggggaagaaaagcttattcaacaattttcttccagtgatgttgatgaaaaggtcaatgatcagaagcagaagaatgccattccaaattcaaaagacaaaagtaaaacacaacaaatatttgaacagaaggcggtgatcaatttgatatttggacaaaatgacagaagcgaaacggacaaaaagaggagaaagagtttggcaaatggggaaggaagagaaagagagaaagggacagagagaacggcggagggtcagcggatgagtgccgacggaggaggaaaggccaacggaacggtgccgcacgcgcactccccccggaggacggacatggacagcccaatgcgactgattctccggaagatcagcggcgaattcgccactttcctttgatctcttctcaaagtccaacacaaacattcggattgtccctccttttgccttgaatttggccatttattttgatcattgagtcccatcggcccattgcgcccgcggattacgaaaatgttgccataatgaggcaatttcgcatattaattgggtgtgtgtcatcgtcatcagactttcccctcccctcaatgcgaccatttccaaaatcattcaaatccgtccccctgggcaaacaaaacaaagcctttcctttcccttttccgaatttattacgcaacattttcagcagtcatttcgtttctatcattttttgatttgtacctttaaatttaattttaataaataaaaaaataattatagagatttgtttggaaattcacttcaaaggaattgtcagtgaatttggagttgctaatgagcagaacataaagtaactttggatgaatttgaacgatggacaaagaaatgaaatgaaaagaaaagaaaagagggcgaaagtgtgggcttttgaaaaacattgggggaaacgaaacatttaagaaaaacgaaaaccaaaaaaaaaatagtattagcatgctgagaaaccatgaaaatataagttttaaaaaattccaaacaaaagagcaattttatgatcaaaggggggggggtcattttcaagagcccacactttcggccttaatagcagttttctaacttgtcgggtgcaaaaaatgagcattcattgaacgactgtcctcccctcgcccccgttgtccccccatttgccccccttgtggccaaattgtccttttcctaattgtccttttcctaattgtccttttccggtcggtaattcatccccagatcagttgcaacattcgcattctcatccattcattcattcattcaacattcattgagttgatttgtccttctcccatcgcctttcaattcaattggtcaatgaagcattacaaccaataaattggccaaaatgcggtgccattggctgcccattcaattcattgttaatgctatcgcattttgcttagtaagtcggtcccattaacataatcaaagggcggaggacaaggatctattcaaacgcatcggattaagggccacaaacgaacgaatgggccgatcattttgggatggaacaacttttttgatcagtgcaatgtcatacggacaattgcgccagaagagcaagtggacaagtgcagaagaaaatgcgaatattccgaggacagagaaatgtcagtgaatgaacgaacatgaatgggatttccttttaaaatgattattattttttgcttaatgaccccccccccttccctaattagtttcaattcatccccccccccctcctcttctaatagtttccaattcttcaccttcaatttacccctgttttgaccaattagtgcccaaaatgcttcggttattgtgttccatgagactgctgcaggaggcgatctgcccgatcgtcgatggcctgatcaactttatgtgatgttcgacttggaatcgccgttccgtgggccgcagtttcccgcccccaattttttcaacttgacaatgacttattttgccaacgaccaaaacaatttgatggctccgtacggatcactgcacaaaattaaccgatccaatggagaggatttggaggacatttggacatgggaagaagtgaaaatgaagggatgaaaggaaaagcaagaaaggaacatttataaaggtggtggaaaaagtcggaagaaaggacaaaacggcacttcaaatcgcatcgaattgcgcgtcgcattcggcacgcgaagcgtacaccgaagaattgagcagacacatcgaagtgacggggtacggacgctgtttcggcggacgaaattgcgacagaaaatgttacgacacggaaatcggtggccaacgaatcacaatgataaaataaaaaggaatttgctttgcagatcggcacttcttttatttggcatttgagaattcggtttgtcgcaattatatcaccgaaaagttttggaacgctttccgccatttgacggtgcccgtcgtactcagccggggggtgatggaagggctgggcattccgccgggggcatttgttgcggcggacgattttggcactgtggaagagatggccaaattcctagtggaaatgcgaaatgaccggaacaaatacttgcggttggttattcagagattttttattctttggccacgccggaaggtccaaaagcatcgcaaaacaatccaaaaaatgcctttgtttgtttttctgggattttcgagtcttctgagtcggaacgcttgcgtcctatccgtgccgtgccgttccctgcccatttttccccaaaactttggcgtggcctttcccatcttttaatttgttggcactggctttgtccgcttccaattgctgttttgtctgtttttagcttctttaattggactcggttctatcgtcgaaacagtgacattgtcccagcggaaagggccatttgccgactttgcgatttggcacaccggcgaatggccccgggcagcaaagtgattgccgatatcgaccgatattggcgactgggcggaaattgtgtgctcgacttcggcgcccaattggtgctgaaacggccgaaattaatcgcaaggtcaaaaaatgacttacgcgcgatgtttccgatcactttgctcagtttctcgcctttgtttctcctttttgtcctgctcatcgccctgtctcttcgtcgtttctgtcatttgcctttctcttgcgccattaaaatccctcacaaaatgttcaaacgccgatcgcccatcattttttattaggattccgacggcgccaaaagtgtcgtcggggaaatttccaaaatttacgctgttcttttatgcacttggagcaatttttttgcataaatgtgaatatggggtttttgattttttgtttgagttcgggtcaggggtttgggtcatgtaaaagctgatgtcagattcgtcatcaacgaccccgaaaagtcatagaatatgttttatgacttttaaaattaagaaaatttctgaaatacttttaaaaaatcggattcgttcagtgttgcttttcagttctctgacttctgtgatgaactcatcaaatgactccacaggaggaagacccttcccatctcttctaatgcgtccgtccgtcggcggagttgccaatggcaacggaag

SEQ ID NO: 2799 - DNA, 3299 bp, Heterodera glycines
gaaaatgcaaaaaatatgaaaaatcgtaaatgagtctttctatggattttttgaggcgtagattccgaatataacatttattttgttctaattcaatcctaagcatcgaattcgatagacctggaaaatttgatgaaaaatcatagaaaaaatcatagataatggaaatctgagatcggattcatgatcagcgaactcatttaccccaagaaacataattttacatgaaatcgaattttttggatgaaaaatttgttgtggctttttgggacacttctcagacgacaaatttgaggggcggtgttgagcgccccccaaatatttggcgtttgtcgtaaaaaccaatcagaattttcgagacaaacgacaaacgcctaatttcagacgacaaacaacaaatttcaggagacatacgacaaaatttttaattctgattgatgataaacgacaaacggcgtatactgacgacaaatatatcgtttgtctctgtcgtttgtcgttcgtaattgtgattggccccagttcccttccaaataattattttttcgccttttttaatattattgaaaaggaaataattttaggtgctttatctatgtcaaatccttttaaaaatttttgtaaaaaaaggccaaagaaatagaaataacttgactatccacaatttttttttaattaacggttgtattggtgaatataaatgaatcataattcgaaaaaaataaaaattacttttaaaaatctttaaaaaagatttttttttctttttttaaaaattcattttgattttaacaaaatcaaaccccatgcctgatcattattatcaataaatcacagactttcttcgaccgctggtcctcaaacggtgtcaagtcgggcgccccgaagaaccgtgccggaggcagtgtccatttcccggcaactttctgctataatcctcagtttgcgtttgaaatcagcgaagaagacggaccagcggaagtgatgttggcattgtgccaaagagaagagggatgtgcatttgatggcagaccaaaaaatgccaaaaaattaatgaaaaatggtgaaaaaatgggcaatcggagaagagaaccttttgtggttatcggactgcacgtgatgaaagtggagctaaacagaaagcatcgcattcaccaggtgaaaagaaatgccattttaaagggaaggcaatggaaaacactgaccacttttaattgcataaattgctttttaattactaattgcattaattcccccctcccgtaggccattgagcccgtgtcgaccagtgactatcagtccgtccgttccgttcatttgcatatcgacggactttcgcccggccgttacatcgttctgccgaccacttacgcaccgcgagaagaggccgactttatgctgcgcatttactccccgagtcagctgagtcctgtggaacttcgcgacgatttgcctaccctttcggcactttcccttttgcggtgccgtccccaatttgttatcgctcgagtgcgaattatcgaggttcatctgctgaaactgatcactttcggaggtgtgcctttcttccatttaaatccatttgagagtccatagctcattcggttgggttttcccaatttcatttacaaaaaaattatgagacaccgtatcactgatacttacttaatccaactttgataattaggtgtaaaatctattagcaaataatttaattttttttccggtggcaccgatggactcaaatgaatgccttttgaatatttaaaattagcagccaacaccgaaaatagaataattttcgccttattttttctccctctttcacaatgttcagaatgcgatgtgttctgcgtgttctcctcttcccaagggagtgatcggtgccgcacatttcccgcaaaatttgtgccgggccgacccgtgaagttcaacgcgctctttgttttccatgcttttgcctcgcagcaatggcttctcaattttgaattgattgaactgagaaagcctttccaacgacaaaatcgccttttgggcgttggaaggttggctctaattagcaacaacgaatcaattgagatggaaatggaactgatcagaccaattgaaaagcgaaaggcaccgatcggaggagagggaaaagggcgagggaaagtcggagaagaaacaatcggaaaagcacggattgagatcagtgcttatgatgatccattttatatctgatcacccacaatatcaataacacagacgaataaatgttttttcaatttttgaattccaaaaatttaaacaaaacaaaaataaatgttataaaatcgtaattagagataattattaaaataaaatttattaataaaaaagaaattgcgtgaagtaatttaacggagtttgggaaaaagggaaaagcgaatcattcgtcggcagagaaagcgtttttactaagttacgctaagccaaaggaaaacagcggtaaaaaacgggaaaagggagaaaatgggagggaaaaggtcacacaaatcaccgccagagacgcgcggccctttttatgagggcgcgtgggacgacaaaacccgtttattagcgggacaaatcaaatcggtttcatggaagaagcatccgattgtgtcgcaattgaacggcagagattggccaagggggggggggggcactataaaagggagggccaaacggagcaaagcacacatcgatcagtgaacattcactcatcaaaggaacagcagcaagagcgcaggtgacagactcagcggaagcaccgcttaaccatccgttcagccgcttcacctccccccccccccattcggttcagacttcaacaatgacgaggtgtagtgtgttcgtgcttacccttttgggcgtcggaatggcccactctctgctgatgagcggcggttcggagtgagttggcgcggcacgcgttgcgcaattgcaggcgtaaacttacgcgtttcgctttagccttgctcccagcgccaaccgcgtgagccgtcaatgcggatgtggaggaggatgtggtggaggcggcggcggatgcggaggcggtggatgcggaggaggaggaggcggaggcagtattacgcttggagtcagctgcggtgggccaagcggaggaggtggcggcggtggatgcggaggaggtggcggaggaggttgcggtggaggatgcgggggtggcggtggatgtggcggaggatgcggagggggttgcggcggtggtggaggatgtggaggcggctgcggaggaggatgcggaggcggttgcggtggtggtggcggaggcg

SEQ ID NO: 2800 - DNA, 1002 bp, Heterodera glycines
gcggctgcggacgccgaaagcgtttggccttcttcagcgttctatggccaagcttgcctaaaatggggtaatgaatgcttcaaacattttatagaatatacaatcatagattcgttctgctcgcttttctgttctttaactcgtagttttagttttttgcctttgttattaattagattttatattccagtaattatggtaatataaccgtatttctttcctaccgtataacctaactcattttatttatctaatcgaatgccatattcttaatgtactataactttgatgtatactcattttcatttgacataataaaataaaacggcatatactgtaaatcagagatgggaacggaattccggaatttttgatgaaatttcagaaaatcataaaataaaatatttcaaattgtgcttcaaagattgactaattattagagaccgactaaaaaggcaccaaaaatcgcgaaaaaggcactataaaaatgcacgaaaatgcagaaaaaaaggcatttgcctcaaaagtcggtctctactaattatggatgaaaaacatgctgggattttcctaaaaaccgccaagggataggaaaacaaaaatgtaacaaatataaattcatatataaattggcttaaattcaatcaaattaatatcattcaattgctttctcttgtaaatttgatattcgaggtcgtcacggtcagacaaaaattaacgtgaccatttaaaaaatggcttaattaaacgagttgaagtttgtccgttgagacacgaaaacagacgaaatgacatttccgcaactctttcaccaactatttattctacataaacttaattttattatatattccaaataaatttcttgaaaagcagtaagacaaaatagttcaagcccaaaatttttcacagtataagagtttcttatcaaaacgctgtcgattatgcggacacaaataaaattgttgtgcaaaatattgagataacattttagaagtttag

SEQ ID NO: 2801 - DNA, 5655 bp, Heterodera glycines
taatgaatgcgtcaaacattttatagaatatactcttatagattcgttctgctcgcttttctgttctttaactcgtagttttagttttttgcctttgtttagttaattagattttatattccagtaattatggtaatataaccgtatttctttcctaccgtataacctaactcattttatttatctaatcgaatgctatattcttaatgtactataacttgatgtatactcattttcatttgacataataaaataaaacggcatatactgtaaatcagagatgggaacggaattccggaatttttgatgaaatttcagaaaatcataatataatatttcaaattgtgcttcaaagattgactaattattagagaccgactaaaaggcaccaaaaatcgcgaaaaaggcactataaaaatgcacgaaaatgcagaaaaaaaggcatttgcctcaaaagtcggtctctactaattatggatgaaaaacatgctgggattttcctaaaaaccgccaagggataggaaaacaaaaatgtaacaaatataaattcatatataaattggcttaaattcaatcaaattaatattccattgtatcattcaattgctctcttgtaaatttgatattcgaggtcgtcacggtcagacaaaaattaaagtgaccatttaaaaaatggcttaattaaacgagttgacgtttgtccgttgagacacgaaaacagacgaaatgacatttccgcaactctttcgccaactatttattctacataaacttaattttattatatattccaaataaacttcttataaagcagtaagacaaaatagttcaagcccaaaatttttcacagtataagagtttcttatcaaaacgctgtcgattatgcggacacaaataaagtttttgtgcaaaatattgagataacattttagaagtttagcgtcgaagtttaaacaatcaaagatcggtggagagccaattcttagaaataatccctcgcggcttccatcggctgagtgttgtagcggtcctaaacggctttgattaattgcccaattaattactcgtccgtccaatgatcacttttctgtaaatgatatgttcctcaatcacactgctgcactgtcccgattcgatctccgttttatgtgcgaattggacgtgcgaataacaggcggaacggctgtacgacgcgaaagatttgtgacagatggcgcactcgtggagagggagttggagatgactggggacaattaagcatggtaattacgtaattaagcaacaacaaatgatgtgcccaccgaacattgatgtgattgagtctgttcgtgattttgttccacaccatttccccgcacaatttgcacggcactttctcatctgtgccaacatagctgatgtgcttgaatttcgattacattgtaattttgtcgggattcatcctcggtttacccgctgttgttggttctgttggtggtgtccgccgttcgatggtcggactgtgcgcggttggcccaccatcgcatcacttcccgagtattggtgctgatgggacgaggaagacgggtcccccgcgcgacttggaactgaactcgaggaaaacaagcaaatgaaagcaatcgtctccccctttttgttgagtcgggattggtctctcgactcacaatgagtagtaattgacctttctcaccgaaatttttgtgcgtttttgccgtctccgttcgttccgctgctggaattctttgctgcgtttgatggtgcgtcatttccgcgagttcgtccgcccctttggaggcggcgtccatcatggccaacatcggatgcactgggccattgtccccgtcgcatccttcgtcttcctcctcttcatcttcctcctcttcctccatttgttcatcctcctgctgctggcggggaggggatgagaaacgttaggagagcgaaactcaagaaaagaggagggacggctgtgggttgtaagttgagttcgacgaacccaagaggaggggaacacgaattttgttttgttcgttcgttcacttctcccacctcattctccggttccaataagtccatctgctggaattcgctctcctcattcatttccatatgatccttctcataaactaaaagttgtgtaaattttcgtatgctaaaaagaggacataaaaaacaattaacgccattgccctccaaatttccctttttaatcccccggtgtttggtatttgatcattatcgaatgcgaatgatcagcagatgctttgtccaccgaccatctgtgctcttccgctgctcctccgtctcttcctccgccgcctcttccgtttttattgtgccaatgcctttctccgcctcctcctcatttctgtccgtgtttctctgttctgcgtttcgttccgtctttcgttgctgactttgtttcgcggtttgaactgacgacgaattggcgcttttcacttccgtacgattcttccgattctctgagcatataaaaatgtcttatcaatggcattgtttttcgctgttttccgaccattcgttggccattgttcgtgatggtttcgtagaacggcgcggacagtcgcgcacggatcggtgacgggcgcgcgtttgaggcgaccaaaattcgctgtgccgccgccgacattcgcagcggacggacaaaagtccatcgtctgttgctgggcaactgaaatggtcaatgaaatggagacgaacagcgcgaaataggccaattacgtgcagcctgaggcggtgggtttcgcatcgcatggattctctcctccttccgcccaaaacattcgtcgcgggccgcgtgaagcgcggcggaatacttttgaagagatgcaattaacaaatgagaaatgcctaatgggctgttgtgctgctcactttgtggtaattgctgaccaaatgtttggtgtcgcccgcgtggtgcagtcgcatgtgcttgtgaattcgcgtgttggacacttcgaagaagtctctgaaggattgacagggtcattagtttattaatccgttgtgttttcacttgttgcaaagtgtgcattggaacatcggcaggcgcaaatgtctgatcggagggaaacaatcgaattaatcaattaatgggaggggagtgctctttgatcatatgatcaatgaaacacctcgtgttcgtgtggtggttgaggcagccgccctgtgcattgatcatttccttgcactttcggcattggatccgatcgatcactttttcacgcttcaactccccttggaactgacaaatgaacaaaaactgttttttaaaaacactgaaagcatttcttttcttaattttaccaaggaaaaactctgcgcctggccagccgagtccctgccgatttggtactgttgcgcagaaattccttggtgaagcaaagcgtagggcgaaaagcgatttggacgaagtgagtagccctgagtagcaatgggacgagtattagacttacaattagtgtgattaattacgccatttgtggccaagtcggcgcgtctgccaaacgcggcatgctgcggctgctgctgctgggcgtgtgtcgccgcgcccacttgggaaaccgccgcggccgccgccttcagaatttcctgcacatcagccttaagcgactatcactaataaataaggtgatcattcgtcaattagcccgatcagcagttgtctaatgcccctttatttgcctgttgtccatccatctcctcaattaatccgtcgtcggcccggccgtcccccgccgcatttgccgtgttcattagtgccgcaacggtcagttccgcgccctctctgatttccaatgttccgccgtatgcgttgggacggagccgtccgctgcccacagctaattcagaacacaaaatgcattatcattacaattattctcaccgccgccgacgcctgcctccgctccctcgcgtcgtattttctgcagacatgccgcttggatttgctcagtcagcgaagctggcgattcgtctacgatggcaccgttccgttcgaaaccgacgcctgaggggtcaaatggcaaaacaaagtcaatgggtattcaataaaaaaagcaaaggtggtcattagggcgggataattaaaaatggttccgctgattagtcgcaattgcctcatttcgcccattcggcctccatttcccccaattgcttctcaccctcgtcttttcgctgcgattggtcattcgtttgttttgtgccgtcctccgcatttctttcttccgccgacaattcgtccaaatcgttaatttctctgaattttaaaaaccaaattattggaaatccttccgccggtttgccactttttgatggttgcaaatttattcgccgaacttttgacagtcgaaaaaccgtcattttgacccgaagcattggtggcgttcgactgctgctgcaattgttggtttctctgcataaataataatcaaagccttttttattgaatttcattttaataagtgaattaaatgcagtaattagtttaatttattaatttattttttgtgcgcaccgctccgccgcggctgagcaatgcgacgttttgctgctgcggtcggagcgacgaaaggcgaatggccggcgactgtccgccgtccgttttcaaagcggacaaaaactcgcgcactttgcgccgcttcgcctttacttcgggagtgatccgacaacgaaactgaacgaagatgaaattgatcagtaaagaaagaagagacaagcgaatgatcagaacggactgagtaactgcgattgccgtggtcagtttcgttgtgttttacgaccgcaaattcggtggggaatttcgcgaattggcactgttcgcattcgtaggggagaacgccgaagtgatcagccgccaaatgcgcttcgaactgatcaaacgagggaaattgctaaaaaggagcagagaaattactccttcactggtctttctatttttttcattaaaaccggattaggcaaaatataatgagaagggcgcgaatttttagtgaaaaagtaatgaaaaaagtgagcaattttttttaatttataaaaatttcaacaaaatttcaaaagaaaattgtcccaacttgggctgggaatttaagtcaaatgacttttttttttttttttgctgactccaaatggccttaaaatgacttaaaaagtgttctaaactctgtttgaagcttctaacatgcattttttgtgacttttttttttacttttacactttttgggctttttataacttttttgagtttttgcgactttttttcgtgattttttttgtctttttgaggcaaattgaattttagcgaagaaaatgccgaaaaatacaaagaaaattccgaaaaataaaaaggcaatgaaacctggatgaattttttcttaattgttggaagaatctcttttttatccctattttaggtgcatatttataaaattaagtgcctgaaaatatgatcaaaatgttattctataaattattaaaaatgggattttttttaacttttgcttaattattcaggacttttttgcattttatacgtgcttttggttttttttttactttttggctattttttcgtgactttttggcgatttttatgactttttgaagatttttagtgacttaaattcccagcccta

SEQ ID NO: 2802 - DNA, 6410 bp, Heterodera glycines
  unsure (1)..(6410): unsure at all n locations
tattttcatttnttttaccccattatttttntcatttagtcacttctccacacgaacttttcattntgatccttgccattgaaaaaaaatttaatgccaaggttttcatttacctactcagccccactgatccattagaggtgaaattacttaaaactccattaagggtggacggggccggggaaaaaagaccataaaactacgagaggaaatcgacccgaattctgtactcatatttcacatttcgctctcttgataataaatgttcattttataggcttttctttattataaaatttaatttttgcaattcgtttaataaatttcctctgtttctttattaaatacatattcttttcccaattagtaaatttgcttcggctaatttctcaattactgcaattttttcaattttaaattttactctgctgagcttttgactaatatttcccaattttcttagcctttcttttatcataaaatttacgaataatgccacttaaaaattgttgatttaaagaaaactttatttcctattcatcgcaatgatcattcatcagtagtagagaccggacgggatcgggatcccgcgggatttcttcgggatcccgcggggttaaattcgggatcccgacctcgggatccgtcccgagcgattttttaaattcaccgggattggtcgggatcgggattcagtcgggatcccgactcgggatccctccgaccccagttgtccggtctctaatcagtagcgaattaaaaaaaattattttttttaaattttcaatttttacccttatttttgggtttcattttttatttttccatactttacagattgtcgatacaatcggtgcaaatttatttaagaaataaatttttaacttaaattaaatacccaccaatccaaattttaatggttgaattaattttaatgcattttctactggtttatgatggccaagaaaacggtcagaaaatggagagagtgagggaggtgaattcggtagtagaaaaaatccaaacccaagaaattttttggaaaattaaaaattaattattaaaaatcagggctttcaattgagaatttaaaaatctcatttcatggtctcttttagcatttttaagctgaattttatagcagtttttaaccaaacgaaacttttccattttttagctcaaattttcaaaaaatctaaaggatttgaaattttgtttcaccattagtaaatttagttcgacaaattcacaattcaattataatttttttcatttttaaattttgacaaatatttccccattttacccgccccgcccgacccatgccctacgggcaaaagtgaatggggcagcgaaccgccgcaaaaatgacgcaaaatatattatagaatttaaaaaaccggggggctttttatgaaatgatattaaatcattgcgtcgcccaaagcactggaatagcaaaaaccagtagaaaatgcattaaaattacaaaattcaaccattaaaatttggattggtgggtattcaatttaaactaattttctaaaaataaatttgcccgattgttccgccaggttgaaaaaagtagggaaaaagaacaaaaaaacccccaaaaacaattgtaaattgaaaaaaaaattgtaattcataattgaatgttcaatgcgatgagaaaggaaataaatttttcctttaaatcaccaatttttaattggcattattcatgaatttttgcattaaaaatgtgaatattagtcaaaagtgagggaattggcaaattaatgacttggatattgatcaggaattggccaactcacaaatcagcaaaaaagcaatggccaaagagtcgctcacgaaaataattggacataattagaagaaacctatcaaaattcaaatttttggattattaagcatcagtttttgaagtttttctctttttttcgttttttcgttttttactgcttttttgttaaaaaatttctcgaaaattttaaaaaggatgaaaataatgatgaaatataaaaataattaagcaattatttattataaaaagtcaaaaatatgcatcctaatgaagaatagtggtggcgttaaaatgatcaattgtcgagctaaaaacatgtttttcatgcttttctcatcaaaagaaaagccgcagaaaatagcagccaaattataatttatttaattaattgaacgttttaatttttgtaaaatttagttttgctcgaacaaaatgtaataaaaaaaagattgaaatttaactaccaatttggtcgctctacataaaacaagccgatatttttcattgaaaggcacagaaaaaatattacaaattgcatttgatttaatgagaaaacatttaaaataatgaggcgaaaccaaatttgaaaatgtcatatgctgccgataaaaaattatatttaatgaaattaattaatttttcaaattgagttgaaaagcatttgaacagagtgagtttttgaaccattcatccatcgctaaagtacaagaacaattattattatttctggggcaattaaattaaacattttcggatatttttcaataaactgagtaatatgtaattttcgcgatcggcaaaacacgcgaagccaaaattagcataaccccgtgccgaggcgttgcttaattccgcctccaaaaatgtttttgaattattaaaacaaaaatattattattttattttacttattaattattaattttttataaaatttttaactcctgcacaaaattattccaaatgtattctttttgctgaaaaaggtttttacaatttgattgaacggttgggcgagtgaaaatgaaaaacatatgggcgttcaaattagccaattagatcgctttacaatttcgtttaaaaatacaaaataaaatttccaatgccgctggcgattaacaataaattttaaaaaatatgggagttaataaccaatttgggtcgctttacaatttttgtttaaaaataaaaatgatttttagtaaaactagtcgcaaattactaaatgattgtggttgaatgaactgtataaattgcatataaaaagaggcaattgggtcattaaaaacatcaacaattaaatttttattaaataattaataagcatttcgaattttatcaaattaaaattttaccacccctaattttctctattagcataaaaatttcctttaaaatttttgggtaagacataaaaagtcgcttttccgtcacttatagagataaatttttgaagacaaaacaatattttgctatttttgggctaaaataaaaaataatttttttaaatttaattcaaaatagcgatcagttgtcgtttttttccatttaacttgggcatttttatagataaattagaaaatgcaattttttggtgggctcgtttttttcttcgtgatttttcatgccaatgggaacccaattgtgcttaccacaaccttggccaaggccctaaaggccacgctcacggtgggagcggtcgcagcttataccggatggagggctttaacaaaaacgaacggaattttggacggatttggtgaacagatgaaggaaaaggtgagcagattttcaagccaaaaatgtttagcatttaaccaattcttcagcctcatctgtttgcgccattttttcccctaatttttgcgatcgccggaggggaagtcttagtggagcaagacaaattcgaaatggactacatttttgatttatttgaaaggatgacagaacgcgatcagctcgacaaaatctgctttgatggggccgagggagaaaaaaatgtgatcgaaaaagctgaagggaatctaccgcttttcattttctacgctgcgatgaatgacaaaaaattagatgtttatttatgtgattgaataagcagttttttattttgttcatttattaataaattgaataaaaaataatttaataaattttgaaaataaaattattattttttaaacccaacaaataaatttgaattgatttaaaataatttaaaaaattaatttaattagtaataaatttttgaatggatgaagcatattccgaaatttgaaaatttacttaaaattttgtagcttcattcattaaaatggcataatggtaagaaattcgtcttttctcatcaaaataaggttccgggaaaaatagttttattggcttaatttctcggtaaaaatcatttctcgcacaatccctaccatgggcaggggtctggcggggcgggggtttgtcattttaaataaatttctgctgaatgcaattgtcccacttctgctgttgaagttgcactcaatttgtaatttatgagaaaaacagaaattaaatccggaaatggcgagaaagctaatggcaaaatgtaaaatagaaaataaaacttatattaaactaaatttttataaaaggtgataagatttatgcatttttattgaattgatcagaccaaacatctgctgatcattatggtcatttatcattgtatgtgatcatcatcatcattaataagcgattagagcagcttcatttgttgcaataaaagcaaatacttgtgacaaatttcattattccatgaattgctttttttagcctattgtttttgtttgtttagcccacaatcggaggcgccgccagcagtgcccgctcctgcggttggcaccggcggtgacacttttttccgcttgcgtaccatttttgtgctcggccgtccggcggcggacgacgcagcgcaaatgaacgcgttggaaagcgaggcggccgcgcatggtgacttattggtcggcgactttatggacacctatttcaacaacacgttgaaggtggttttagactggcgcgaaagaccggcgaatgcgacgccaatttaggcgctaaattcaaattgtctctctttctcatcccacctctctattcggcccactatctctttttactaatccaatctcaaaagcacttttaaatattttttctaaatttataaaaaattcctccccaaaaagtttgtccattctgtgcgctttgctcgtcactattgtgcgctgcccaattcggtgccttttgtgcttttgttggacgacgactttctgttgttcccgtggaatttaatcaccgaattgcaaaagtgccacaaaaataaataaacaattattttggcatttttatttttttaaattgtttttggcatgtcccaaatgaacgcctttacatgggctggcgctttgacacttcgccattccgttcacgactgttcaaatggagggtcggagtcaataatcaactaacttattaaataaatttgaatacagtataccaaaaaattgaaccctaaaaaacgtttgaaatttcaatttaattacaaagataaaataaagcaggctcgtcaccagtagaagccggaatcttgaaaaatacagaaaaaggatttgaaaaagctggattgaaaagcagcggaaaaaagtcctaaatttctgagaaaaactgaaatttaaataaattcgggctctaattaattaattaattaatcttcaattaaggtgtcgctggacgagtttccattcgccgcctttcccccgtacatcgccgctggcgcagtgctcttaacgggccaaacaattgccgaattttacgcagccattccgcacgtgcgactgtttcgcctcgacgacatttttgcgggtgggaaatttttcgtcaatagtttttgaaaacaatttttttaaattttacccattttattccgtttttatttttttgatttattatttcgacatcccatacaattgttctattgctgatttccctttccttttaggcattctctcccatttgttggccattacgcctcaacacaatgccaattttgccttctatcgccaatcatttgccgacgattcattggcattggcatcttcagaaacactcaccacattgatcgctgtgcatgactatttgcccgaagaaatgcgcgagacgtacggaaaggcagtgaaacagcaaaatcagcagaaattgaagctgctctgaccatttatttaggtgttagggcaactcgtacaatttttaatggatttggccataacttttttaggtaaacaaaattattcaaacttgatatcattcgaatgctctccaagtttagaagcgatcattaagtagaagctgagagatttcctttgtacgagtttccattgacccatttattatgattattacatacaataataaatgattagcacgaatttgccaattcgcctccaagtcgttgggagtgccgcttaagtcaaagcaattntgacctanaccatttgtcatatggcttcataacacttaaaatcgcatcagtaagaaatttagagaaataaataanatgctggaacattgattgatg

SEQ ID NO: 2803 - DNA, 2462 bp, Heterodera glycines
tttttagcaatttatggtgaatatttggcattaattgcatccaattgtcctctttaataaaattgtgtggagtcatatctaaaatttggccaaaaatctccttttttaaattgcttaaaaatagaaaattccattattaaaagctgggttttcaaattttagagaatgctcaaatttgcataaaatgcttaaaaaatgaaaggttgcgttgtccatttgtccgtttttttctcttttttgggacagacactcgggatcaaattcaaaattaaggcctttctcattcttcgttaattccattgggactaaattaatggcatttccttccgttcgaattttccgctgctttttgtcataacacttaaaatcacatcagtaaaaaattatcagtaaaaaattaaaaggctggaacattgcaaaaaataaaaattttttggatcttttttaacattctttgagctaaatttgagttgttttctgagtgacacacaaataatttgtgaagaaaaaataaagggataagttgaaaagaacaattcatttgtgtgcgtgtagaaagcgcagtcggttaagtggctgtcccagtgctaagataaaaggggttcgaacccatcagactgcaggccaattttttttccactttttgccaattttttcggttattgtaagaagaaagtaattttttttttaaatattcacaaagataaaaatatttattgagtttttgaaaaaagttttagatagctcttcttaaaaatgttaaaaacgtataaaaagggcttttgatcaggttgggacgagactgcgacccgcgcgattcgcgcatttttaatggataatttcactctccaaaagtgccaatcttataatagaggttaaattcgaatccacaaaattaatttgctaactccctcaggcaaaataaaaaaagaaacgtttttcaacggctgacaacagtggaagttgctctattctttgttctgccttcctttagaacaccgttttccctaaattgtgatttcaattaattcccaatgttaatttaaaggaaaaaacagcttatgttcctactcatcgcaatgaacattcagtagcgaattaaacaaaagattttttcaatttttaccatcatttttgggttttcctttttttctttttccaactttttcaacttgtcgttacaaatggggcaaatttattattataaaattaatttttaacttaaattgaataccaaccaagggcatttccacatgtttaattaaaggagtttttttgctaattttaaacaaattgcaaattacaagtaatgaattttaaaacattttgcctttttttcttaaatttggtattttcattttttttacccattatttttttcatttagtcacttctccactgaacttttcattttgatcattgccattgaaaaaaatttaatggcaaggttttcatttacctactcagcacactgatcattagaggtgaaattactaaaactcattaagggtggacggggcaggggaaaaagagcataaaactacgagaggaaatcgacccgaattctgtactcaaatttcacatttcgctctcttgataataaatgttcattttataggcttttctttattataaaatttaatttttgcaattcgtttaataaatttcctctgtttctttattaaatacatattcttttcccaattaataaatttgcttcggctaatttctcaattacagcaattttttcaattttaaattttactctgctgagcttttgactaatatttcccaattttcttagcctttcttttatcataaaatttacgaataatgccacttaaaaattgttgatttaaagaaaactttatttcctattcatcgcaatgatcattcatcagtagcgaattaaaaaaaatgattttttttttaattttcaatttttacccttatttttgggtttcatttaaattaaatacccaccaatccaaattttaatggttgatttttttaattttaatgcattttctactggtttatgatggccaagaaaacggtcagaaaatggagagagtgagggaggtgaattcgatagtagaaaaaatccaaacccaagaaattttttggaaaattaaaaattaattattaaaaatcagggctttcaattgaaaatttcaaaatctcatttcatggtctcttttagcatttttaagctgaattttatagcagtttttaaccaaacgaaacttttccattttttagctcaaattttcaaaaaatctaaaggatttgaaattttgtttcgccattagtaaatttagttcgacaaattcacaattcaattataatttttttcatttttaaattttgacaaatatgtccccattttacgcgcccccacccgagcgatgccctacggacaaaagggaatggggcagggaaccgacacaaaaacgacgcaa

SEQ ID NO: 2804 - DNA, 1644 bp, Heterodera glycines
taagggcgcgcgctatggagcaggcttattactgcgctttaaaggaaggaaattggaaaccaattgggtggtgaaataactcgaaaattcgcgcgtaagcagtttggaaaatacggacgacagagttgcagcttggaaaatatccaggttgccctgggagcagtttaacgtcgtgctcaggacggacctcgcacgtaaagttacagcttggaaatacggacgacagagttgcagcttggaaaatatccaggttgccctgggagcagtttaacgtcgtgctcaggacggacctcacacgtaaagttacagcttggaaaaaacgtcgcacgtaaagttacagtttgtgtctgtttttttcgcttgaccgtctcttagcctcaaacgagttgcccggcaaccaggatcgaggacctggacggaggaaaacagacaaaccacggtgccatataaccctcaccaggacggaaacgtccaggatcattgggtggtggaaagtcaactgctccatcacgttgtcgcatcgtgagcagggtcggcagagtcgacaactgcttccgcttcggcaacagcagcagcagcagcagcagggtggtcttgcgcttcggcgagttctatggggtttaaattttcactttacgattttttgatcaagtaatttaccgatgtcgaggtcgaacgagtcatcctcgtaccgagcaaaacccgcctctacgtcgtacacctgtctgcgggcgaccgcagacagaaccggtggtggtggtgccgatgttgatggcagttctatgtaatccaattgcaaaactgttaatcataaaagcgcaaaccgaagtcgtcgttattaaacgaatcgtcgcgaaatctggcaaagccggattccacgtcgtattcgacacgccggccaccgataaatgcacgatgccgaggcggggcttcggcaacgaaaacaacggacgccgacgatgaagcagaatccgaagcagcgtgctgcgacgggtgagcagccaccggggacagcagcacggcactatgaagcggaggccaaatggtgccgtcgtcgcgtgccggtgttgagcacgggccgcccggtgcttgactcgcccgtaggccgctgaccactacttcgtcatcctaatacgaaaaaataacagtgctccagaaatcgactgaatctaccgcattcaacgtttccgagccggacggttcagcaacctccgctgcgaccgcttcgaccatctcgcccaaaagcgcatcaacatccgcggccacctccgcggaagtcgaaggcagcgacacgcccgccgggtcgatggagctgacgcgggaagcagaaagaaggcaaaagaaaacaataataaaggagaacatttaaatagctaaaaaatgaaaaattgttttttggaaaaccattatattcacaaaaaaaatcagcagtaggaaattcgcgtgcaatcatcaagaaaattcatgacagacacgaatttgcagctttcaaaatatggacagagttggaaaacacagacagacaagtttcagctttgaaaatatacaggtttccctggaatcagtttaacgtcgcgctcaggatggaacatcagcttcctagctctgagttcacttgcgacgcacacgctcaagcgcgcatca

SEQ ID NO: 2805 - DNA, 2023 bp, Heterodera glycines
ctcggaatcgtaatgtccatgcgatagctgttcgtaagagcgaaagtgcaacgctcggcagcgtaatgtccatacgatgcctgttcgtaagagcaaatggacaacgctcggaagcgtaagtccatacgatgcctgttcctaagagcagcagcgtaatgtctatgcgatgactgctcgtaagagcaaaaggacaacgctcggcactcggcagcgtaagtccatacgatagctgttcgtaagagcgaaagtgcaacgctcggcagcgtaatgtctatgttatgcctgttcgtaagagaaaaaggacaacgctcggaagcgtaagtccatacgatagctgttcgtaagagcgaaagtacaacactcggaatctcaatgtccatacgatgcctgttcgtaagagcaaaaggacaacgctcggcagcgtaatgtctatacgatgcctgttcgtaagagcaaatggacaacgctcggaagcgtaagtccatacgatgcctgttcgtaagagcaaatggacaacgctcggcagcgtaatgtccatacgatgcctgttcgtaagatcaaaagtgcaacacttggaatcgtaatgtccatgcgatagctgttcgtaagagcgaaagtgcaacgctcggcaaaaaaaagcaaagtcaaagtgaaaaccttaaaaatcacaggtgcgtggacccgggcaaaaaattgccttaagaccaacatgccttcgcgaagaaaagtttatgtcttgtgttttaccagccacgcaccacgacactcccttaacttcagcatgagggtcacgggacatactgtgtgcaggcaggagctcccttgcctgagccggccgctgccagtccacctcgctcggctcccttgccttcgccggccgctgctcgctcggctcccttgcctgcgccggccgctgccagcactcaacacaagggagccatcgctgccttcgcgggccgctgccagtccacctcgctcggctcccttgcctgcgccggccgctgccagtccacctcgctcggctcccttgcctgcgccggccgctgccagtccacctcgctcggctcccttgcctgagccgtccgctgccagcactcagcccaagggagccatcgctgccttcgccggccgctgccagtccacctcgctcggctcccttgcctgcgccggccgctgccagtccacctcgctcggctcccttgcctgcgccggccgctgccagtccacctcgctcggctcccttgcctgcgccggccgctgccagtccacctcgctcggctcccttgcctgagccggccgctgtcggctcccttgcctgcgccgatagctcccatcgccgtccgctgccagtccacctcgctcggctcccttgcctgagccgtaccatttcaacacgcgcgcgcgcgcgcgtagaaaataaattgagctcattaccgtttcaacacgcgcgcgcgcgcgtagaaaataaattgagccaataggcaaaaaataggcttaaaaatgagatggttacgggtgatgatgggcgtggaaaggggaatgggtatggtggatggtaaaaataagatgggtgggggaggggcgtggtggtagtgttcggtatttaaaaggctttttgaagtggttgggcatggaaatttgggaaatctaattcattcaatcacaggtgcgtggacccgggcaaaatcttgccttaagaccaacatgccttcgcgaagaaaagtttgtgtcttgtgttttaccagccacgcaccacgacactcccttaacttcagcatgagggtcacgggacatactgtgaaccgtatgtaacaatgtatcagcaccagcgccacagaccccatcgaacgggcctggcgtccgcaagcggcggacgggcatgtggtggtgcctcgctagttcaacattgagtccatccataacactcaagcatacgctttcgcctgctgcgcagtcagggtactcacatacgagcgaatggtgaagattttctttcgcaccacgaacgtgtctcctccgccgg

SEQ ID NO: 2806 - DNA, 2800 bp, Heterodera glycines
  unsure (1)..(2800): unsure at all n locations
cgcgtcagtgatttgtttttggatctgttgagctgacaagaataaggggttccccacatgtgaatgtgaattggatagacaggtctgtttagaaagtgccgcgagcaatgttcttccgttggatttggtatgccgcccagcgctgcacaagtgaaagccaactggtagtctgcttgtgtggtaatgggatggtggcggatcgccttgctttggttggtttgctgtccggcggaggagacatgttcgtggtgcgaaagaaaagtgcgtccattcgctcgtacgtgagtacctgactgcgcagcaggcgaaagcgtatgcttgagtgttatggatggactcaatgttgaactagcgaggcaccaccacatgccccgtctggcgcttgcagacggtcagacccgttcgatgtggtctgacgctggtaatgatgcatttttttgatcctatattgtatcttattgtgcgaactgcagaaagaaatcttaacatcctttgtgttctgtgtaggtagcttgcgaggccgtcgcgggttatttgcgcccaacgcagaggatgtctctctatgatgaactagcgtgccaccaccaaatgcccgtccgccgcttgctgacgacagacccgttcgattgggtctgtgcgctggtaatgattcatggagttattggtgggttggtagtgcatggtaacagtgaaaggcgctaacgcgtcagtgatttgtttttggaatctgttgagcttgacaagaataagggttccccacatgtgaatgtgaattggatagacaggtctgtttagaaagtgccgcgagcaatgttcttccgttggatttggtatgccgcccagcgctgcacaagtgaaagccaactggtagtctgcttgtgtggtaatgggatggtggcggatcgccttgctttggtgggtttgctgtccggcggaggagacatgttcgtggtgcgaaagaaaagtgcgtccattcgctcgtacgtgagtacctgactgcgcagcaggcgaaagcgtatgcttgagtgttatggatggactcaatgttgaactagcgaggcaccaccacatgccccgtctggcgcttgcagacggtcagacccgttcgatgtggtctgacgctggtaatgatgcattttttgatcctatattgtatcttattgtgcgaactgcagaaagaaatcttaacatcctttgtgttctgtgtaggtagcttgcgaggccgtcgcgggttatttgcgcccaacgcagaggatgtgtctctatgatgaactagcgtgccaccaccaaatgcccgtccgccgcttgctgacgacagacccgttcgattgggtctgtgcgctggtaatgattcatggagttattggtgggttggtagtgcatggtaacggtgaaaggcgctaacgcgtcagtgatttgtttttggaatctgttgagcttgacaagaataagggttccccacatgtgaatgtgaattggatagacaggtctgtttagaaagtgccgcgagcaatgttcttccgttggatttggtatgccgcccagcgctgcacaagtgaaagccaactggtagtctgcttgtgtggtaatgggatggtggcggatcgccttgctttggttggtttgctgtccggcggaggagacatgttcgtggtgcgaaagaaaagtgcgtccattcgctcgtacgtgagtacctgactgcgcagcaggcgaaagcgtatgcttgagtgttatggatggactcaatgttgaactagcgaggcaccaccacatgccccgtctggcgcttgcagacggtcagacccgttcgatgtggtctgacgctggtaatgatgcatttttttgatcctatattgtatcttattgtgcgaactgcagaaagaaatcttaacatcctttgtgttctgtgtaggtagcttgcgaggccgtcgcgggttatttgcgcccaacgcagaggatgtgtctctatcatgaactagcgtgccaccaccaaatgcccgtccgctgcttgctgacgacagacccgttcgattgggtctgtgcgctagtgtgtccagggcgggtgggctcggagaaattcctttatatgggttggtaagcgagacttgcttgtcgttgtcactattctgttatggcagatggatggcacgtttatcaaactgttcaaggcaaaagtagacgagtactcactctcctgaccccaatatactgagcctactggagcacctggcgagaaccctaatagggccatttacctgggggttaagcttggattctggtacagtggattgggtgttgtgacactcggagttggtatactgccctatgctgcacatgtagaagccaagtggtaaggctgctttgtggcaatgggagatgccgcctcgattccagtccccgcctcgggactcaaaagaggtggccagccgtgccggtccccgcctcgggactcaaaagatgcaggtggccagccgtgccggtccccgcctcgggactcaaaagatgcaggtggccagccgtgccggtccccgcctcgggactcaaaagatgcaggtggctagcaagagccggtccccgcctcaggactcaaaactctgagcacanttgaacggtgatggctgctgctggggtgccacctttgtcgtggcctcagtttctccagcgtttggcagctgtcgaaatgaataaaacatgcagctcgtctgtgtgttaaagaaatttggcgagttaattgacttgtgtaaatgtggcctaaggcacaaatgctgtggggaactcagcactatggatcctgtgattg

SEQ ID NO: 2807 - DNA, 6173 bp, Heterodera glycines
ctctctctctaccattaacgtcattatctcttctaattcatctccccgccctaggcaatgtcgccagtgtccaacgattgtttattcataaaaaataaaaaagtcatcagaagggcgaaaaccacttactctgacgactattccggtaaatgtgtcgtagagtaagtgacaaaatatatggatgatcacatgaattaaaaaaagacaaaaatatgtgaaaataaataataaataaattgaggtcaaagtcaaatgaggtcgaaataccaaatcacttagaaatttgttacattctagctttcccggtcttacatattaccctagtgaactttaagttttattttaaattgatttaaagaatttgtttttattagttctttatctagttgattccacaattttgttaccctcccagcaaagggaatgaattttttgcccagtttgtattttgtgttaaatctataaaaggggatgttaaagcgtgctgatggattaaaaatagtttcagatctgttcggccataaacaattttatgcgccatgaacagatcaaacagctttcgccttttctcaagtttctgatgaaggggctgaacatcagtttgtcaacggacgacccacttatgttgcacattacaaaagtaaaaattgcttcaacgagattttgaataatgaacttgttcttttaataaattttcaggaacctctgttggaggagtacagcaatgcccgtattctatggaagttgagttcgtgtgacatgtgcgagttggccaggaacaggtgggcgagttcacatggcaaaccgggggtcatggcagttcgtacaatgggactttcgtacaatgttccaattgcggatttcgtacaaaaaatatataaagtcgattttttctttagaaactcatttaacgacttgtttttattgccacttttgtgaatgtttgaaaaattaacacaataaattgtatttcctttcctaaaagcaagtatttaagttatgaaataattgtcgaaaactttcgttgaccaagttcagttgagtgagcaaatcctccgaaaaagcccccgaatgaattattattgtttgcgttattaatattgttattttggatactcatttagctcattacctatttataatttgcttatttttgtcattttgatgaaaagtatgtgtcgctgtcactatcacttatttttttaaatttaatattgtacgaaacgtcaaattaaaacgttgtacgaaacccgattgtacgaaacgcatttgtacgaactgccattgtacgaactgctattgacccggcaaaccgctttcgattgtactgattccccaataaatttcagcgttctccagtcgggatttgaggtggggatgaccattctctccttttgtacaatttgtttttctcatttgtcaggaccggaccaaaatgtactggttgggctccaactacaaggaggagggcgtattcggcaacgacatgacgcggtaatttactccgaattattttgaattaattatctcgatgggaccgattttagcaaacatatttgatcaattttcagcactaatgtgcccgacattcgcgtctcattccgtcacgaggcgttggtcagcgaactgtacaatttgttcaaggcactgatgctgtgaatgaaaagcgggtgaaggaggacgacgatttgttttgttttcgttttttccaatttcaaattgcccaaatgacgagaagaaaagaagcggcacacaatacaatacaaaatagttaattatccattaattcgatcgggttacatttttgttttattttacgggattgtttcacttttcatttcttatttccaaacaatttttcttaatttgtaaattctttattatttatattaatttttcacttttaattattataattggctaaagcattgtgaatgaattgcttcgtatttgcctggggttttctatttgaaatttgccaatgcttttaattgctctcatttgaggtcattagataatcggttcaaaggttttaatggaagaaaattcaaaaaatgaaacccaaaagaaaagtggcggcacatttaaacaacagccgcaacaaaacatacaacagcaaaggcccaccgaggcaatgcttcgcgtgtcatttttggaacaggcggcgacactgttggccaacaacgaggaggacgaggggccaagcagttcaagcggaagaagttgtagcacaaccggcggacaaacggaggtgccaaacactgccggacatggcacgtcgaacttgctgagtcggctgttgttgcgggagttgcgcgagtgcgcattcgttgaccaattgcgaatgcacagggactttaaacgcagcaattgcaaaaggcacagtcaaaagcatcgcagtttaataactgtgctcttttccggggtcaatgaactgatcaaattgttcaaggcagtgaaaaccgagtgaaagaggacggctgatgttatttctgttcttttcaattgaaatttaaattgttttgcaagtgcaaattgtggttaaatttttaggatccgatattatttggcacctttttcaaatttaaaatttgtctaattctttaaataaaacctaccttttttcttagtattttagttttcgcatcgaccgatcattgggacaaaatttgcttttttcattaggcaaagaccaaatgccggtggtgaatgtgtactcgacttcggtgaccagcgacaacatttcgcgcaacgatcttttgtcatgggtcaacgactgtctccaagtgagaaacattgacatttgaaatgcgacggcaaattcgaattgagaggcctccgtttgccatttcagtccagcctgaccaaaatcgaagagatggccacgggcgcggcctattgccaactgacggactttctcttcccgacccaagtgccgctcaaaaaagtgaaatggaacagccgatcggacgtcgattgggtgcacaattggcgcgtgttgcagcaatcgtggaaaaccatcggaaatagttttagcgattttgaggatatataacatgcgtcggttcgacttcattccatgatttttagacttagctcgttaagagctttcgaatgacaccaaatttgttcaaaatttttaaaaaaatggattttgactgattttaagctaattttcgtgatttaaaccggttcaaaaaacggtttaattttccaaaatggatgtcatatcgatcttcagcgacctcgaaaacccctaaaaatgtattttctttgtaatttatcacaaaaccgaaaagtaccgacaatacgttttatatatttataggtttgcaattcaatttgtatacattttttgtttgtaatcttgactcaaacttgtaaattttttctggcaatttttagatttttttatcattgatggagcaagaaataagtgaaatttctcaacagaaaacggcgaagaagacagaaacagtggcacaaaatgcattggagctagcctctccgcgacacttcgaaatgcacactttccgtgatgcaatcgacgtcaattatcaacggatggtactgaaggattttcgaaaaaaaattgccattgatcggaaaataagcattttttgtgttcctcccttttcagtgtctgaacggcgaagaactgtccggagtgccgttggacgacttgcgttgcgcttgcgcagtgagtacatggagcgcatcgggtcgcacttccccaaaaccacgtgcaattttctcaacggtgaatctagaagctaattaaaaaaacattttgggaaaatttatttcgttttagggaaatatcctggcggattgcatgcggagaggcgaaagggcggcgcgcagccatgtaagtgcttggattaggatataatcttttgaagtaattatacttatgaaccaatcctgaagggaaggtcgccttgatttttttatccgtccctgactcgtaattggtcaattattgtatctatttgacttttttagttactctttcaacagccacaatgtcaccaccatcggcttcctcggaccattggggacagtgttccgcaccgcgacttttacaacattcgcaaggtggacggacacgcacatccacggtgagtgatggtcatttcaataaaaaataaattcaattaacaatttgagaccctcacaaaaatacaaaacttcaatttgactatttattgaattactttgcttattcttttctttttttctgctaaattcattaattttttcgcttttagccgcagcggcgatgactgaccagtgcgtttttggctttatttacttagtttcaattctctcttatttcctttcatcaaaaagaaaatgcgcaccgatgctgatgaagttgtgcaggagaaggtacacaaataaataaataaaattattttaaagaattgtgccaataaattttattataacggtcatcatggcccagctgttcgacaaacttgacgtcggcccgcacgacctgtccgtggataggctcgaagtcagagcggatgacacgtaaacggcaaaattttgttgtctattttacaatttcaattttcagattccaccgcttcgacttggcacggtgggccattggacacgatgtgagtgaataaatttcaaaaaatttgataagtgctaatttgtgattgatcgaaatgagatttctgatcaattggtcattcatttaatttgtttttcccaggtttggtccccaaatgcccgttggataatccaagtgccgcgtctcttcgacatttaccgtgccaatgtgagcaaataccgtagcacttctctgatcacattcacatttttccattttcagaaaattttgaaaacttttgacgactttctcgacaacctcttcactccgctgtttgaggtattttctccaaaaagtaaatttttaaaaaactggcattttcaggtcaccaatgaccccaacactcaccctgaacttcaccgattcctcaaagtgatcgaaatgcaaaaataccataaaacactcaaatttcagcatgtttccgggattgattcagtcgacgacgagtccaagccggaaaatgtggcatttacgaaggattcaccggagccggcggattacgacaacgaccaggtaaaaaggatcaaaataatcaattcgcgttcaaaataaatcatatttcagaatccgtcctactcctattacttgtactacatgtaagccaattattttgttgattttgtctccgatctttaatcattttttctctaccctccaaaggtatgccaatttgacggcactgaacgccttccgacggatgcgcggactgaacaccttcgcgctgagaccgcactgtggcgaggcgggcgctgtcagccacctgagcgtgtcgtaaggagtccttggggatttggtgtccccaaaaagtgaatcccactttcattttgcagctacttgacctcggaaagcattgcgcatggccttttgttgcgcaaagtgcccgtgctgcagtacctcttttatttggcacagattggaattgtcagtggccatttacttattgattgtctttctatgcctctctcaaatactatttcactcctttctttctctgtcctctctcctttctttcgctctctctctaccattaacgtcattatctcttctaattaaactccccgccctaggcaatgtcgccagtgtccaacgattgtttattcataaaaaataaaaaagtcatcagaagggcgaaaaccacttactctgacgactattccggtaaatgtgtcgtagagtaagtgacaaaatatatggatgatcacatgaattaaaaaaagacaaaaatatgtgaaaataaataataaataaattgaggtcaaagtcaaatgaggtcgaaataccaaatcacttagaaatttgttacattctagctttcccggtcttacatattaccctagtgaactttaagttttattttaaattgatttaaagaatttgtttttattagttctttatctagttgattccacaattttgttaccctcccagcaaagggaatgaattttttgcccagtttgtattttgtgttaaatctataaaaggggatgttaaagcgtgctgatggattaaaaatagtttcagatctgttcggccataaacaatttta

SEQ ID NO: 2808 - DNA, 5665 bp, Heterodera glycines
cgacaaaattcgttcagtacggtatgtgaggcccatagcgttgatttcgtacggtaatcgcttttggttcgattacaattacaaacagagagattcttgcgcaccaacacacctcggaaaagtttttggctgctgctgttgttggtggtgaacaaccacgcctacggtagacgacgcatacggtagttgctggtgttgttgaagttgttttttctcggccaattgttgttgttgttgttgctgttgttggcgcgaggtcagaagctgcttgatctcctgatcgttgacgctgccgcacgagtcgcgcgacgcgtgccgcgaccgcttgtccgccggctcttcaaagcatccgacggcgccgccgctgccaccctgtaaatatcgtcatggggatataaaatgcactcgacaactccaagcagtacaccacgcagttgtcgtgaattaacccacctcgccatggtcgcccaccactgccaccagcatgttatcatcaatcattgcttttgtcccattattgttggccatcaatggcgtgatgaatgagacgtggtgttgtacaggtggcgccggtgttgaacccaccgttgctgattgtgttgcagcagccatcatactgttggactgttgctgctgctggcgttggtgcagctgcacaacaaaacaaggaaaaggggatgaattacggcattaatgtagaaactaaatcgtcaatgggattactgtaatcaaccatcaatgggattactgtaatcaaccactctccgatgggcttacgataattgtcaatttgctaataggttagggtaattattcactctccgatgggattacggtaattacctacgctccaagggattatgacaattgttacttcccaatgggattacggtaattattctctatgattgttatcaaaacgccccaagttcatggtcccttttgtgatttgctgaaccaaaccccacaaaaggccatcaagtttttcaaaaacccggcaccgaaccccaaaagccggcaaatcccggcttttccattcaaaattgcgatcctgcagaccaaccctgctgatggcctgctgctggagatggctgctgctactgctgtgaattgtgccggtgccgtccaccaacagttgctcctgcttgatgtttatgccgccgctgaagttactgtttttccgactgttgttgttgctccgctcgtcgccggtgccaccggcgccgcttcggctgccgttgttcagtcgtcgccgcagttccgttaccgtagtggtggtacagttactggaactgttgttgttgatgtgagtggtggacgatgccgaaatggccaccggttttggcaaccctattatacaaacagaattcattttttgtcgaaaaactgtggtggggttttttaacttttttggtgccccgggactgatgtgtccgtgccaaaatgcactgaataatttgatgccaaaaagttgcccccccccaaaatgtgacacttttctaaattaattactgttcttctaactcaagtaaattaaatattttcaatttgtggggaaatgattttaaaaaacgtgtccaattttgggggtttttgagccatacataatttcttttgcaattaaatgaaatttttgaatttgtaggctaataaaggaaaaaaacatattatcagttaattaatggtgaaataatacctacgaggggaacttataaacagagcgaaaatatttaccaattaattgcccaatgcgattgtaaaattgttaaaaaaagattttcttggcaaaatgccctcgagaagggacagaatgcgtgcgattgggggaaaaacaatttttggcgaaatgccacctgctgttgacaatgaaccgactaattggttgattgaggtgacgaaaatgtgaattatcattacaaattgcttacttgtctaatgaggcaattatgggtgtgtgtgatggtttaaaccaacattttttggcgaagtgccctgggggaggggggggggggggacgcgcgttaataggaggaggcaggcaaaattaattagccaattaacagatgttagttattgccccgagagggcgcctcaggcaataataacgaacaaaaataaatttaatataaaaaacagcacattttgggttaaacggtccagcagcaggtgcactatgtttcacgcccgggagcaggtcgttcccccccccccccgtcgtttcccctcccgaaaaattttttttttaaatttttttcaaacctagaaattttttcataaaaaaaatcgctgaaaaatttttcaaagaatttttttcttgaaattttcttactaagaaattttctaagaatttttttatgaaaaaatttctaggtttgaaaaaaaattttggggggggaaacgacggggggggggttttttttttgccggcccggccgagtcggacagtgccgccgactcagtccctccggcagccatcgatttggaggcgcctcgtcggaagctcaatgctcggccattgccgaacagcagctgctgtactcggtggtcaatttcgatggatgtgcttaatttgcttcaatgagggacaaaggagcgaatcattcggaaattgaaccgaccgagcgccgctttcgcaatctttgacatttcgcatcagcgattcgctatgctttttggactgcaaaaccctaaatgatttcagtcagcattaataggcaataaaatggtttgctttgagcagggaaaaagcgacggaagcgtttccttaattaggcgattaggagcgaaatgcgtttgaccgaagttacccagcaaagcaccaccccgggccgttccatccgaagcacccacgggagccaatacagcagcagggcgcgggcctgacaaacagagaaatcggccgtccgttcatttcccaattttcatttcaaagtgccattccctcccccgtgccagttccaaaatttacctttctttgttcccaattcatttctcccacctttgttcccatttcgtgtgtttcgggcgtccgatagtgcaaattcagcacataaacagtgaaaacggtggatgctgtgacgatgagcatgcaactcgagaagaaaaggccgaggaggggcaccgcctcggaagtcggcggagacatttcggaaagaatggagagaaagaagcaaatggacaacaggacggtgatctcttaaatactgtcattcttttgagtagccaacaccaatttagccataatttgccaattactctttccctttgatcactcctcagtttggccacccgccaagggtttagccggaggcatttcccgagaagtggggctgtcatgggacgccttcttcccccattcattttcgcacttacgaagtgttattttctcccccgcttcaggtggtaaggtgaagccgagaagggacattgtcgtggtgagaaggcacggcattatcaagttaaagccgtagtaaagagtccgtctgaaatgtcaacgaatgggcttaaatggtcgactttggcattggtcaccttcgcatgtgtaaaaagaaagtcaagtcggggtaaggctcgttaggacaacaatcgtaaaatttctcagttctggctaccgtagtcactgtaatttccggaaaagtatggcattttaacaaaatcaaattgacttggcaaagcccattctccgtttggcaaatattcgctggtgtcgaagccgccttccgcaggttgcaaatcgacgtaaaagcctggcaaaaaaaggaaagttaaccaaggatggattggagaatggacggcggacgaacctgaatatgtccaagagccgaatttgaagaagcaacgctgctcatcaaaagggaacctaagaggagaaaagagagtgcggggaagagagagaaagagtaggagagagagactgaaatgggacatagagggagagagagagaaagtgaggcccaattggaaggaaacaccgtccatggccagccgacaaacgaaccaagtgatgtcgattttgcagctgattttaaagatgcccgggggaacccaagacacatttccatcattgtacacgatcatatttgtggggaaagtcgagtcgaaactggcgtccacagaattgtacaacagaacatcgggcctccaaattttgccaacgggaaatcggacattgctacaagaaaaaacgcgaaagattggagaacccgcggagaatgggacaaccgaccttatgttaccgtactctgacgaatcccaccgtaatttatagtcattccataactgaaaaaggcacaatgaaagaggcgcaaatgagcaaattaaaatacgtagtcaagccaagcactgatgtgaacaatctgaattgggaggagccaacttcaaatggtcacaaatcatcaataatattttctaaacggctctaacattctgccattgattaattcgtctgtcatccaatgaccgataaatcaatatgaatcattttgatattaatgggtatgattattgatcgatcgatttgtccctctctcgccatgcccaccacccactcacttggttcttctcgtccacatcgatcagttgttggagggacactttcagatggacaatcaccggcttcgcgtggtactccaccggtcgctccaaattgttgtagtcgcgcaacaaatcctcgtacctttggtgccatataatggtagtccaagtccaattaatgccatggccattcattcttccattcgtccccctcccccctctcccacttcgaatttcgacttacaatcgccgttcatcgtggctggccaaaattggaaaaaactcgcagtcgaacaatgtccaaagaaaggccaaagaaaaagcaacattctgtttcatcagaatttgggctggggagtgtcagcggacggtgaaaatgccatccgccgatgaaataattttttaattgggggaatgaaatgacaagcggaagtgacactaatgaggtacttattataagatcagcagcagaaagacaatggtcactttctaatggaaaaacaattaggtaaattaaggatgggaaaattaacaaataaataaggacagtccttgaaaaaaggacaatggaaggaaaacgaagtgattaaacggaagaaaagggagaaaggaagaaagatttaaggattcagttgcaaagaatggaaatgcgaagttcgctgctcatacgataatctccgatgacaaattacactttcggatgggtgggcatttggccatttcttcctaattcccttctcccacaaaaaaaaacaaattttgtttcaaatgctttcgcttgggtaatttaatcattcattttaaatgagaaacaatttggcctttacttagagtccttttcattttctgcttttcataaaaaaacaacaaaatttctatcgctttttaagtcggtgaaaattgactttgttgatcgatcagagtgaaattggaaatgctaaaggggggggggggacgaaaagcagctgaaagggagggagagagagctgtggtggaaaagccatcaccaccttatcgcatcaatccgtcagagatgccaaaagacggacgaaagaattggggggggggggatgggagaggatttgagggatttgagaatttgacggaaaattgacgggtacctccgcccttc

SEQ ID NO: 2809 - DNA, 980 bp, Heterodera glycines
ccccccccccccgccccatttttgccctttcaattaaaaagacggcattaacttttaatggcaccgaacgaaaaaggcaaacgaaaaggacaaacgatcatcaacgaccaaatgacttaacaaatcacttctcttttttcttatcgttttctctgccatctcattaattccctccaatttgtgccttccctttattgtgtgattaagttcataatgagctcattagcgggtggagaggtgccgtccctttgtcccaccagttcatccgccgttggattaaataaatgccggggattttgccttttatccctgagaaatgtccaattttgtaatttactgatttttttggctgtacatattaattatattgtttatcgctcctaatatcgcatcattttttgtttcggccatttgtccgttttgtaccttttgtccgtgacttttatgccatttgtctctcaaattgccctttctcttcatcatttgactaacttttatatatttttattttctgtaacttttccaaattgtctttgttttttatatgtcaacaattctcacgatttaatctctgctttattttatgctaatttttatgagattcaatttgaaattcatttttattttttgttatgcaaattttaaaagaaaagaaaaaattgggaaaagtttaaaagagaggccataaagcaaaatgaataattaaaaattgtaaataaaataaatatataggtaaataaactagggttaagccccgaccccgagctccccgacatttttgggcctattccccgcccccacccccgacatgtcgccccccgaggtccccggcccccgactttttgctccccgactccccgacactaattcggggaattggggactccgagcattgtaaaaatttaaaaagttcaatcaacaacgaagggggggggaagatgtgaaaatttgtgaaattttgaataattttcttaataaaa

SEQ ID NO: 2810 - DNA, 3477 bp, Heterodera glycines
  unsure (1)..(3477): unsure at all n locations
gccggaaaaaaagggaagatttacgagtatttaaaaagaggtttttttgggttaaaataaaatttggtcattctccgatcggggtccccggcccccgactttttgctccccgagggctcggggcttaatcctaaaataaacaatcaaacgtttaccaataattaattaaatttcttttaactagtaattaattgtcattggttaagtaattatacaatttttggacaatgccatgggaagtcttctccgacttcgggttgccctctctccaacggttcccttcggccgccatttccctccgacactttttaaagtgccaaaaattcctcaattttaattaaattcgttttttgtctgtgacttctgaattctacaaagttgcactttttgaggactgtttgtgctttcggtcatcgatttgctgataatttgcccaattactttacttcgtccgcctctctctctctctctttttggcatcggacggaacagtcaaagggtctctcagaacgacacttttttatggctacaggacatcagccaatttcttaactttgctcaggtaataatgagcaatgaatgagtgctgtctgatgagatccccaattagcagttaattagtctctttagtcttcctaatttagtaagtactcaatgaatgcgctttctttggttgccattaattacatttattcctgctcatccaaacgccaattattgcaatttgtgtagagcggcaaaaagaaagtgttgtgatcactccactggaattataaccgatgctaatttatcaagcttatcagtggttagagtttaacagaatttgcaaaacaattggcaatttcattgttgtccgtttgcttccacttttcttctcacttttttgtgcttttccatcgatggcattttcaatttgattcattttttgccattttcccttttctcgcactttttcctctcttaagttggtctttgatcgcatctgttggatggcaaatcaatcaccccattgaatgagctttaatgcggcggcgggcggcggaatgatgaattataattatttaccatcggtgggatgggatggttttgctggtcactctccccccccctatcccttcgtctcccgttctttcccccattctccgcctcgtcctcctccgtctgttccttcctttcgctgattgatcattcatttgtcatttgtgtggccaatcaaagaaaaaaaagtcattcaaagcgaaaaacgaaaggattctttttcattttacacattttcatattcgcaagttcaaattccttctttccttctgttgcattttatttattcaccttaaagaaaatccgccaaattaacaaattaatttataatgccaacagaaaatttgccgcccgaaaatgacacaatgccatatgacccgagggcacgggaagagagttgttggcacgaggacagtgttgaggacagattcggccgatatcccttcagaaagtacccgtaagtacttggctgacagagggtaattagatctaattggctttacttaccaggaatgagaatccagcaaagattatggactctgttctcgatgcaattggacacacgccaatggtcgggcaaagttttggggtgataggcaaatcgaaaaagtcgcaaaaatatttaaatgagatttttatttattttgaagaatatgagagaaattacatttttgaatacaaattttaatcccttttattctttccttcgaaattatttcttcaattaaaattccctaccacgcaaaacaaagctcggcattcaaatgtaataaaatgaaagcgttttatatttataatgtgccattgaatttttatttttacaaaattatttatattgaaataattaaattaaaatacataatttacaattttattgcaactttttggttcaccttgggaaggtccctaacccaatcctgggaattgcgtatttcgacagtcgcacttcaaattgaataggcgtgtcgtgtcgtctttcaaaagtttctaagagttaaatttttccagcaattttttgggcatttcgttccattgagactttttcggttcggcttacaattagcagctttttgcgtgtgttcttccttttctttgatcattgttttttaaaggtaaagcttcagcgaattccggcggaatttggcattgagtgcaatgtttgtgagttttttggcatttctcaattagtgcacaacaacaaaattcaacaatgaatatgagctaaatttctgaaatagagaagaagaaggaaacattcccgagaggaaatcccatggatcaattaaggcgataattgaccctaatgaaatgatcaatcaaattaagctggaactgtagttcattggtaattttatactcattaccaatattttgagacggaaaatgcgaatttttcaatgccggcggttcggtgaaggaccgaattgcgctgaggatgttggaaatagcggagcaaagcggcagactgcgtgccgggatgacagtgattgagcccacctcgggcaacacgggcattggccttgctttggcatgtgccgtcaaaggatatcactgtgttattgtgatgccggagagaatgagccgagagaaggagctgacgctgaaggcactcggggcaaagattgtgcgcaccaaagacaaagcgcggtacgacagcgaacaatcgcacatcggcatggcgttcaaattgagaaaggaaacgcccaattcggtggtgttggaccaggtcaatcgcaacggaacgggtgccaaaaggggagggagcagtcctcggcacttttagtacaaaaacatcgccaaccctttgacacacttcgaaggcaccgcggcagagattctggacgcgttggatggcaaagtggacatggtcgtcgtcggagtcggtacggcagtccaaactcagctttgtgccattcattggccaatgaattgccttaggcactggcggtaccatcacgggcatctctcgcagaatcaaaaaggccaacccgaactgcataatcgttggcgtcgaccccatcgggtccatcctcggcggagaggacgaacacgcaggacataagtacaatgtggagggcatcggatacgattttgtgccgacggtgttggacatggaagatatcgacaaatgggtgagtggcatttcgctgctgtcttatcggacggaattgcaggaaaaagttggggacctggacacttttcaaatggcgcggaaaatccatcggatggagggaattctcagcggaggatcttcaggtgggggaaatagcggataaagtgctgaattggcaaaatgccttctctttttatgtgccattctctgcggggcaatgcgagcggcaaaagagctgaaaaagggacaaaattgcgtgtttttgttgcctgacaatgtgcgaaattatttgaccanaattcgtcagcgatcattggatggtcttt

SEQ ID NO: 2811 - DNA, 5787 bp, Heterodera glycines
  unsure (1)..(5787): unsure at all n locations
aggcagcagaaatccaagagaccttttttttgttcttcgggcctaatgtttttttctccttgttatgtcaacaattcaacaccagcggagcaaaaaaaggaataaatttttgctgttttgttattcaaatttaaaaaaccaagatataactaggggtccggcggtggataggcgccgctgtgaaaattttttttttggaaattgcagtgaaatatgataaggaaaattgcaaaaaattttaaaattttctatttttttcctaaaatgctgaaaaaggcataaaataaggcaccaaaattgcaaaaaaggcaaatccaggaaaaaaacatgtattacataaaaaagaagccctggttcttcttcacaaaaatgcttttgtatgactgggactgaaattcagcactctctcacttttctatctctctccacattttatttttccgccaaaagtcattaaaaaattgcttaaaattttaaaaattatcgaatttttaaaaatatcatttatattacattgatggcttaatgtatgttgatattaaataaatatcaacgccagtgttgatatttattaaaaaatgttcgctaagtgaaaaatgttgaatttttgttaaacaattgtcttttatgcattgctataatcaattttaatgtctatgtcataaaatttacggctcgttatttgcatacaatttaagattttatacagcaaaaatttatgataaattaaaaaaaaaacttttatataaagtttatttattaataataactatttaaatatgtatttaatataccttttgttaatttcgaatttgtaaaataatttattgtagtttaaaaataattaatttattcattttaattattttatgtattacgtttatctcaaattatgcttttattcatttaaagtgagaatttttcatttttttgtgaatttcaaaaaagattatttatttatttaattttattttttataataaatattttttatataatattttgagttttttattccgattgcaacgaaggcactcccaacgcagtcgaattgcatcgtgcgtcgcaactcggccaatgaatccatcaaacatttagtgatggcttaaaaattatccatctcattaacaacattaatatttataaatttaataaaaaaatttgttttttacagtacttaatcgatatttaataaattttgaaaaattaaaaaattttttttttgttattcttttgttaatcagatttttatgagggtttttccgaccatgtcaaaatttttttgggaaaaaatgaagaaaatataaaaatgaattaattagtgtttttacatttattaacttttgcttttctaccaaattattttattggcaatatgtagagaaagaatctatttgtaggtaaattcgaaatagtaattttattttttataatttctgttttaaatttattctttctatgtaatttatattttgattgaaaataataaagaagtttaattttttttaatatttaaatccatcatttcgtcgttaattaatatttatattttaaataaattattaatttatattaaacttttatatacaaaatttataatttttttaaatttcgctcttttttataattacataggttaatattaggtaattgtaaatttaatttaaaaaactatttatttaattttcatgcgctttaaagatggtcttccttctgaaaagttgtccaaatttttatataataattagagaccgagccggaccggatccggtaccggatttttctggatccggcaatccggtccggcgattttgggaaaaatccagattgaccggattaccggattgaccggattatgagagaccggatccggaatccggtcatttttgaaaatgccaatccggtccggtccggagaatttttgaccggatccggtccgactcggtctcaaccaaaaaccttcacttttgttcatttttctttgaaaaatatctctttggcataatgtctttaactttttaatcattttgacaaatttccagtaggatttatgtctaattttcataatctaaatttttttaattgataatttatgtcttctttgttttaggtttattaaaatgagttctatatggcaaattggtctatttaaaaaaacgtccaagactacagcaatttgtctcgagtgtgaagcaaatgtatattagttttattatgataaaacattcgcttttcataaatttatctctgccctcacttttcttattaaattatgaaatacttttatggaaattgtcttaattattaattatattggggtggaaactaagttctgtcatagctgggagaaattgtttattaaaatttataacaaatcaaaacgaaacccataaatcactcaaagtatctcccctaattctccacaatcttctgccatttttgagattttaaaaatgatctattgattaaatttgtgcagctagacaaaaactagaacagcagaagtgtttttcgtacaaaaaaattacagtaattacaaataatataattttttaaattaaataattgcataatattttatttcatttagatattaattttttgcagtataaggcctaagtctggaaactttttatgaatcatcattttattaagcgaaataagaaagaatttatcatttgcttttatttttaaattataacatttaattagtattgtcattaatttgcttgcaattttaatatttttttcttttatttttataattatatattaatgtttatattatttgattataaattatttgtgtttgaagtcaaaatgattgtttttaataggttaatttattttttatgaaattttttaaattttttaattatttttaattattaaattttgactgggtttttaatgtgaatattaaacaccatttttttatataaatgttttgaataatttgaatttttttttatttggtacatttcttctaaattttatgaaaaatatttttttaaaaatatttttagcaataatattatgaaaacatgatttaatattttgtgtaaaaattttttattggatttttgagcatttaggtttataattttaatttgtttccaagaatgatttataagtttaaatttttttatttatttaattttctgctagaatccctataaataaataagcgtttattcttgataatttcattcatctaaatgttcctaataggtaataaactaatttattggttagtttactctttatttataagttagtttctaaagcatgaagattattaaatataataattttttcatattttcatgtgaatagtttcgatactaaaattttttaaattaatttgtttattaaataatttaagcatattcactgatgagaaatgatccattatacattaaaaatttcaactttggctatattcacattagtttaaatgttactctaaaattataaaaataatatttctgtgattgaatttatatctaattaatttatttattagttttataatttcatttttataataataattaatagcatttatttttgcgtatataaataatttttaataaatttgttttttcttttataaaaagtaaagttttccatttttaaaaaaatacatttttattaaaaaaattaattacttgcttatacaatgctatgttcctaattcgttaaatggtaaaacttaaaaaataattttatcagactaaaattttaacttttataaattcaaaaataaataaatttgataagttttatccagggctcccagatctgaggctttagcctcattttgtggttttttgataggtcaatgaggctaaattttcaaaatgaggctttgaggctttttgtggttttttgagaaattttgaggatttttgaggcttttggggaaaatcctcagaatcttttaaattttgataaattggcataatgtttggcaatttaaagaatttttttaatgaaaatacgcaaaaaatatggtcaaaattcttaatttttccaacggcggcgcctatcggcaccgccggaccgtaaaaatccctaatttaaaagcaaaaaatttgctcaatcgcaaaatttggtcatttttcggacaaaatctgttaaaaaatcgtattgaaaattacaaaatttttcccggcggcgcctatcggcaccgccggccccccttgcgccccaaaagttttttgggaaaagcgccgcaaaaaaatcaacttcgtttttcatgttcagaatcctaaaaaatgcttatatctaacaaaaaatgctcaaatttatcatggacaatcaaaaatataacatttgaacattttaaacgtgttttgaataaattttgtaaaaatgaggctttttacccaaaatgaggcttttttgcctgccaaatgaggcttttgaaaattttgatctgggagccctggttttatcccatattttgaataaaacaaattcattttttgggctttaacttaccttttgagtttattcttagcgccctattaaagttatttgtataaaattaaaatttttttatttataaggtaagaattgttttatgcaattgattttagaaataaagattatgtcatattgtgtatttttatatttatatttaatatatatttaataatgtttttagtatctgactacatttcaacaatactctaaatcgaatttttcctgtaataatatttggtgtatagctatataatattattttcatttattttattatttaatttttattgattatgtattcaatccaaaatataatttacaaaaattttcatgcaaagaaatataattaacttttattatatttattttctttattaccttatatattttttaatttttattaaataaatttcttttttattcttataaactttgaataaaaaatgaagttgttttcagggcacttctggaaactgagttttcacaatttataatcttttaaaagattatatattaacatattatctatttttataacatattttcattaggttttctcatcaaaaatttattctgctattttaaaatttaagttttttcgaattatttttatatttttaaattatttttcttcatttaaaatgccttttttatttattactcatttaatattgtaattataatttttttatataaatatttttacattatataataatattattgtatggctgtgttggcgtcaaagtgataaagtttattaaaatttggaaaagaattttttatctgtaaaataatgaagataaaataattacacttaataaaaattttatgcaaaagttctgttttaataattaattttgttttccaaagcttaatttttcctcgtcatataggcggtatatttcattatattcaggggataaaaaatgcaaatttagcaacctaataacgcaattttgtacatcgccaaatttgcgcatttttccatcggccaaccacgatttcatctttctcatcgaatctaataattattcttatcacaaatttaaattaataaaaaaattccttaataaataattttgaaaaactaaacaagaattattataatttttttagcattaaattgagatagaataaattaatagttcatttataaatttatcaaatagtattaatttatataatttaaattaaaaaaatagatgaaatgaagtgtaaagtaattcaaaaacatgataatnnctaagtnacaaaatgcgcccataaattatctatcgctaataaaatttaaaa

SEQ ID NO: 2812 - DNA, 3969 bp, Heterodera glycines
gtaagaattgttttatgcaattgatttaggaaataaagattatgtcatattgtgtatttttatatttatatttaatatatatttaataatctttttagtatctgactacatttcaacaatactctaaatcgaatttttcctgtaataatatttggtggatagctatataatattattttcatttattttattatttaatttttattgattatgtattcaatccaaaatataatttacaaaaattttcatgcaaagaaatataattaacttttattatatttattttctttattaccttatatattttttaatttttattattaaataaatttcttttttattcttataaactttgaataaaaaatgaagttgttttcagggcacttctggaaactgagttttcacaatttataatcttttaaaagattatattttaacatattatctattttttataacagattttcattaggttttctcatcaaaaatttattctgctattttaaaatttaagttttttcgaattatttttatatttttcgaattatttttttttatttaaaatgccttttttatttattactcatttaatattgtaattataatttttttatataaatatttttacattatataataatattattgtatggctgtgttggcgtcaaagtgataaattttattaaaatttggaaaagaattttttatctgtaaaataatgaagataaaataattacacttaataaaaattttatgcaaaagttctgtattaaatgcaaatttagcaacctaataacgcaattttgtacatcgccaaatttgcgcatttttccatcggccaaccacgatttcatctttctcatcgaatctaataattattcttatcacaaatttaaattaataaaaaaattccttaataaataattttgaaaaactaaacaagaattattataatttttttagcattaaattgagatagaataaattaatagttcatttataaatttatcaaatagtattaaaaatttaaaaaataaataaatttaaagaagatatttgagaaaattaaagaaaaaaaaatcaattttatggaagttgaattacatcaattattggtgtgttttattataatgaaactccgtttttacaaatttttaattaatatttttatttaataaataaaatttatttaaattggattaaatattgttaacaaacttgctctcttatttcatgcctatcagtctacattttttgtatattgttcgataaattttagataattaattatgaacaatagcagggttcggatcgaatcaaattcaccatcaaattgaaaaacaaaagtgagaatgcgcgccaactgcaaatgtgacgcttgtcaaacgacccgagccgtccaagcgcacgttggaaacattggtgcgttttacaatatttgcaaaaaaaatttatacacttatgtttagtttttagggggtcgttgggttaaaatgattcgtttgaaaaagcaattatcatttctgaacgaactcttaaggttggcccaagcaaatccgctgtggccaaagcaacgcgcaatatttagccaaatttttaagaaaaacaaaaagttttggagcccggcgtcgataggcgtcgccggggaaaattttgatcatttaaagttaaaaacattatgccaaagattatttttcaaagaaaaatgaacaaaagtgaaggtttttggttgagaccgagtcggaccggatccggttaaaaattcgccggaccggaccggattggcattttcaaaaatgaccggattctggatccggtctctcataatccggatttttcccaaaatcgccggaccggattgccggatccagaaaaatccggtaccggatccggtccggctcggtctctactaaaaaaccaccaactgttcagttttaaattaaaaccgcataaaattcaatttaaataaaaaaacaaatttaacaaagtaaattggtagatgggtccatccgaaaaaacacaacaattattcattcattcttccgctcctccgtctatctgttcaaatcccttctttttgctccatcgggcgagcagacgcacgcggaattgggccaaccgatggccgaactgcttcaaaatgcgggcctggtccgcggacagttggtcacccgttttgcacacagtgaactcctccaacagctcaatggcacgcacctgtcgatggcaggggaaagggacggcacattattacgcaacgcacaaagtgcaggaaaatttcaaaaattttgcctggcgatggctgccagataaaagggaattcttcgcccttttgcatgaaaatttaaaataatttacaaaaaaaaaaaaaatttctgcttgacggcggcatctgacaaatgagcataattataagaaatttttaaaaagaatttattttttaaaacattttgttaagaaaattgtcttaaaattttcaaaaaaacattttttcttgaaattcccaggctaggtgcttggtatggattgaccaagtaggaaaaagaaaggttatggccaaagaaaatgaaaatatggctattgataggacgcttaactgcaacaatagagcaacaaattgcattcgaacaccttcaaaaccttgggccattgcaattaaaagttcgtcccattttcccccaaaatgcccaccattttccagccgtgtgggcatgcccaacttgcgcagctgcggttccatggcgccgtgcaagtgcaattccgccggcattggcccggccggcagcgaaatgtccgccgaggcgacggcgcccgcctgggcaaactcagcctcggtgtgctcggcgaaaaaccttagaaaatttaatttataagatttttttaatttttgccgctttttgggcccaaaagcattccattcgccggaacgaaattggaaaactaaaaaatttgaaaattttttactcagaaattttttaaattttgctacaagatgaataatcatagaattatgaggacatacgactgactataaatttactgtctcttctgtgtaagtgcctctgaaatttaaaaaaaaaaagaatttaaaaaagcgtcgcaaagtaaaaaaaaaagtgaaaaaattttctgttttaaaaattgggacggcaaatgcaaacaaaatggaaaaaagggagatgcttctaattcgtagaacctttaaaaaattttccaccaaatgcgcccccgccaaaaacggaaagaaatcaatttacgaaaaaattggaattatcccccgccgacctttgcacttcgtttgccttcgcattggtgaacatcagtccactttggccccgcaaaagtgcgctcactttgtgcaattcctttgcctaaattggggagtgcgttatttttttttaaatttaaatttacttccgaagggggggggaggaaatttctgaaaattgctattattttttttatcattcaaaaatcactctttttgttacaactttcaatttattgcccaatatgaaaatgtccttaagagaaagtgggaattttttgcgtaatttattttgaaaaatttttgcattaaacagatgcacgaccattagtttagagggagggcgggagaggcacgaattttaaacaaaatgctaattaattttttctggcatgtgtcaaaatttttcaaaatttataaaaacaaaatgagtctaatttaggatttttagggttttcggggtcgctgaatacgaatataccctttatattaccccttgcctaaccttaggcccatctgaataataaaaaactcaaattcgagacttggacatttcgtgggtcagcgtcagataaaccaaaaaaaaaaaaaaatctgccaattaaaagcttttatggctgcataaaatgactcccaaattatgaattggttcaacccaaaaatttttgaatttttttttggcagggggccggggttgggtt

SEQ ID NO: 2813 - DNA, 1066 bp, Heterodera glycines
  unsure (1)..(1066): unsure at all n locations
aaaaatgaaaaaatttaatttatttggaataaataaaaaataatttatgaaaaaagcaatatcatagcagataaatttataaaattttttaaattatttaaaattgaaataccatcgtggataaattatgcaataatataacaaaagatttaagagaaaataataaaaaattatattaaatttcaatcgttaaaattaagcataaataaaaaaacctttaaaaataattaaactacattatctacaatataagtcatacatttttaaataacagtagaataaaataaattttaatttaaattttatttatatttattatttgttgccatataaataattttttattataataatcatcttgcattatatataagcatttttttcttaatggaattttaaaaatgcataacagattctataatcgataaacatcattaattaattaaaattataaaaataatagtaaaaagtgtaaagaagatgcaaacaataaaaaatttattgaaacaaaaattactatataaattgattatttacttatatatataatataaacagaaaaaataaataaaatatgcttattgattaaagaaattaagagcaagtgtacttgagattaaaaaaaatactaagaaatttattcttaaatgttttgattatttaaatgtataattaatttacctctacggtattgctattttttcgaacaataatttaaatctcaataataaaactcaatgattaaacaaacaaatttatttaaggcaaaaacgatttatttatttcttttattattatttttatcaatctttaattgaattatttaaactatttatcaaaaatttaatttacaaaaattttcatgaggaaccattataaattaatattaatttattttaaattttatcttctttttgtggtttttagcgaaattccatgggcagggaatttttcaaaaaaatggtaantttactggagtacaaaagttatgaatataaaattttttatcaaataattcttctcggggagttcggaattatgctgatgtttttacataataaagata

SEQ ID NO: 2814 - DNA, 2792 bp, Heterodera glycines
taaaaaaaataatttttttttaaggagtttttgggagttatttaaaaccaaccccccccccccccccccgcgggggggggatttttggggcccccgtcccccccccccgggactttgacccccgcatcccccgcccccgcgaaaagccacccccgcccgcggggctcgacccttacaataaaatgatttaaaataaatatttataaaataaaactaaatttgagtaaatgatcgtgttttgcagcaaatgtccccttgtaagcagctgtagcctaaaaatggtggaaagttcctccttttttcgtcaaactgtggtgccgaccgattggacaattgaattgtctttgtccatttcgttggatcgcactgtcgcgcatccgttctcctctggcggtgcaaatgccgaaaggcatcgcattgtcagggcacgaggggcaacagaagccgttggactgacaacggaagccgggcggacaaacgccctgcagcaatggcaaattgaaagttgccgaagaattaaatttttttaataattttttctagggtaattttatgcgctgaacacatatataacgtttatttttagctcttatgctctttacgtgtgttacgtgaaattttttgactagtcaactacagtatttcgtcggtaatttgtcccccctatttttcgaaaaaataataaaaatttaaaaaaatcgtgaaaacacctgccctgggggttttcgaggtcgctgatcacgaatctgacatccattcatattaatttcattgaaacatcaatactggttatattctgtacatattctaacataaaagtaaatttttaaaatttgaatttcgactttttgttcgagttcgggtcagggtttcggaatcggccaaaactaatgttagattcatgttcagcgcataaaattagtctaaaaaaattatttaaaaaaaatttcaggggggcgacaaaaggataagaaccaagcaagctctgtaacttaaatcggatttggtcgattcaaaatttcatttaaaaaattttctataatttttcattcaaaacagaaaaaaatggaaattaagcgtttaaacacttttttcgtgtaaatttctaatttttacggcctcaattatgtaactaacagactcatattgttaatgtttttaattttatttttcaaaattaatatgttttgggtttcgaacgccgccaactcaaattcccaaacttttaaacaggcaaaggtcacattctcttttccccattattaccagtaattagtgccaatttgcactaactaatccccgccccaccccctcaatttgccttgttgcaccgtcccatcgaacgtcccacggggcactgacaacagaagttggccgtgttgcacaccaaagtgccctggcaataacccgcgacgcattgggcaattgccatttggccaccgcatgcctctgaaaaataagccaaaaatgagaagcatatacggtaaccccacggagaaatgattgaattacattaatcaaaagaacaccgtacccacatagtcgtctttgcctctgcggcaacaaacgccgttcagacaactttgatcgggagggcattggcctcgggcgctttaaagggggaactgtttttggagaagaaattccatccgtaatgaacacctgcaacgaatcattgaacggaagccctgggggcagaagcctgaattatgattagtctgattgtgcgccactaattactcctaattgcccccattgccttccgcctgttccgccatgtatcccccttgagctccgttttggtacgggtcaaaaagtccggcatttccgtccgggtaattaatgtccaagtcgttgcccgtgcagcattggccgtcaatgcattcggtagggccgcggtaatagggggtgcattggacagcggaagtgcattgggcgtactttgagaagagaaaaaggcaatttgagtgaatcaaatgctaaattagtgcttctgatgtctgggaatttaccgaaattcgacccaaaaactcaagaagagttggaatttgatcggaaaatattttagattaaaaaaatgtgtataatttaaaaacggcactttaccaacgcgcgtccgccatttcgacaccgttggcacgctgtgagggaggggagggggggggggaactttttgttattggaattcaaaagcaaagagccaaaggcattctgctgaatgattggttacgtgttatttggtaggctaagttgggaaactctccgcagatgtaataaacggttgggtattgaagtgccgattggcgccgggggcgaaagggcgccgaagacggcggcggcactcttttggcggaaatgcctagggcaacaaaattcacataaatttatttatttatttatgtaaattcccgcggggctaagcaacattacagtaataaaagggaatttccaaataaattcaccggaatttgccactcttccgttgccgaggcaaaaaaagaggaaaaaaaggaggggagaaaaggcggacaatgatggaagacggaatggccaccagcgaagtgtgttttttgtgctcattggcagtgattttgagcccaatattatttttgggaggatttgcctaattaatgaattaggaattaatttgattaagtgcaattggcaaatgcttttttattttgtcatctatcaattattttttctctatttttctgctgaaatgaacaaaaccaacgtttgttagcgggagggggggggggggggcataaggcaaaacaattaaagcgatg

SEQ ID NO: 2815 - DNA, 6825 bp, Heterodera glycines
  unsure (1)..(6825): unsure at all n locations
tagcgttttctagtatttttaccatcagaaaatgaaagtacttcagctgcgacaagagcacaaattccaccaatgctaaagccggcacaatctgtgcagaaaggaattttacaatatacaaaaatcaaaattgtacatttactcaccggtgagtcggtcgaccaagtcgggctgttcaactttcaatttctcaaaagcggccatacaagaaacgaacagagccatctgagcatagaatgtttggtctaatttgtttattggtccgttaagacagaggctgagaaggtcgaatttgagaaattctgacattaaacacaattaaatgccgataattttggttttttaaatcgcaccgtttgcctcctcaaaaagtcgcgcactgctcggattgtcaatgacctaaagtgtcaaaaatgatttaatgtaaactttggtgccaaaattgtttgtcaaaataaatttgaccggcaaatacgcccacctttttgcccatttgtaagtgttgcgccccttggcttggaaacatcagaacaacttggtcctgaacggaattggagcagtgacaaaacaaagcaaaaattaaagtcccacaataattggaatgtggtcgaagttcagctgcagcaaatgctttcgcttctttctgaccgcgttgatcactttgtacttctcgggcccccgcaaattttctttggccttcgaaattgggtccatttggtcgtcgtcgtcctaccaaaatgtcggaaatgggttataaaaggctaaaatgtctgcaaatattcttttcacaatgaatgccgacggtaacggcctcggctcgccgtctttgctgacgcgaaaagcattggtggcgggcgcccattgaatgccttcgccggacggagggggcgaaatgcgcggacgcgaaacaggacgacccctaattcgacggagttggacagccctgaaaaggcaaaacatttgcaaaaagggagccattttaagaaaataacaaattaaacgacctgaaaaacagtgatgggcagagaagaaactgtttgttttgtaagacagtcattccaatttcaaaagaaaataaaagatttaaatggatttgtcgaattcgttaataaatattttaaacatgtgtaaaaatgtttaaattatgagagtccgtgccaaattacttaattaaactggcaaatttatcggcacccgtaaagcaaaagcaaaggtcaaaaaagcattaaataaatttaattgtaaatatttgtcgacaaaaaatccgtgttgagctgaccaatgacagacaccgatttagagaaaagttggacagggcaaaaggcacagccgacgatcaccacactctcttctccaatttgaagaattgggaatagagaagggcagtggcggaaatggcatcatcgacgccgactgcaaaggcatggcatttacaagaaaaaacaaaacaaatacgaaattacaaagtacagaagtcaaaaatcaccactgattatgggtgagtgagtgagtgacctgtgtgctgaggaaatttgcagacaagcacgggcgtgtagatgaacacaatgtcattgcgcatccaagaagccaaaggactaaacagtgaagcaatgccaaaatgaaatcaaaaatgatctacggattttggccacctgtgtgggttgaaatggtacactttgcctatttgcttgtccagcagcagagtttggcttgtcctgatctccaacttgtcaatgtcttccattctgtcagaagtggccaaattgcacgactgtcgccctgccaaacgcgcaccagcagccaatccggcgcccaaattcgaccagtccgaccctttgttgacctaagaccggacgagttggaatttactttgttgtcgcaaaaaggaccataatgtgatatgtcaaagaatagtaatggatccgttgaagtcgctggttgtaacgtttgctttccggattggttcggtcgtgtccataggtggtcaacagccagtaaagcatttcaacagcctgaaacagaataccccataaatttattcaatttttaatgggccatccgaccttatgagcgtgaagagtgccggcaatgatcggataacgctctttgtatgggccatcgccaactttggacagataagtcaattcttgctcattgatggcaaggctaaagcaaaaagaaaaactcaaaaaactaatgaacgcacacctgtccacattgggaatgatctgaaaatgatgatcaagttcaccaattcattgcatttgaccaaccctctccaaaatgtcgtgcacttgctggtcgtccgccatgctgcccaattgcaaatgaatcggaatcagcggattcacttgcatcagcgaccgtttgatcagtcgcagcttttccaatcgcacgtcttggttctgcaaattgtatataaataaagataaaacaaaattgagatgccagaaatacctgcgcttccagaccatggattccggacaaaatgatcaggtcgggacggaattgcatgattgccttgaaaaacatttcgatgatcatcgcactgccactaaacgtgggaaaaccatggtaaagatacaacaataattcccacagtgtttttgtgagacctgaattggtcatgggaaacaatgaaacgagaagaggcgggcgaaacgtactccccgaggatttcgccctgtttgtactccaaaatgaggtgcaattcgtcctccgcaattcgtgtggaattgtttcgaacgatggccgggtgtaacagcgcgtggcttcgcgggccaatcggaccaaccaaataagccttaccaaaaggagacaaaataataaagggcatcaccaatgcaacacatgctagacccttatataaaaaagaaacttaccgttgcagcggggaacgaagaggcgattttctgagccattaatgcggcattgccaccaatataatgctaaaatcactcaaaatttgattggaatcagtaagtcacctgtgcacggagatgtttgtcttcaacggtgtggaccatccggtcaaatgccgcgtcattgaccatacatcgctcggcaggcgcaccacgcgtaaaaaagtgcacaaacgcctcgtacaaatcctcaaatccgttgagcacttctttgtccgcgattggatttggtgacgagatgttcagcttgttcaccatgctgactccgctaacgatcacatcaacattgcaattgatgctgaaaatgtatataaaaaattaaaatattgtgaaaaagcaaagagaaaaaaatataaaagaatgggagacgcacccgaccataattttccgaaattttatggatggctgtgaaatgacggtgtcccaagatttgagcatcgcctgctccacgggcatgctgctgagccggtgttgctcattgtaatagctgtagaaccatgggatcagaaagcaaaccaatgaccaattaagcaaatggttgtagggagtgttgaaagggaacattagaaaagcgggaagaagaaacgaaaggaaaaatcaaatttatcacaaatctgaaaagatagcaaatttagtaacccaagactggcggattgaagaggagtcaaaggtattcactggtcataaaaaataaaaattggaaaccttagaaaacataaccatgtcatacccatgtggatttcgggttggctttgtactgcctttttgtcaagttcattcattccgttttattctcactgcacaaatacgactagtcaatttcgctatctatttgcacctcagaacattttagaggaaaagctttgtaaatattaattactccatcctttttcattttttgtatttttgacgccacgaatcgccagctttacggattcttgagagttttgctacttctcttaattactgatgtctgttctgataataatcaattacttaacattacctaattcgttttacaaattttccttaaaaaataataataaaaactggaacaaattttagacatccaaagtgtctgccaaaccgtctatccaaagctcttcgagttgagatggcagccggcccgtgccggatgcgtcaggacgtattccgtgccgttctgatcacatcgctggcgtggttggtgctattctcatgtctgctcttctactatttggaccgttctttactcatatcagacaggtattttggcatttattgtaataatttggggaaattggtttggttttgtcagaagtgctcggtttggaggtgccggtttcgtcaatgattcgccagtcagtcagcggattcaactaagtccttttgaccatcccaaaaaagtgtctattggacacatgtcgacaaaatccgaagctgttgatccagaagtgcaggcccaacttgacctccttctggccacacttaatttcgaccctcaaggcattcgattgaaggagcatttaattatgaattttcgaaattctaaggtctcggcgctggtggaacgggcgttaccattgaaagggaattggaggaggaaatgcaggagaagttcaagcagaaccaattcaatctgatggccagtgaccggatcagtatcaacaggacactgccggactatcgaattgaaaagtaagtgaccgacaaaagtggcaattgcaaaaataataatttaattttgtccactgaacataattaaggaccttaaatgcatgtggacgattggcattcttaattattgatacatattatgtatctcccccctcacgacagatgcaaatctgtcgagtcgtccttggccactaactccgcaactgtgtccatcattattgtgttccacaacgaggcatggagcactttgctgcgcacattgcactcggtgctgaacagaacgccgttgcatttgctggccgagattattctcatcgacgacttgtccgagcgcagctatttgaagcggccgctggagctgtacacacgccgtttcccattgcctgtccatctgctgcatttgccccagcggtcgggactgattcgagcgcggttggccggctcagcgatgtccacgggaacagtgagtgatgatttttggattttaaatttattcaacattttcgttgtccaaggtattgctgttcctggatgcccacgtcgaagtgtccatcggttggcttgagcccttggtggatcgtgtggtcgacaatcggaagcgtgttgttgcgccgatcattgacgtcatatcggacgacacttttgagtatgtgaccgcctctgataccacctggggcggcttcaattggcacttgaacttccgctggtaccccgtgccggaccgggaaatgaacagacgcggctgggaccgttcaactccaattcagtgagtattttgcgtgattcgaattcagagaaatgggtcgaaatttaaaattaaattgaaaattgtcagaactccaacaatcgctggcggtttgttcgcaattgacaagaaattcttctacgaaattggctcttatgaccaaggcatgcaggtggaaacatcaaattattcactttttgtttaaaaaaaattgtttcaacaggtttggggcggtgaaaacctcgaaatctcatttcgggtgcgttttctccatcaattggctcatttacggtggcatttttaggtttggatgtgcggcggcacattggaaatccatccatgctcgagagttggacatggtaatattacaatttattttttatttaattccataaatttactttttttgtttgtgttcgttcagtatttcgcaaacaaacgccttacactttccccggcggtactgccaaagtgattcatcacaacgccaagcgaacggcagaggtttggatggacgaatatgcacagtttttctacgcaatggtcccgggttggttcagcgtttatcttttttaaattatattattatttattcgatgaaggtgccaaacacgtcgaacttggcgatgtgaccgagcggaaagaattgcgccaacggttgaaatgcaagtcgttcaaatggtatttggagaacatttacccagaatcgccggtgcctgccagttttttgtccattggacaagtaaaaaaaagaaaatgcaatttttttaactgctgggccaataaaacagataaaaaatcccgagacgcgtctgtgtgtggacacaatgggcaaaaagaatggacagcccgcgggagtgagcggatgccacggcctcggcgggaatcaggtggactttgcttacaatcaaaagcaaattgctggtcagatgaggtataaataaatataaaacatttttgaaggcctgggcatacaccgaaaggggcgaacttcggtcggatgagttgtgtttgtcgggcagagacagtgcggtgagaatggacaaatgcgccagcaatggacacccaatgggcaaacaacagttcaaatatgtgccatcggtggggcatttttgggcgggcatttgggttgactaagttataatcgcgacatgttccagaccaaacaactcgtccatgtgaaaagccaacgttgtttggccgtcgacccttcggcttcgtccccgctgagtttgaaggactgcgagaagaccaaattcgagcatgtccagtgggagctgcacaatctgacatttcgctctgatccgctctctccgccgggccctccggcaccagcggcggagcggtaaacggcacaaagccaacaaataaacacaaatcgggtaaaacaaacgacaataaaagggggagtctattttgtttgttttttaaaacttatgtttggtgttgtctcaaatntttcccatatntttcaccagttttctcgacctgcagnngcatgca

SEQ ID NO: 2816 - DNA, 2467 bp, Heterodera glycines
acataacccgcaccatttggcggtgtttttatgtgcgttcggcaaaacaccatacattggccgttgtgaattcgatcactgaattaattaattaatcagttaattatagttttcatccaattagagttccattttgtgctcacattccttcctgacgacaacactcggaatggtccacttttgaggtggcgcagtcgaacgctttgctcagctgagcagacggacaatgggagccgagcagagcgattagcagctgaaataacaaattatttttaaaaataaaaatgccattgctttttcgatttctccaccttttcttgagtgaaagtgtcgaaattgcaaaactgttggcacgtggagggcaactgctgtttctgacagcacagctccaatttggcattgggcgtcatcagtggggagactgtgacagcagcggaaacagtagccaatggaaggtgcggtactgtagccgctgaattgtgacatatttgaaattcagagtcaaatggaggcgtttttgtgcgttgggggaggggtcggactttgtgtcgctttttcgcgttttcattttgccatttgccttttctcccatttccattcgctcctccgcccattttccactgcaaaaccatccgaaggaacaacgggagatggaaacattttgcctcttcccccccaacacacataaatacatatctctccgttccaatctaatcgctatttttgcatttattggccggtgagcagcaaattttttctcatcccccgccgttaaacaaattgtcgtctcctttccccaccgctcattccctccgccccctctccccctcatccttttattttactcattttttctccactctgtaccttctttcttagttcaaattccgataataaatcatttttacaattttaaaaatgctataagtaaaaaaagaaatacttcaaaaatgattattttttaaaacgatttcattgatttcgaaattcataaaaaaaaaattgcgtacataaaagaaaaaaatctgagcatttcaccattccaactttttctaacactttgcccgcttatttttactcgcccgtataaacttaacaagcaaaacaaattttgattgttttttataaaaccgactagaacctcaaattcttagtcaacattttagaaaacccacttatcagtttttaactttccatttccaatgactgccccaaaaactagaagacatgtctttacaatatttctacgtacacaaaatacaggaatagcaagctttagtaatttattaaacgacgatgtcttcgatggaatgttatcgctgtcgcgagacgggtcacattggtcgcgactgtcctaacagtggcgggggtggtggacgtggtggaggttagtaaacgaatagtggaagattcacatccgttctatttaggaggcgatagcgtctgctacaactgcaacgagccgggtcacttctcgcgcgaatgtccgcagggacgcggagggggcggcggcggatcgcgcggtaaaacatcaaatgatggctggcagaagaatgccaaaaattggaattcctcgtaggtggtggaggcgacatcgtctgctacaactgcaacgagtcggggcatttctcgcgtgactgtacgcagccgcgtggcggtggtggcggagggtcgcgcgggggttcgtttttcagcttcggaattattttcaaccccatatatatattaaggaggcggtgacaatgtctgctacaactgcaacaaaccgggacatttctctcgtgagtgtccgaacggtcgcagcggtggtggtggaggcggcggctcgcgtggtattagctcattttccattcactgggttacttatactgttcatttccttaggtggcggtggcggcagtgtttgttacaactgcaacaagcctggtcacttctcgcgcgagtgcccggacggacgtcgttagcggcgggagaagagaaggcgattgacattggtggaattattgttcggatgagagggggagacatggcctttttcgattttttttgcaaacccatcatcacttttccaaccattgtttcagtcatcgtgccatcttttgttttgttacgtatatataaaaatttattggccgaatcttgcttgcaattccttgtttgactatggttcaactcccctactgagtgttatttcgtgttccacctgtttgaatttgggttattggtgcttgggagacgggacgacgtgcatttgatggcacaaaaccaatttcccttggcgcggtgttcacttgtttatttaattgttgtgtttgcgtagcgtggtgaacttggtaaggcagaaggcgtgggtgatgagtttgcccgtggttattgtacgtttgtcctttcttgtatagttttcggtacgacttgaactccgcgccaccaactgatattggcggattgagaaggtcgaaatcggctg

SEQ ID NO: 2817 - DNA, 4061 bp, Heterodera glycines
aaaataaaaaaaattggggcacgacgagacgacctgagttttgtgccatgtgaccctccattgtttgaacaactttgccggaagggcaatggagagggttttggatgggtccccccccccgggcattgtcctctctgtgccgccgtcgtccatcaaattttggcacccttcgccccccccccccccgggcatttcacaaatgtcccccgggggcagtgccatggggctgggggcattggcgtcacaaaataatgctgccctggggcgacacatttacaattcttttttttcgccttgtcgtcatttttagcaatttctgtctgtctgtccatcgttatgctcctctcctttacatatgtaatgaggcccttaataaatcatttatcatctgcaaaaaacttgtcaagacgacacccaccggtcgggtctcgagactcactctcgaccccgtcaaatgcctatgttaaccaagggaattgcttcatcatatttgttgcttcttatgttgttgaccccattaaaattgttggctctagctagaacttttgtgttggcagcttaaagtttctttttatgtttggcgtttttcccgattttctatagggccgtttttgatttacatttatgaactcctaaggacctggaaagagaacgagatcctcgagttttataataataatttatacgcaaagcgtgacgccgccaaaataaaaacaacaataagataaagcaaaatggtcacatatgagagtggttcataaatgtgtaaaacgtcatttttggattttttaagggccgaaccctaaaagattttatcctattttggcattaacttagatttcttaacgaaaatgtcaataaaaaatttgtaaattttcagaaaggttgatccaaaaattattttttaaaggatttatatttaaatgcttcactaaaatccggaccgggtcagtttagtacggccggtttagtacggccggtttagtacggccgttttagtacggctgttttagtacgagggtcggtttagtacgagggtcagtttagtacggcaaactgtttttgtccaaaatagattctactgattttttccgaaaaaatgtttaaaattaataacataacatatttatcaatgtgttaacaacaacaaaaaaataacaagcattgaaaaattacgggcgcatttcataatttcgagaaataccaacgagcaaattgatgatattatcgggattaacattggcatggtaattgtggtcattttggatagccgggttattgttgatggcattgtagccctgcaaaagtcgaagaattctggcatcggcggcacgatatttgggcttctttagaggagggacttcaccagcgatgcatcgggcgatgtctgcatcaattgacttttctcatatcgaattgtgttgatgaagcggaaaacagttggatataaacaagcaaaagcccgttgaatgaaaaaaaaattagggtttactttgcctgaagctataaaaaggcggtgccaaactgaaggtttcgctttgtttttattttctaattgggatattcatttatattgtagctaaacatagatattataagtttttccttctttataattgacaaaataaacatttgtaacagttatggacaaaaacagcttgccgtactaaaccgaccctcgtactaaaccggccgtactaaaccgaccctcgtactaaaacggccgtactaaaccggccgtactaaaccggccgtactaaaccgaccccgaccgactaaaatcgccttctacccgcattttaggtgccacttggcgttttgtattatattgccaaaaaaaatcaattagcagtgctaaactttcaacaatttctgactcaagattagcaaaaacaaaagtagtgaaagaagtgccaaatttggtgtcgtttttttgccggaagggtttttgtgtgccgccgcccatttgcaaatgaatggcattttggcattccgttgtccccttttttagcaattcaaaaataaattttcccacaataggcaagggaaaaaaaacgacaacaacagaaaatctccattaaaatgaaaattccatttacaattaggagaaaaacattccaacagaaaatggaacaattttttgttctttttttaattttatttcatgagaatgttacgacaattgggaattattggcattttgcggcggcatttttatttcctataattttcgataaatattttcgggaagctccggcagtgccggctgataggggttgccgggaaaaaataaattttgaatttttttttctttgccttttccaaaaaaccacaaattagtctcattttgaaaatttagccttgttggcgcctcgagaaatcacaaaatgaggctaaagcctcaccatgctgggtcgtttcataaaaactcgcaattttagcaatttttcgacaaaacatggcataactttgttccatcaacttatattaaatttgataatttatttgaaattttgcaggctaatagagaaaaatctctgctatcgaaggataccaatacttttaagcaaacttatgcccatatttgttcgaaaatagctaaaatgccggattttactaaacgacctagcaaaaagatcttttctaaatctgtctgaccgattttaaaacggtctttcacagcactccgttaactgcactctcattcttccacactcttactgcgtttctttgtttctttattatttttactgagggacggtaactcaaaattttatgctttaaacctaaagcttaggaccgattccctgccaacaattttcttataaaactccctataattgatccaattctggttttgttttttgttcctaattcccaccattatgccaaaaattggcgcgaaattaagaaattaaaaacgcacataaaaccaatttctcgcgttccaccgcattccgccgtggggcacactttttttcaacccaaaaacaaacattgggccgccctcaatttttgtgggggagacgagggcatttgatccgccgctgagcgtgcgcgatcgaacacacaaaagaaaatgtgtcacatttttaagcagcttcttcttagcacccgctcgctcccggcgggcgacgagaatttattttgtttttctcggagattttgtgcacctcaccggacccgaagggggcaagagccgaaatgatcagttcttctgatcacttttttttacacttttcacacaaaaaaaaatcacacccacactctggcattctgcgtagttgatttgataagagcttttttcgttttaaatcgcatttgcattagaattaattaggtccttatgatcagtgatcattctcgaactaaacagatttttacatttttgatcagtccttctgatcattggattgattcaatcgctctggttacggttaatggatttattaatactaattttttttattggttgttaattggctataattagggagacgaccgtaattcggaatcccacaatcaaagtcattaaaagcaattagggtccttttgatatcgcactttaacacccactgaaaatttaactcagaaaaacaatctgcatgatttatattcattatcatatttgtctgcacaacaattaatttgcgtcacctgctgctgcggcgccgctcgccaccccaattgcataattaacccttaattaccttcctaatgtcttccgcgtgcccattccaccagaattgtcgcgtgcgattgccacccgcggatgaatttgtgcccgccgatgtcactgctggtggcacctcagcgaaatcagcatgcgctgtgatcgcctcgggcaatgccacgctaacctttgctgcccatccgtttgccaccgatccgcatgccagtggtggcggaggctacgcgcggcgcttaaccagccccttgcgggcgtttggtcgtcgtctgcgacaacagtcgaccaccagcagaactgtggatgatctatttgcggaagaggatgccaattctgccactgtcgatgcggccggcataagtacgcctaagcg

SEQ ID NO: 2818 - DNA, 2645 bp, Heterodera glycines
  unsure (1)..(2645): unsure at all n locations
gcagcaccggcacggctgcacngacgacaagcgatgcggcaggcaacggaccgccggctttgagcagtccacgctgcgacaacgtctgctcatcacgcgcattcagtggtcaaaggatctgaccattgtgtcggcggacgatgaagcggagatgaagccgaagcagcaaaaactggcaaggattgaatggacatcggaggaggaggaagaggacgaggaaaagccgccctccggggatgaggcggaagcggaaagcagtgaggaagaggaatacgcacaaaaacagcaggcgaaagaagtcgaagttgtacaccgagacagggatgaggaggaagaggaggaggagccagaagagacacaattcgcttcccatccgtcggacgaagcgctgctcaaaacgccggaggcgctgccgtcgaaggcgggcggcccaacgaggatgtccaagagtcgctcgttgcaggagatgattcgccactactggagcttgggcagaaaccatggcacaacatcagcaacaacaacaacaaatgcaaatggcggcattggcacgccaaaccgaaatgaggtgagtgaagagatgcatacagctaattgggctaattagttatattaatttaattaattaatgataaattaagcttctcttttgtaacaaagaattttgctagggtcaaaagggttaaagaaaagtgccgcttaatattggacatttaggcgtgtgtttttgttctaaaatatacctaaaatcacactcaaatttcaggagtttccagtacaactaaaatggttgattaggcatttatattttatcgaaaaattccagaataatgacaaaatccaaaattagaaaaaatatacaaaaattcgacaaaaatcattcaaccatattatacaatttacgtatttaaaaaatatattaaatatagaagctagaaaaaaaagttaaaatttcagttttgctataaacattcaattttgttaatgattcagtccctatcccaacgccgtcggtcccggcattgtgccgccaccgctgttggcatttctgctgccgccggcagtgctatgccacgtgcgcgttccaccgatgagcgactgttcgctgctttggccagccacacacagcaattggtagtttccggggaaaacatggtctgcataggtgtgctgtttatacccgagatttcggtgccgatactcaagactctcgagaccgacatcaaccccaccacttggccacactgaccgtgtcaaattcattttttcaatcaaacaaattgttttttttgttgatcaaaacacagtatcttacaatttagggaatattaaaaagtcacaatatttagttatgagaaattgagattaaaaatgtgagaaaagaccctccaaaaaccccaagaatttcttagtcgagacttgaaattatagtggcaatttcctgggcattcgaactcaacaccgatttggtacttcaataaacttgagcattttttcttaacccgaaatccgatacagagacataattaaatattttttgtatacaaattaaaatctttaaaggagggagaattaaaattaaacattatttaaataaaggaatgaatacccatataatttttataattttttaatttaggtgatgccccagtttctgtaccttcgttcctcccacagcagcgtgttccaagcaagtgcgtgtgaggcgattaaaacgcgcgcgcgattgggctttttttttttggttaacattgcttattgctattaccatactgtaagagacagtaagtgcaagtgacacacagtatgcttattggagtcatgttatgcttgttctattaatttcaatcaaaaagtttgaaaatattatttaagctccccaatttgctctccatcattaggggatcaacaattatcgcctcaattgatctaaattaatcttcctttcgggaagcttcttctcgagctgaatttccgaaccttttttgtccgtaacctttttgaaagagaaccaacttaattataatttttttttaattttaaataatcgagcaaagttttttttaattttttttattaatttttcagttttttttttgttgcaattttgttgcttttccgaccaaatttcccgttgaattacttccctattcctcgggattggctctcgagttcaatttgaagtgccgacgaccatagaataataatttggtggactctcagccattgtgcataataattaattacgcttttcaataattccatgccactcccgcgaattaatgacgccgagtctcgagaaaataattttattctctcgaaacacaatgccaaactcatgcaaaaatgcttttcctctcctcatttaattcaatattcaaatttattatttaaaaaaaatttatgtatgacaaatttgatttcattctctcaccaaaattcttttaaaaaatttttttattttcgctcttatccgtcttaaaaaaattttctttttgatattccaataaatattcgttcacaaaatgtttcatattcgacattatttcgtttattttaattttattccaattgttttaggctattaaatttcttttcgaataattaaatccccccccccctccattaatttgttccttttttta

SEQ ID NO: 2819 - DNA, 1065 bp, Heterodera glycines
ctttttgtgaaacttttgaaaaaaaatttgttcatataaaaaaaatttttgcaattgtctaaaatgctccttagtcattgttttggttttttaaagtcaattctgaattttttacataatttttagagctcgacattttgaaaaaagcctggacctggattccatgttggacctggacctggatttcctggacaaaaatccaggaaaatccaggctcctcgagacctggatccaggcctggacctggattttttgaatttttttttaaaaagcaaataaatgtttgaaaagatcaattaattgcttaggaacacataaaaatatctattatacaataataatatgtttttaaatctatttaatcatttttcgaaaacttttacaaaaaatcgctgaaaaatttttcaaaaaattaattttgaaattttttcttaaaaagttttgatttttttctaagtttatagttaaatcgattttaagaattttatggaaaacataagaaatttgtaaatatcagtgcattcagaatcaataagaaatgcttttttttgcggcacgcttcaaaaaattttggagacaggggctcggcgaaaaatttgtaatttttaatgcgatttcttaacgattttgttcaaaaaatgacaacattttacgattttgagccaattttttttaagagaataagaatttttagggggcggtgggaaaattttggcagattttatacccattttaaatacatttagccataaaaagactaaaaaaatttatccaggaaatccaggttttttgagcctggacctggacctggatttcctggacaaaaatgcaggaaaatccaggtccaggaaaaatctaggttgccgaaaaatggtctggaacctggacctggatccaggaaaaatccaggcctggatccaggtccaggtcgagctctaataatttttggcatttttttgaggattcaaagtcattattgctagtttttaaagcatattttagtgcatatttgggcatttttcgggtttttagggcatatttgggggatttttagtgcatatttta

SEQ ID NO: 2820 - DNA, 3901 bp, Heterodera glycines
cgaaaccgtcagtcgaagaagacccatcaaaaccgcgtggggacggcatcatagggcattcgggtgggactttcgattcggcatgtccggcatggaacgaaacattcaacaaccattccatgggtaaatcgctcatcttcgtattcgtcaaagtcgccgtcttctccgttcaagccattcggtgcataaatgggcaccggcagctaaatacccatccgattggtcgcccggagtggctttcgtcgccgccggtgccgatgtaattagcagatgagctgctctcaggcaataactgtcgcgatgatatcccaggcatattttgtgcatgaccataatattcttcattagggtattcatggccgtaataatcagtgtgagtttcacgagcccctattggacgatagtttttattcgtcagcacatctttagtgctttgtacgcaattggataaatttggtatccatcgttgctttaatttgttaaatttgcttggcttttttggccgaatttttgtaacattttcttcgccataataattgttttcgattcgagctgttggttcggaaatgcttctggtatgtgcaccatgaagagtcggactaaatttagaatcttaatacactaaaatttagaacccggcaattttgataggaatggttgggttttttttgaatctaaaaataagttttttatgtaaacataggatttgatcactagggttggcagttatatctcatgcatttctttctggactatggatgtctgaaaaaaagattttatcttgtttaagcttctctcacgaatttccatttgcatatctgcattatttacgaatttgcatatttcgtaaagaaattgtagctttattatattttttctaaatttcataccatatttgtcatttattcttgtggagaaatttaaagctactgaatgatccacgaatgtaaaattaattggcgtaattttatgattttatttttaattttagtaccacttggcggtttttactaacgtcctgttgggtttacgaaaggacctaacacccttgaaatcagcatccatgcgtttgaatactcagttaccatttaaaacagggctatgaatataaggatttaaacgcacgcattttatgagttagatgggcttagcttaaaaatattttgtgcgtattttagtgacaaattgtgtgctctcattggctcccggacaatccgacagtggacaatccgacagtggacaatccgacagttggacaatccgacagtgaggacaatccgacagaagtggacaatccgatagtggacaatccgacagtaaatttctattttaaaaaatattttcaagtcattagaacggattatttcctaaaaatatctcaatcaaatcaatttagcttaaatttgttaccaaattaaaataagttagtttggtatgctggtaacaaaagtacaataaaataaaaaataattaaagataagtgatccatacaaccataaataaataaatatgcaaaagtaaatgtggagtgacccataaaaccaaagtgatgagaaatgagagcatttttgctgataaaaatgtttgccaaagtcttgaccattccgtttacctcttcaaatcattcattcattttattttattttatttacgtgttaaaggccctcttaggcgtatattatgaaaaatggcgaagaataaaaatttttaattcctttttaaacagacaaaaaagtttaggcttaactttttttcagaaactgatcagaagcgcaccaaactttgcagggacatttaaaggacgcgaaatacctattttaaatagtaactagtcatttccttttaataattttttttgattgagatatttttaggaaataatccgttctaatgacttgaaaatattttttaaaatagaaatttactgtcggattgtcctcactgtcggattgtccactgtcggattgtccactgtcggattgtccagtcacgctctaaatcattacttcccctttttttttaaactcgtgtggcggggtgatcggaagaggcaggtcattcagtacggaagtttatcgaataattaaattaattaggtaattaagtgataatggaatataatctaataataataaaaatgtttggctcatatctgtttgcacgaccataaaaaaagaacgaccatataataatttatgacccgcttcttccgatcacctcgcacacttacttttttcgattcggctcaccacggtttgatcaaacagtttgctcaaaattcgagttttcaaataattggtgccatcttttgcacccctatctttgtaaatgttgtctcgaaattaatttttgacatcccttaattttttcatttaaatttattctcttcgttttgtttatctgatctaatttgttgatttgctgatttatcttattttttaagaacgattttcggtccaaattgccccaattagtctcaaaatactcaaatgtataatcgtcgccggaccctttcccatcggcgaatgccaattcccatcccaaaatgtccttccggcgattccgttggtgaattttttggatttattgttcgatcaccttcaccccattcgccaaatgctgtcgaagcagccaaccaaggtgaagcaattaagttcaattaaatttaataacttttttcattaaaatatcataattttaaaaaagtgctaaaaaactttgtattttccgtttatccgtaaatttactagttttttctgacgaatacagtaaaaagcccgaaatgatggcccataatggtggtggtaattactggttttaccgtaaccgttaccgttaccggaaagtatcatatttagaattattaaaaaaagcatttttgactaaagtaatttgaaatattttcaaatttatgtttcttcagcgtatatgtatgtttcaaaatggaattaaatagcacagcgccgcaggggcaatgcttgttttttaggctattcattttgccaaaatttaaaatttgacgccccccgcccactctctctctttttctgccacgccacataaatcatgtgctgttccaatataaaaatgaacctacgtacgtacgtatgtatgtatgttagtataggtaggcccaaaaaaattggagaggaaggaaaattttaattttgtgcttttctcatctttcctacatttcctgtgccctccctgccccccccccccctccgggggcattttggcccatccctttcgcccgccgggaacaacgacaacgacagcaggggcacaattggcatgccccccgctcagttacctcacgtagctggcgaaaatttttgttgcctctctcacaggacaaacaacagcagcagaaaggctcttcaaggcaaaagttttgttcatgcacccgtcttgaaacagaaagcatagagaaagccccgggaaccattgccaaagatcaaagcgtttctttccgccgctattctcttcccggggcaacaacagttggcactcggtggccccccttagcttggcctgcctgccctcccggcttaaactgattgctgatcaaatcgatcgatggcaatcgatcgggcccgaggcggcgagggaggggggggggggggggggagctactgcgttgccggtcgtggcgccatttccccgcttcccattctcagctgttgaaagtgattggggaagagagtgtgtcccaccactgattgccccccccccctccggggggagtccaactgattggcccctttcacttccattacccgcccccctcctattcttgacactctcgcggaggccgtcatcgatctgacggcagagcaaagagagggctaacgcaaaaagtttatcccttgacactcctaaacaagaatcatccccttct

SEQ ID NO: 2821 - DNA, 1421 bp, Heterodera glycines
cagcagtttctttccgtgccggaaccgtccgcttccggtgcgcgcggtggtacgtgggcgatgtcatcgtcgccgccatcctctgtcgcatccacttcggcttcacccatgctgcagcagcaccgttcatacgccgccatgggtggcggttgggtgtcgcagcccgcgtcaccgatgattccgcgcgatcgcccgtcctcactgctgttaccgcctccaccgttgttcagcgccggctcatgctcgccactacccaccaccaaccattatcatggcaatgatgatgatgatgatgatcaacaggacgctgcggctcagcaacgccgtctgcgtcaacagcacgcggctgcggttcggtcagagccgaatgtgtgcggaagcggcaagcagcagcaatcgatgctgcccttcttacgctcgctacgtcagctgaagctgttcaagcggcgcagtgcgtctgagctgtcgctggtgcttgaactgctccgaaatgttggcggcggtggcgacgacagcaacggcgccatggtcaatggctgcgccgaagatgcgaatgggtatgacagcagcgccctaacggatgacgagcagcagcagatggaggcgggcgacgacggcggactgtcggcgcggcaccggcatcgccacaatgctagccagcgctatcggcatcggacagcatcgccagtgccggccgccaccgggtcggttgaacgtattcagcggcaccacacgactgtccgtcgtacggccacaacattgtcgcgtcgcaccacccaacgcagtcagcagcggcggacacggcgccgtttcccatgggcgcactattcgcccgccgccatccagcgtcgttttatgaatggtcggtggtcctccaattagatgcaggctgggaacggggagcgagtagacggggcaatattgcaggcaaattacgattacggtattttggtagtaaaaaaacacattttattttttctcaagagcttattcacaaatttattttttgttttattttttgtaaataataatgtctaacttaagccctgttatttttaattacaggttactgattttttaaggaaatccgtaattatggattacggatttccgtaattaaaattccaattatgtgcaacctttgtacggggaagggccaaaagggtgttcggggcagaggggggcacccgaaacggacgggcctaactgcgtcacaggtacaaatgtgtactttattcttgtcctttttctcgacattggtcttgtttcattttttaaaatctttttagcgttttcattttttaatggatttttttttttgctctttcgataaataaagaaaaagaacaaaattcacacatacaaaattagctgacgaatatatggtgttgacacaaaattttcagcgtttaaaatcaaat

SEQ ID NO: 2822 - DNA, 1542 bp, Heterodera glycines
  unsure (1)..(1542): unsure at all n locations
ttttatagatgagctcaactgagcactcaccgcnccagaaaagtctcatttttttctcaatatttttggactttccaaagcaattatgatatgaattcaaccggaatttttatgccatgacaaagaaacgacacatgttgtgggctcacacatgcttcgaagctttcaagtaaaaatatggcatatagatttagagaatccagtcgatgaatttcatatgattcaaatattcttaaactttttggatttttaaataagggagctcagccatttcaaagtttccacttttatagatggagctcaactgagcactcaccggcccagaaaagtctcatttttttctcaatatttttggactttctaagcaattatgatatgaattcaaccgaatttttatggcatgacaaagaaacgacacatgttgtgggctcacacatgcttcgaagctttcaagtaaaaatatggcatatagattttagagaatccagtcgatgaatttcatatgattcaaatattcttaaactttttggatttttaaataagggagctcagccatttcaaagtttccacttttatagatggagctcaactgagcactcaccggcccagaaaaggctcatttttttctcaatatttttggactttctaagcaattatgatatgaattcaaccgaatttttatggcatgacaaagaaacgacacatgttgtgggctcacacatgcttcgaagctttcaagtaaaaatatggcatatagattttagagaatccagtcgatgaatttcatatgattcaaatattcttaaactttttggatttttaaataagggagctcagccatttcaaagtttccacttttatagatggagctcaactgagcactcaccggcccagaaaagtctcatttttttctcaatatttttggactttctaagcaattatgatatgaattcaaccgaatttttatggcatgacaaagaaacgacacatgttgtgggctcacacatgcttcgaagctttcaagtaaaaatatggcatatagattttagagaatccagtcgatgaatttcatatgattcaaatattcttaaactttttggatttttaaataagggagctcagccatttcaaagtttccacttttatagatggagctcaactgagcactcaccggcccagaaaagtctcatttttttctcaatatttttggactttctaagcaattatgatatgaattcaaccgaatttttatggcatgacaaagaaacgacacatgttgtgggctcacacatgcttcgaagctttcaagtaaaaatatggcatatagattttagagaatccagtcgatgaatttcatatgattcaaatattcttaaactttttggatttttaaataagggagctcagccatttcaaagtttccacttttatagatggagctcaactgagcactcaccgccccagaaaagtctcattttttctcatatttttggacttcctaagcattatgatatgaatccaccgaattttatggcatgacaa

SEQ ID NO: 2823 - DNA, 733 bp, Heterodera glycines
  unsure (1)..(733): unsure at all n locations
tttttttctcaatatttttgtaatttctaaccaattataatattaattcaacaaaatttttataacatcacaaagaaaccacacatattattatctcacacattcttctaatctttcaaataaaaatattacatatatattttaaaaaatccaatctatcaatttcatatcattcaaatattcttaaactttttaaatttttaaataaactaactcacccatttcaaattttccacttttataaatatanctcaactcaccactcacccccccaaaaaactctcatttttttctcaatatttttaaactttctaaacaattataatattaattcaacctaatttttataacataacaaagaaacaacacatntttttcnctcacacatccttccaacctttcaactaaaaatatctcatatagattttaaaagatccactcaataaatttcatataattcaaatattcttaaactttttggatttttaaataagggagctcagccatttcaaattttccacttttataaatcaacctcaactaaccactcacccccccaaaaaattctcattttttggtcaatatttttnnactttctaaccaattataatatnaattcaaccnaatttttatnncatnacaantttttttaaagatnttntnnnctcncnncatncttcnnanctttcatttaaagattggcatatagattttagagaatccagtcgatgaa

SEQ ID NO: 2824 - DNA, 2188 bp, Heterodera glycines
gttccgtctcgccagttccgtctggggccggttccgtcttgggccagttccgtctggccagttccgtctcgccagttccgtcttagtactcaaagggccggttccgtctcaaaaattttggacccaattaaatttaattttaaatatcagtcaatttgaatttctgtttatttgcaaaagtaaaataaaattttgaataaataacaaaatgctaaaacaataataatcattcattccatttgataattgctggaaatcccctaagcatttcattaaacaaattcggattattttgattttggccgtattggtgatcatcgttgatttgcggctgcgctttttcctgattgtagcgcttcagaatgctcaaaattcgtctgtccgcttcacggtaacgctttgctttcagcggcggagcatttccggcgaggaaatgttcgaagtccacgtcgattaatttctgacgctcgcgcaaaatgttgataaatttccatattggggggtgtccatgtccgatcgcatgttgcaacgttcgatggtatgcttcggcgaagttgtttgtgcgatcggagccgttcattgttcgctcgtacacactccattcttcgggacgaaacaatggacgagtgcgtgtgccgttgttgcgaagccgtccaacgtagttgattatgaacctttaaaattaataaggaaattggaaaaaaactcaaccaaccaatcgagaacgccctcaagttcacccggaagataatcttctagggctgccagcgccggtgtaaggtcctcaagcggcacaaacgccagcgaagtgatcattttggcagcttgtgcaaaggctgcgtcggttgtgaagcgctaaatttgagaatttcaaaatcaataaatttatttttcttacgtgagtttgctcgtcggtaagacgtgatttcatgttgcgcaccaaatggaataggcaaaagttgattgagcattgtggatgttttgcacggagtgcgttgaccatcgcctgttcgaagtccatggacgcgtttgttggtgaaaatgtcggccagcggttgcggaccatgtcaaacatcttttcgtacgtggactgcgacttgcacgtcagcaggcaatgaaggaccggaaacacccagccaccacgactgaaatttggtgaaaaacgaatgtaaaacaaaattgacaaaaaagtaccccgccaaaatgacgtaaagttgtgaaaagagcgttggtgcacttgcaaaggttccgtcagcgtaaatgtacttcatttcggaagcccaatttccgaaagaaagtcggccaaaaatgagaattctaaaattaaaaaatggctgaaaattccccttaaacacaacgctgttgtccgtctcgcccattttcggtgtatgttcctgaatccgccagaaggaaaagctcctgcgcttcttcggtgcgtttgtagattcggtactgctcgggaagttccaattcttgaagcgttaacggcactggcggcggcaattcaatttcatggcggactcgcttcacaagcttaaaaccaaaaatgtgaaaaagtaaaaaaataaatagatttttcactttttttgtagcgttctttgttggaatgttcgccattactggcgtcggaatttgctgaagcgtgtgtgccctgattgaccacggcaatcatctgctaattattggtcccacaaaaaaatgaaaataaagcactttttagactttttggtcatttttcctcatataaattcccatcatattgacttaaaatccatcgacaactaaatttgaatcttcactatatatttatcaactgattggttttcagcgattttttgtaaaaatctttgaaaaacttagtagttcaccataaaattctgaaaaattgctgaaaagtttttcaaaaatttttctggcattttcttacgaaaaatttcctaagtactttttgaaaaaattcaatttgaaatttttttaaatttttcgggggtgtggggaaagaccacggggggagggaagaccagctctgcaactgattgtgagcatgttggtaatgttcctttttgtatttccttcaatttatttatttgcgcttccatttcatcaattctggccaaatgtttagcaaattgcccaatacaaactgaaaaagagtttattttttattgaattaattttatgctaattg

SEQ ID NO: 2825 - DNA, 2962 bp, Heterodera glycines
  unsure (1)..(2962): unsure at all n locations
ttgtgcatgtgagtcgcatggggacgggagtattcttctttcagagcaattggnggaaannaaaaaaccagcggcagctgttggacgcattgatctcagccaccgattgaatgggcgaaaaattaacgaaccatttgggaataggcaaatggaatccagcagaaaccatttgacttggttctatcagcaagcaatgaacgcaacatttcaatgaaatttgagttcactgataatcggaaaggaacatcaattaagagaacaaacgatgcaacacattgatgattgagagctaaagactgactctgcaaaaaaaagacatcttttctaaatgttaacaactaaaaaagccatagaaagcgccgtagggggagaatttaattttcaatttagctggaaaaaatacattagagaattcaaatagtacggacacggaggcgcgaaagagggcctaatgcaacagaaccggtgtctctaaattgcctccgtaagggacatcatttgcgtgaagtgtcgctaaaatcagttatgccgtttatgcaaacaacagcttcatttgaggagtttttttttgcgcatgccgagaaagctaagcatagtccggaggcaaaaaggccgggcgaatgggcagagtcagagacatttgtttcttctgccgtggttaatgacagcgaactgcttccgaactaaaccgccctaccacatgacatttcattcataattcagcggtaaaagacaatgaatgcaaaccaaagcaacgaccttcggtccaacaattcggcacttatcactaagttagaataaaatgccaaacaagaaccaatcagaaggcttttaacctgctcgatcaacccccccccccccccccacagtgcccaagccacgaaatgtccaaactacgaatcccataaagccacgaataccccggccaattgttaagatgcaccacgcaatgcaatttgtgaagttgaaactagagaccggaaatttcaaatttgcggatcctgttgcaggattggaattcaaaattttttacaggacaggatccggcaggattaatcctgcaaatcctgcattttaaatctgcaggatcctgcgcaggattgcggattttaggaaatttcaaaaaattctgtattaataaaaaagtttttcaaagtataaaaaagtattcaaatatatttttaaaccaaaaaatgatgaagatgaaaaattaataacgtttttttgcttacactccaagcaatcgactgaatcttctttaatgcgtttaaaaagaccgatttgccaaattgggtggctcataataatagcttaaattaaagtaaaataatttttatttaaatttctttgcaaaaaagccataatccattatgtatagggatgggatttttaggcacaaaaaatcgcgaaataggcacttaaaaaggcagaaaaatcctaaaataggcacgaaaatagtaaaaaaaaattttattaacgctttttaggtagcaaaacacataaaaaattcaattgtataaacttttttcgaataaggataagtttttaaacgaaaaatttttattaagaaaaaaatttttgaaaaaagaaagtttctgaatatttggcattctatttttaaaaattttcaaaaaatcaatgcaggatcctgctgaatcctgcataaaaatcaaatttgcgggtcctgttgcaggattggaattcaaaattttttacaggacaggatccggcaggattaatcctgtaaatcctgtattttccaaaatatgcaggattgcggactgggatcctgcaaaatcctgcgcaggatcctgtcctgcgccggtctctacaaataatnacataattttcanccaaaaattaaacaaaaatattttttattcactnattccaattacaaataaataccactcccctttttaanntcaaaaaaccaaaataattacctaaaaaaataattttttaaattagaaattcttgccaagaaaaggaatttttgataaaatttttttgatttcttaggagtgatttttgaaattttttatgtcgattctagggtgtgtattttttgaaaaaattttttggtcgattcttaggggtgcattttttgaaaaaagggtgttttttaaaaaaaaactaacgtcgattcttagagatgcatttttattttatttttttacgtttttataataatttttttttgttgaaaagcagaaatagttgaaaaaatagtttttttttaaatttcacaagccaaatagttgttaaaaatttttataagcgaaaatagttgctaaaaagtcgctctaaatcgaaaagtgatcgaaaaaaatgtgtttttgcgcttatctcagcatatgctatccgcaaaaaaaatcggtgaaaacctaaaaatccgttccctgataataatagtccgattataaatcctgtgatgtagaatatgaataatttgattaatatttaagaattaattaagttgtaatttcacgtttacttttacaaggtttaattaatgaaaataatataattttgttacaattatatatttgaattattttttaaatatagtaatttttgaaaaaatatttttaaatagaaattataaattatttgtatttcattttggtcaaattttgtatcattctctcatagcattatttttcttgaacatgagtgtttcttataattttaaggcctaataaagaaatatttgattttttggaaaaaatattcttcgtaaagggtgagaaaaatttaattttcacaagaaatttcggtaaaactgttatatccgcaacattcaagtttccatatcttgtgataattacattgccctactttcccccggcccaatcccgtcataaatttgtctgtctggtcatctttatcccagnncatcctgcccctctcatttccaaaagtatcgtgacatttctatcccattcacctctgtatgcca

SEQ ID NO: 2826 - DNA, 2756 bp, Heterodera glycines
aaatacttataaaattttacatggctttacacatttggacccaaattctctgtttaaaagaactaacctaaatactcgaaataagtcatttttccgtttaaatgttaaattacaatctaaaaaatcttctaaatcttttgtaaacagatcagtcaaggcctggaatgcccttgataaaacattaatgtctagctccttaaacacctttaagaaaatattagaattgactcttgattctgaaagcaccaatgtataaaccaattattaacttttgaggcatttttttgactttgaccaattttattttcatataattttttcattattgtttattttaacctgtgatctcactcgatattttatccacttactctgcgtctattttactgtgatcactgatcagtcatcagagaagtggtccccgcccttctgatggcaattttttctttatcgataaataaataaataaaattattaaaaatgtgatttttttaacttcgcctaatttttcagacttttttttttttgcatttttcgtgctttttggattttttttttctgactttttggcgattttttatgacttttttagtcgactttttgaagatttttagtgacttaaattcccagccctacttatgtggtttagaccacataaaataaaaaggcagaaaaatcctaaataggcacgaaaatagtaaaaaaattttattaacgctttttaggtagcaaaacacataaaaaattcaattgtataaacttttttcgaataaggataagtttttaaacgaaaaatttttattaagaaaaaaattttttgaaaaaagaaagtttctgaatatttggcattctatttttaaaaattttcaaaaaatcaatgcaggatcctgctgaatcctgcataaaaatcaaatttgcgggtcctgttgcaggattggaattcaaaattttttacaggacaggatccggcaggattaatcctgcaaatcctgtattttctgcaggattgcggactgggatcctgcaaaatcctgcgcaggatcctgtcctgcgccggtctctagttgaaactattcgtgatttaggaattcttattgacaataaatttactttctctgaacacataagcaaaattacccgtaacgcctactaccgtatgcgtttacttttccgtgttattaaatcaaagaaaattgcaatttggaaaaatatttatgttagttatattcgtccacttcttgaatatgcccctgaatcttggaatccgcaactaaaatcgcatattatcaaaattgaaaaatgtcaaaatatttcactcgaatcgctttcagaaaatgttgtcttccaaatattccctatgaccaacggcttcggttttttaaattagctactcttaaaaaacgaagaaaaatttttgacctcctaactacggcacgactacatttcgccaacttgacatttcgccaactaacctaaaaacattcatttcgccaactcagccaaaatctgacatttcgccaactgacatttcgccaacttgacaccttgccaactgacatctcgccaacattcatttcgccaactcagccaaaaacattcatttcgccaactcagccaaaatctgacatttcgccaactaatttcgccaactagtcgaaaattgaattttaactatataatgatattaaatttattttaaaagtgcttcaaagcaaagaaatcttcataaaatatataaaatatcaaaaaaaacaataaaatatgaaaatgtttaaaatcaattttcatcggcctcagtttcttcaccactctctgaatttccacggacgtgaagtccctccgcaaagccttgcatcacgagcccgagaatttgttcttggccctagtaaatgttgtatcattattcgactgaattgttttctacctgttcgtcatttggtcgagtgcttcattggtgccaagcagctcaaagacttcgtcgttgacgttggtccgaatctgtgcgcgcagttgagatggttgttgctttgggttctccgtgatcagttgcttcatctgatttcgttttgactccgcatgaaaacgcgatggggcaaggccatgatggtgttctttgggacccaaaacgcccgtcatcagtccctcatcctccagttttgctgtcgctggacaattacgccgttcgcacctgaaccagctgccatcacttcgtattttcaaaaagcgaaagcctaaaaattaaaattaaaaccaaaaaaaaaaattttaacaccttggtgccaaagacaaagcgctcctcggattgttttgccacgttggaaatgaacaggctcacaattttcttcatcatcgctctcaccgacgttcaaatcattgctggtcgatacaccttccatttgttgttctgcggccgtcctctcagcattcagtactcagtcttcatttgttggatttctgggccgtttaattggcttttgcaaactctcaagaatttcgcgaacagttggcatttcttaatataatctgaataaaaaaaaacaaattctaaaaattaggcataaaaaaataaaaaggatgatgtatttgatatcagaacagattcatttcctcttatttactattccttaataattcttttttgatcagttggcgaaatgtcagttggcgaaatgaatgtttttggctgagttggcgaaatgaatgtttttggatgagttggcgaaatgaatgtttttggatgagttggcgaaatgaat

SEQ ID NO: 2827 - DNA, 932 bp, Heterodera glycines
  unsure (1)..(932): unsure at all n locations
ttataaaattttacatggctttacacatttggacncaaattctctgtntaaaagaactaacctaaatactcgaaataagtcatttttccgtttaaatgttaaattacaatctaaaaaatcttctaaatcttttgtaaacagatcagtcaaggcctggaatgcccttgataaaacattaatgtctagctccttaaacacctttaagaaaatattagaattgactcttgattctgaaagcaccaatgtataaaccaattattaacttttgaggcatttttttgactttgaccaattttattttcatataattttttcattattgtttattttaacctgtgatctcactcgatattttatccacttactctgcgtctattttactgtgagcactgatcagtcatcagagaagtggtccccgcccttctgatggcaattttttctttatcgataaataaataaataaaattattaaaaatgtgatttttttaacttcgcctaatttttcagactttttttttttgcattttttcgtgctttttggatttttttttctgactttttggcgattttttatgacttttttagtcgactttttgaatatttttagtgacttaaatttccagcactacttatgtggtttagaccacataaaaatttttttaaaggcatttccaggggttttcggggtcgctaagcacgaatctgaactcagattaaaatttcgaaccctaaccacgaattcgaacatttttcgaattttctttgtcaaaaaataactttttttttcgccgtcgccttcagtgaaattccaatcaattttgttaaatttcgctttttccgattagtgattggttatttcttatttcattaccatattaatgatcagcacccttctcaaatcgctgccttaaaattttttttttttatgtggt

SEQ ID NO: 2828 - DNA, 8282 bp, Heterodera glycines
attatataaaaaataaaaagttttaattacgattgaaaaaaaatagaaatgtataaatatttgcttattcttattacaaattttataagctcgcatttcatcaaaacaataaaaataaggaaacttaaaaagtttaaagaaaagttattatattttaattttaaaaaaattgacagtaagcatttaagctaaaaaaaacaaatcacataaaattaataaacattttttacaaaaaatgacatatataattttacatttaactatcgcacgaaatctgtttgagtagatttgctttaaaaaaacgacaaaattagaagaatttatttctattatgaaaaatggataaagcaatattttataaaataattacatcaacatctattaattaattggtccatattatataaaacatttattttttaatttccaaacggacaaaaaatttagaaaaaaataaataaataaaagcataatttataataaaggataataaagaattgaaaaataagtgtaaaaaaaagaatcaaatcgaagttaatttaaatcgaaaaaaactaattaacttatttattatcagaagacacagaaagttctttaaatcaaaaacaatggtcaatgatagaaaataaaatttgttatttaaaataaataaaattaaataatttttataatttaagcacaaatgtatgttttacatatagtaataataatatttaattattttagaagcattttactaattaatttttgcaattcatttgaattttataaaattataataatttaatataaaaaattgcatttattttagtttagaccaaatctcttcagattacagcatgatttatgctattataaatgaaattaaacacacagaaaatcatttattcataaaaaattaaattattttatcgaaatttttgggggatcggaattccgtgctaaataatgtccatttataaataatcaaaatttcaaaggaaattaaaatgttccaaagtgtttaataataaaaaatttgaattactttcataataatgataattttattaatgatattgtagaaagggaagttggtgtgggcccgaaaaataggaatacgaaaattgccgagtttaaacttgtcccgtggaatggagtttggtcccaatttgccccttccaatttaatatttaatttattctttaattcctcgtttaatcctccatttcctctctctctctctcaaatcgtccaaattccataactaatttatttgttgaaaagaaaaatattccataattaatttatttgttgaaaagaaaaatattaagtgtgaaatgaaagtgtgcgaagtttgattaaatagaaacgatcgatcgtctgaataattccgaaataaatatgatgccaaaaggaaggaaggaccgaggaatcacggacttcggttcctttagtgcccggagggtatgggaatggtttttgcggaaattgaatcgtaaatgtgtcctgaaggtggagaagggactggggagagttaaaaacggggacggagaagaaaatccttctccggagttttgctcgtaattgaccgggggagctaactgatcttccgtttccctacggggaaaaggatcagcgaaatgctgatccttaatccccgccttcttttgttactgtgtgtaagggggggggacaggggtactgtacgttacacctcccggccgaccagaagaccgtccctggtcttttcttctttttggccaaaaaaaaataaaataaaaagaaaaacaattaaaaaggatatgacaaaatgaataaaaatagagaacaaatagaaagataaaaaataaaacgattaaataagccataacagaattaactaaagggataaatgtggaaataggttatcaaaaattataaatagaaaaagaaagatgaagagggagagagagaaaaatcaaaagaaagcgcaaaacaacattgtagaaacatacataaaaaaatgtaagtgagcacataaaaataataaataaaagcaaaacaaggcacttaactaaaaggttttttttttttttttttttttgctttttatttattttatatattttttaaatcgggctccagccgtggtccgtccagacgcactgacgtgtttcgccaatccggtagcgttcctcataaggaggaggcagcagcggcattcgcggcgctcgggaagtggagggggagggagagggggtgggagtgatagaccgggggatgggggagatggagctgcgggagtggcggcggtttggccgacgatataaggggggagggatggtgttggggagtgggaaattgtgagccacagagtagggaggaagggccgcggggaatgaagggggatgggtgttgtcggaagggagaagagggatggagggggattgggaaatgggaggcataatggttgggggaggtgtggaaggaggcggggtggaaatggagtgattcgaaagaggtgaagagacggcggtgaggtaaatggaggaggagcgtgaaaggggtactgtttggggagattgagagaggggaacaatttgggaagggctagaaatgggggttggggaacggttggggacatttgtaaagcaaaaagaggaaaattttttgggaggagtgggaataatgttttggaagagggaagggatggggcgaggggcagaagatgaggaggaggaagggtacgggttaagtggtggggaagcgaaattaatagaaaataaagagggagggtgacttggcacggcgcggtttggcatcctgaaagtgagaaattgacggttagtgaaagagtgcgaattaaaagtggcaattagggggtcaattttattaaaaatatagctttgaccgattacaggggagtaagaagaagccgagcttaaatagttggaccaggatttacatgctttaagagtaccaaaattgccaattaaacaaaagaaatgtctagcccgggaaatagcaactgaaactctgttgggatcttttaaaaaatacaaggatctgctcatctcgtcgggagtggtggggagggatcgggtggtgataaggactatggcatcagattcttgagcctggaaggaatcaactgtcaagaccgtgacatttaagggggtaagggatctaatagcttttgcctgtgccgagtacagacagagacaagtaattgatgcagatggaggtaaaatgagagagagaagggagagaattgaatgggcaatgtggttttgggccgaatttaatcgtgaaaaggaggttaattctctataatcaggatttgggagatcaacaagaagaagaggggcattttgattgggtagcggaaaattggaagatgtaatcatggagcgttgttcggccgttactccggcaacaatatctccatgataaagagaatcagcaagacattgggtgagaattgggtgtcctcggtaggaaattgtgagttttgtgttgggaatgttaggaatagaaattaaatgagaaagaaatgaattaaatccgtattggagcaattcctcaggaagttcagaagagcgaacttgtagctgttttgggtcaccggcagcaaggattttttccagatttggggccagagagagaatatgaataatttgattggtaggtgcctgacctgcctcgtcaatgaatatgatatttacaagctttaaaatagagggaatatcttctaacatactaagggtgacaaagatgatggggatttcagtcccaacgtctctgataaagatttccgcagaagaacgttcatctgctttctgggggtttttcagagcattgattttatatttattaatgattttggcttcttttcgtgttaatttttgcacattaaagtcagataaagttttgattagaagatttttcatgaaaggctcaaaaagggaaaaatatttttcttttgcagaggcagagagaatgagaagggctttagaattttggtctaaattaggaagaatatcagaggctaaacgacaaagggccacattactgtgggtggtgataaggatatttttctctaattctaagaatttttggatggacataatgataattttggatttaccggtgccagggccggcttcagtgataattgcactggggaagggattgaaaagaaggtccaaagtttcaagttgtccctgattgggtctcggaaaaagtttttgggaaaatgaggaaaatgatagattagaggaggggagaatttttgggagagcggagaagccaagaatttgggaaagaatttgtccctgagggctttcattggaagcagtagcgaggggaatggaggaggagaagaaggcagacctatttttcaattgagtctgggacatagggacttctaggaggatcaggtcctccaaatcaaagctgtgaccttctgtctcggataaattaactgtgatttgaacagagaagatttgagggtcaatgagttttacggttttaacagtgccttgagcacaaatctttttgttgacggagccaatcaggagggagtcgggtttccaggtattgttgaactttatgaattcagataatgaagagagagagtgggtgaagaaatatggaaatactttttggattcgtatcgcttgggaggcattagaagaggaacaggaagggtttgagggattgacggatgagcagatctcttcattttttggattatgggggaccaattttaattttgtataaacagaggtggtttggtgtgaggaggacaaaaaatgggcctgtgcttttaaggctacggaaatggctttaagagagttaatattgtcattttttgtgagggagggattgaaaggaaagatgtacctgggcggtgatgtggagtccattgaaatggcgaagttgttgtcacctgacgatgctggaaggttgtttgttgggaagttttggggaaaagtgtaaaactcagaaatttgggtccccagggcaatttgtttgacataaatattaagtctcacaccttttatgaggggatgattgagatggggtgtcggaatgaaattgggggtaataagtccttctccggtcaccagggtaaaaattatgtttttaccctgagatgttttgaaaattttatgcccaacggcaattccttggacgagatgaaggggatattgacagccataaagttggggattgatgcctttatggaaggcttttagagtgggaatagtcgagaggggggaagagataattggatgagagggaggaacgacaacaaatgaggagaagaagatacaatcaccatttaacagatccttgccttgaattgggtcagaaataaggaaatttggccatttttcggcgtgaccaagcccttggctaactttagctgcaatggtaaaggggaatgattgggcaatttgatatttaacaatacgggagggggtttcgggttccaaaatcctgatttcctgctcagaattttgcatttgagagttttgggtaacagtaacttgggaggaaggagattgctgggggatttggtcaacagtttcctgagactgctgagattgggcaatgggaaatggggcatgagaaacattatattttgggctagggatgggagaatcagatatggtgttggcagcttccataacttcatcccaatttaagggattaacattttcaaatttgactttggcaaggggagcattttcttggattttggggggtgagatttcttccaaaaagattatatccgggtccgaggaagaagacatgggttgattttcagttcgtggtggggaaggagccggactattgttggacaaattctgattttcagaaggagaagagaccgagataagggccaacagagtctccatagaggatagaggagatgaagggacaacagaatgtgagagaggatcaaaagagtcagcaggttcagtagaatatgctgccgtagtgatggtcgaatcagcattagttgtcagagcttggagcgattcttcaagaggagttgtcggaaggagtctggggcatttcatctttggaatccagggtttcgattgtcgcttcggcatacttaatgtggcagtcagagatattcgaggagaggacaaaacgagattagaaaacaacacagcaatgtggaagtatggtaaagcattgttagtaaaacaaacaaaacaaagcatttaaggagaacttggagtgcacaggaggggtcgataattttggaagggaaagaggaagatagggggggggaataaaggtgtgagacttatgatgtttatttgagaagggacgctggggaatgaggaatcctaaaaccttttaatttttcacgaagttccattagcagttggcccatggtgtttcgcccagtaaagttccattgacgaatgtcgtcaatggtggcaccagcgccccagaatcggtcagtgtgactcgcttcaaccaaaaatttctccccagttgaaatgaggcactctgccagggcggggttctggtcgaacttgtggaagagaatctcttccatctttgactgcttcgtgctgtgccacacttttactgctgcggggtcagcttcattttgggcacgagccccgagtcgttttgctacgactggggaggtggttttcaggatttcggtgtctatgtcgtatctttggaagaatgttgcttttgtggattggtaacattgctctgacgaaaggaagtgacaggaggagggagggtagaagaagggggcggggtagaagttggagaggtatttgtgttcggggatgttggacaggaaggggatcattctgttggggaagggagggaaacgagaattaatcataaaaaattttgggtgcaaggcggtgtgaaggaatgaaaacaaaaaggggaaaaatgttgtaaaaaaagtggtgtgagaagttaaaaattaattgtgagtatgaaaatgggtaaggagaaaagtgcatttgttattgtttaaaactgttagaccttgggcgagagcggagattgtatttatttttatgcaagagatcccgctgagagaaaaccgcttgttctttgtcaatagaagtaggtaaaatttggggtacattggatttttgggtatcaggagggagggtttttggtgaaatatcaggggtatgattgaagcctatcgtgtttggtatctcggtggcttcagctgcttctaaagcagctttttcagcagaagagaggacgggggaggtgctgggaggaccggaaatctcaaaaagtttcttcagttgattaatatggaccttaaatgggttggattgtggggaggaacaactgacgatggtgacatggagttcttctatgttaataactctgaaaacgcccttccatggattgtgaaatttttgggaagtgcccggttttccagtataattccgtaacagaacacggtccccaatggaaatattaggattcctaaatttcttatcatattgtacttttgatttattctgagcctctttaattgagtcagctgcagaattccaggcttttcttagggaaaggacaaggagggttttgaactcagctaagtcattgtgagggagtggtagatggacggaaggatcaagaatttgatcaatactaaagattgggtctctgccaaacacgagaaagaaggggctttcgccagttgattcatgaatggaagtattgtaacagaaggtagctgcgtctagaaattcatcgaaattgggctctttgggattgatatatttagacagaatattatgaaaagttataaatgtcctgtctgtcgcatccattaccctgggaccaataaggtctggagaatgatttattaatatagagaagggaacttcaggcagtaaagaagtatgaggcgaatgtggtgacattgtcgatttttaattaagtctcagctctgcacttttcagtaagcactgcagctgtagtgtattaacgttagcgagaaaaagcataatgaagccatatttactaaaaattcaaatttatttaattgaaaaaaaacaaaattgtacaaattatcattggcattccgaaaccaaatgcagaacagctgttattgtctaaaaaatcactttttatgaaagacaaaataatattttataccactgtttgtgttttcatcggaataagttttttcaataattgttgccgtctccgtcgcatttttggaaaatgatttttccaaaattggcacataaaagggtgttggtgttgaagtgaccatttcatgtaaattcatt

SEQ ID NO: 2829 - DNA, 4823 bp, Heterodera glycines
ttttagctgttagaagcaaaagcatttgtttgaccctttatcagtttccgtttaacaatttgtgttaaaattagcacatatttttctgacggtgtctccatccaataccaaatggaaattactttgttttttgaaatttgtaaccgaaatactccaaaaggcgaattgaaaaaaaaatccttgaattctcctattggagttttttttttcttttgtcacaggctcatgtcaaacgcacccccttgggaagttctggcaaagtgtccggtagcaagagcatccgctccaagctcttcgaaggcaacctttcgcaaaaggttgaatttgattttcttgttacagccaacatcgggcacaatggtccgaccgaaagagcaattgtccacaaaattgctaaaactttatttacttcgataaaacccgaaaaaatcactaacataaaaacatcattccaatactgcttaacaaaattgacaatatgcaatttgattcccaaaaaagcgcacaacttttcagaatccgtaaggtcctcgctctgaaaaataggaaaaaagcgatttatgacagtgtacgagatcatttgaatgggtaatggaaattagtccggactgattgttcaggatgattggcccaacccgaaaattcaatttacctgtgggcaggacgatgagtcactcgcttcgtcctgagggtcccaattcgtctagaaattggcaagtttccactttacggataaggttttaaaccatatgcacgccgacgacatcaaatccgcggcgtttgagcaaaagcgcactcacagcaccaaagcaaaaagggaaatcattagaacaaattccaaattgacaaatgccacaaaaactgacctgtcaactccacccgaaatcgcacaaatgacccgacggacagacatttgttaatacaaatggaagacaacttccaacagatattaaacaaaacagacaaataatgttgtgatgtttaaacgaacatggtttaagtttgaatcaaaactgctttaacctaacaattgcaaacaaaacaagcgatgggtgaatgattcctgttgcgttgtctatgccttcgttcgctttcgtgtctcttcttccaactgaaaatgtctctttccgtaatattcccccacccttttgacctccttaagttcctccattcgtttctgcaatcgttgcatttccttctcatgtctatccctcaatatcttctcaaattctcttgctgctgttcgtcttaaaggttggtgagtaaggctaatgctttgtaataatattaattaagcagggacgggacaaaatttcgccgcaaataatttagaaaaaaattaaatttagaaattttttaagaaaatttatgacttcaaaaaaaaaattctggtgaaattatgtcccggcgaaattcgattgcgaggggtgcaccctaattaaacgtacatctccaggccgagcgggcgcaacgcttgaagattccaactgcctaatctgtttacgcaattccaatcggtaaggcgtcatagtcatgtcggccccttcgatgtatcggtcgatctcttgcaaatccgtttttgacaacagctaaaagaattatcaattgggaatcagtttctgcaaattaccatctgatctctgataatggcaaatggtctgaagtattgccaaacccgctccaatttgtctttgtcaacacgttttacggcctaaaaagaaagttaaatgaatacggagaagaatgaaacaccggatgattttgaatataatcactttgctgctcgaaaaacgactggtcgtgaggacttttgtttgagaggagctccattcgtgcacgaagaatctaaaaagacaatgaaaatgtagtaaaataaggcaaggccacaaaataacaccaattgtaaagcaatgccttaacgaattcaaaccaattttaaaagcattaataagaattaatttttggctatgaaccaaaaacctgattttgcaatatcagtgaaaaaggaagaaaatggtaaatgaaaggaaacacctcaatcgcctctctgaacatcactttattgttcttcatcttttccaaaggaagttcaaaaaatccgtattcgtgttcactgaaattctgctgaccatattgctcctttctgataccttgtctaaaaatttaatgcttacaattaggaaaggtttatacatttgttggattttaccagttcataatatttaacatttttgaattttgtatattctaacaataagggaatatgtgtccggtggcgtagcaagaaaaagtttatgtaaattattaattttaacaaaaattccaattaaagattggattgaatcaaattaagtacaattcgaaaaaaggttgaaaactggcttaactcttagttgtcattaatatgcacccaattttatgcttacctatttgctgttatcggaggatcggaagaattaatagtgattttgttaattctgtcaataaacgaattttcttttgagtttagcacctaaagcatgaatttagatcagtagataaaaaacattctgttaaacttctttgattttgttgtccttgtcaatgtctcgctgaagcttcgctgtcgttgtgtgtttgggagccaatgcctttattttccctttttctattgcgtcaattcgtttgagtgcacttttttgatttaatttgatgacagtttctgaccttaatattgggcttagcatcctttggagaaaatttttgatcattttaaatgagaatatctctaaattataaataattatcataattccgaatcattgaagtttagtttttagaatttttttacggcttttttgaactgaaaatttaaaaataattaatcttttctttttttggcgctttgttcctttataaaaagctaacctcacttccaatttctatgtacgtctacagaaattgattcaaaagtcctcaaagattaccaattgcccttgttgtttcataaaatataaccaaattcgattttccggaacctccgttttgtcttgattaaaaaaacatttgtttgttaactaaaacacatgattcttcgttttaaatattcaagatatgagtcgtcaacagagggacagcagtagttcaaggtctagtgactcatggtcaaggaaatcaagatcgagatccagagcaagctcaccttctcgttctagcagttctccgcacgaccgtgattggaggtttagaagcaggagtggagaaaggaataaacggcgatgcagacacagccgacagtcaccacctcctagaaaaagggaacgaagccgaactccggtaaattaagaacaaaaatgcattaaccttaaaaattccaaccaaatagttctcacgccgacgttctcctaacgaaactaagccttcaaataaagttatcttgacctcgttgccaaattatgctgacaaagatgcggtttgaatctttctaattgtttttttaattctaaaatattaagttgaacattttgctggcaaagcagggatttcatcccatcgatattagagttgttaggcgtaacaccgacagcggctccgttcgaatttttggttttgttgaattttcggatgttgaaacagcggaggattggatacgtcataaccaagttacaaatggtcacaaaaaaaaattcatttcatgttaagggctttctcaaaatggacgatggttttcaagtacgcttggagtattcacgtgaagagttgaaccgagaaaggccgatttataatcccctaacatcggattggacatgttccaagtgcactatcaacaacttcaaccggcgcacaaattgttttaaatgcggtacatctagaaaggactcagaagcgcttgatgcgagaggatatgggatggtcggagtatcgccttgtgacagtaaataatttcggttcgggttattactagatttgcattccatgtttagcgctgcttatccgcgagctcccctcttcggttaccgaggaaagcattcgcacttcgctatctcagttttcggggctgacaattcaacgcattcaattggcttcctctcgtctctacgcttttgttcaaatgaaatctgctgagcaagcaagttatttgttacaaactttcaacaaagttgtaccgtacgttgacaattgtgcaggtgtttcttcattaatgattttgtaatttcactttttgttaagtaataattacttattcgcgtcagtctctcaatcaaattttgatcatggagaatgtcaatttgcttaaaacacaaagcggaattagcagcgcaaacattcaagaaggtgaagattcgctttgctcccgttttttgcatttctaaaaattagacccaacaaattctgcggctcaattggctcagaatgctattcgattggcacaaatgggaaaggccgtgccgggtgctgtccctccaattgctcatatggaagggccagctcgacagagcatttctacgccttttggctatttgcctacctatagtgggtgaaattttcttcgtcatcagttaaatattttatttatagcaacgcctgataccaatctgttccaatatgaaccttcttctggatatttatgggatgttaacacgtaacacattctgagggttgttcattaatgacttttctttttagaggattttattacgaccaaaaaacaggatattattatagttccaacacctccaatgtttgtgttacttttcgttcgcttttaaaaactcagtgaattaaaattagtggatgttttggtcgtcgaaattcagcacatatatcactgcgaaggaggtgat

SEQ ID NO: 2830 - DNA, 3179 bp, Heterodera glycines
ataaacagtttttcagcaaaaaacgccccaagagattctataagagatgatgaaatgggcccgtcgtcaagaaaagataaatatgtcatttaaacttaactcaaacgaagtcgctgcagaatcgtgtgaaagtcaggattcgctgttgacggtagcccggagaaatctctgcgtcaactctgcagacgaacgaaatgtgaatgaaaagtcagaggcggctaaggttaaatttggactgattgcaaaacgttattcacatccgttttcagagactttgggacgatgacgatgaggttgaagcagcgcctcctcccgacgccgttttacccggcagaatgcgcgggcttacaaatcgccaagcgcgagttcgaattgcacgcgccgagctcagcggcggactggccgctgtcgatggtagaaattggatggcgatggactcgggacgaatcgattgttgttcttttgcgtccgactctctgccaatccctctctcctcacgggccaatgcggaaattgcctcttgctgacgcagtccctatttacagaccaacaacagcagccaacaccaattggtgatggcgccggaggacagcagcagaaacagcacaccgacactgatttgacttcttcttttgaccaagaaaaatttgttgaccggaacaaattctcatgcctcctttgccgtcgtcaatttgctaatagcgaaacattggacaaacacattcaacttagcaacttgcataaggtaacaagaaacaactgacaaattaaaacttggcagttcagagtaaggtcgttgaaaaaatacgagagctgcggaacgcgggcattgcaaaagcggcacagagtgacacgtcaacaatgcattacagggatagagccaaggaacgtcgggaacagcacggctatgatcccggtttagttgacttaaattactaattatcataggtatttaaggaataagcagtgggacgacgaatgaatcagatgcatcttcaagcatcgaattgacagccctagtgaaggcttctgtcccccttgatgcaacgaacatcggcaacaaaatgcttaaatccatgggatggacagaaggccagggactcggccgaaatgctcagggtttcaaatatttgtatatcccctcgatttttatttaataacaggcatcagagacccaatcagagctgaacaacatgtgcaaggagctggccttggtgcatccggctcaaagatggacacgaatttaccatggaaagtgcggaatagacaagcggccattcagcggttcagagacttggaagaaactactcgacaagactgatggaactcgaaagcaaatataccctcacatcctagatggccgttcataaattgctttgctttcttgtgaaatatttcttttattaaaaatgttaaaccacttgcttgtgatattttggactctaatctagttatatgcgtccaatcgacttttgtcgtccaatcaattttaacatttaattaattgcattgcattgacagtatttctaaatatacgggataatttagcccgagcccgacttatctgtacccggtaatacccggccagtcaacataaacagcatttattataataaatgaaagtttcgattcttacaatgagatcggtagcgatcatagcagttcaaacaaaacagcgatttcatacacccaaaagattaaagtatcgcagaaaagtcgcccgtgctgaaagtgcttccaattggatttgttgttgcgaatgaataatgggcaagttgtgaaacaaaacttttcgtgttgtgaacaaaagtggaacaaagtataacacgagggggtaacgacccctggtaaagcgaaggttgggaggagggcgagttcgaccgcttggcgtttaaatttgccaccgcagcactctcttcgaaagttgtcccaccaatgacaaacaaaataacattttcaaagcgggagctgaaggaagaggaggaaataaggggacaaatataactcacttcagatttgccaaatccgtagacggataaacactttctgggagtttgccacgcgacgccaaatcaatgagttggagaatgaaaggctcgtgctgtgtgtagatattttcaacgcctttcagtcctaaattttgtaaacggctaaaggacgtgcgactaaaagctatttaaaaaaaagatgagggagacgacgatactataaatcaaccttaagggtattttaaaagcaccaacaacttttcagataataatagaataagtcctcgaccttttatgaatcgtttggtcatttccattgcggatctatccccgaataaatcgttttgccgtcttcgctgtcccgcgaattcgagcagtgttgagatcaattgcagctgtttgttggccatccctcgctttctcaacagctcatgaacgaagctcaaagcgccgctgttcccttcgaaacggagagaaaaaagcatcgctaatcggagggcattctgtgacaaaatccactatttaaaacttaaaaatattgcaccaaatcagttgttttgggatgctggataagtcttcgaagggaatccagacaagccgaataatccccatttgcgaccgcaatgttttgctctaactccgatatttccaacaaatttccatcggtgaccattcggctaagttcacccaccaactgaacgtgtttagctaccgttcctgaagttttggagcactctccatagagaaccagtcggtcaggtttgcttacccgatatcttcttgaattgagggtactgttccacaaactttttcatatccgcaattgattccaactgttggtgtgttttagccttccgttgatattcattcatcagtcctttgatgttttgtccgatatcgccaaaattcaaatacatattctgtaaatttgttttgatttatggcacgcttcctttctttgacttttgaatagaattcgtcgtattgagcattcaaaacaatatttttcagcccatcgttgcccgtgttttctaaggtcacacggtggttattcagcccgatcagttcgtgaaccatcgcctcgtaggtccattggttaagcagtggtgagacagggtcctaaaagcgggaaaaatgacaaaaacgaaccctgtctcaaaattagcatacctcactcctgtcgagtatgac

SEQ ID NO: 2831 - DNA, 1646 bp, Heterodera glycines
ctctctcacagtctcttgttcgtctgactccggtaatattttaacgtccgcttttggaatccgatttgaaaaatctttaattaaaataaaacatgtttcagagatggaacaggtaattattcccccttaagaaaatcatttatttaaatatttaggcttaaataatgttagatagaaaatttcttttaaatttttctcggagaagaaacgatgtggggagagggaaacaatggagggggggggggggggggattaactgtaccaataaaaaaatcacttacaaatataatactgcgaatatttcggagattgaagttcctccgacaataattgcacattttcttgtgtgggacggacaaaaacaacacactttctaaatgacaaatattagatgaacgaaaataaacttacaaaaatttgataggctcgcgaatgacaacggaatctaatcgctcgaacaggtaaatttccttttgcatcatttcactttgggcataggcacaagaaacacagctcgtctttaaggtgtaaagaattgttaaacaaatttaggtagtttatgaagaatctcacaaaccgtttctttgtccattagaatggctttcatccctggtcctgctaatcgcaccatttcattaatatattgctgcacaataagcactaaatccattatagcgaagtcaaatgtcctgtagttccttcgtacggttcttttaacaaaaaatttgttttttcaaaagcaatattttttgaccataaattttcggggtcgttaaacacgaatttgacttaaagaatagccatttggtcttgggttaggtcgtgcaaacggattggttgttaaaattaatttaggtgaactgttttagtggacgtattcgtaacgcagggttcggatctgtccttatttataagatttttccttatttggagggtccaaatcttacaaaataaaaatgtccttatttgtaagatttgtccttatttcgggctatcccttactatatattaagtgaggcgaagctccgcccacttttgcccttttgaatttgcgcctaaagtggtgttttgttttcatagagaaaaagaaacataaaattgaaaaatataattggggactaatagagaaaggctgggtagagaagagaatgcagtgtatgtttctctgtcggcgcggatgggagggtagagtgggtaacgcgtgcggttttcacacatgattgaatgcgtgcgtttttgtgtgtgtgatgggtgtataggagtggttgggaattagaagttagagaagaggaaaactatagagagagatgaaaaaggaagcgagagaggggatagaacgaagattcagaaagaaaggtgagggagacagagaggaagagaagagagaaagaaaagataaaggaaaaaagcaaaaatacaattaaaaagagagcaatcgagaagtgagaaatggtaacgatagaaaaagagggggaaaattgatagatgatagagagagaacagagaggatgggaaagagaaaagagggagagcgaaagagagagagaagagagaaaaaacagagatgggagaaagcagtgagagagagagagcaaaagatagagagagagaggtgagaggctgggagagagagagcagagagagag

SEQ ID NO: 2832 - DNA, 1357 bp, Heterodera glycines
ggagacaaaaatatactatttgatacatttttgatcgaataaattgtaaaaataactgatttgaaaattttgcaaaatgtccttattttggacccaaaaatcttattttttggccttgatgttcttattttgaaaaattttcgatccgaaccctggcgtaacggctggatttggacacttcattcccggcactttttcagcctaaaaaagggcaagcgcgccccaaattctattttcatcgatttagtccgcattaaataattttgagtttggagactgaccggtatttgccatttttaattagcatgtcacgttgaatgctatttttgtacacggtaactgacaatgagcaggtcgtcctaatctgtgaccttgatccatatcgccatttgtcccggtccgaacaaattccatacggaaaaggccgtacgaaaacgactctgaccgctgttctttattcaactgatgctaatattatagagtttgacttaattaaatgacatagtttccgtagtgattttgaaccggacggtctcttgttaaataatctgtttaagaattacataattttatgtcgtacacaacaaatttcccgcacagtcggcaacgtacagtttatgttggaggtttcggaggagaggtcaatgaaaaaattctcacacttgcgtttataccttttggagacatcggttagataattttcatcaatacatatttaaatcttattagttggcgttagcattcctttggacaatgaaacgggcaaacatagaggttttgggtaagttttcttctttttcagttgaagtctttggttttaagatttgttgaatttgaacttccgagggatgctgctgcagcaattgacaatatgaatgacactgaaatttatggaaaaactatcagagtaaattttgcacggcctccaaaagtgaatgaacgaagtcaaagaccgatttgggctgatgatgagtggttgaaactatatggccagtaattagctgaatctccaacaattttttttctttatttctgaataaaattcgttgctaattgagcttgcccaatttatgtcctctgaagggttgtacgccccatatttcctccttattgttaatagatttggctattttaatttatatggtaatttctgttagagactaaccaaaatgaagtctactggtggaaacctcgagccgatgccatttgttcgcaaatggggttcagcggttgatggcgaaaatggcgcagaggcctcgcaaccagttatttcagacgagcgattcgaaaatggtttgaaatgacactctcatatgttattcttcttatcacagatgctgcgaaaatggctttcgtc

SEQ ID NO: 2833 - DNA, 2486 bp, Heterodera glycines
tgggtcccgaccgctttaggaggtttctaatcatgatgtaacgatcaaaaacaactccaaattcgtttcatgactaccagtcaatcttctatttgcttcttattgcttttagcccccgccacaaagccaggaagagcaagagctgcagcaagaccccgagaagaagaatgacgcgctttcggcagctttggccgctgctgcgatggtagcccaaaaattgggaaaaggtggactcatttctggcgctggtgctgccgtggtttcttctatagatttgcttaaccgagttccacaagcgactcaaaaggcaacgccattagcagaaacagttctggccaaagaaatcggtgaatttgtatattttggttattttaccacggttgataaacatgaaacagttaaaagagaaccatcggagcaaaatgatcaattaaccgaagaacaacggcagcgcgaactgcgccgtaagtctcgttggagcacaactaaatcttttgtgcccggaatgccgacaattttgccttcggatattgatgagaatcagcgtcaagtttatttgcgtaagcactacataaaaaaacttaattcaccttcctattacctaattgaccttttacgtatttttacttctaatttagtgcaaatggaaatcgaggaaaccactcgtagattgcgtcaaagcgattttggacaaaacgttgacccggctgaaaggtcgattactcaaaaatatgttgctttaataataattgtatgtaaaaaggcaaacggtttttgtcataaacagcttaaaacgttttagaatcaattcttaatggaaaggaattgctttttcagaatcggtactcgtgggtcgatgctacacctttaatataatcctcttgtttagctgtgccaatttgtcatcaaaaattaatttaaaaattcactatacgttttagcatttagtgcggtagcggggtgatgtggtggattcagacatcctccaacaattttaatgtaaattttgaaaccattgggccattaacattgagtcaaaataaggctaggcaaattcgaaatcgcaatcagtcaaatagatttctgaagtaagaattggacttttaggagtccttctccggaacccgtttatgacgcgaccgggaagcgactgaacacgcgcgaagtcagaaaacggcaggagattgagcaaagacgacatgagaagatccaagcattattgcgtctgaatccaaattacaaaccaccggctgattaccggtaaagcaacttttatatgtttatttttccaaaatatctttaattagtccgccaaatattaaattgcacgacaaagtttggattccccaagaggaacaccccgaaataaacttcgtcggtcttttgatcggtcctcgcggcaacactcttaaggccttagaagccgaggttttttttgttgttgttgttgttgttgttaaatacattgattctttcttcttaagacaggagcaaaaataatcattcgtggcaaagggtccataaaggagggaaagctcgccaacagaacgggtcctttgcctggcgaaaatgagccgctccatgcttatgtgacatcgactgacagagaggcgattaaacggggatgtgacaaggtgggcgaattggaatttttggatattttctttttaagatacgtgagataataaatgccgctttgatgattccggacgggcaaaatgaattgagaaagttacaactgcgtgagttggcactgctcaacggaacacttcgtccggaggacgttctcagtggggcacgttgtaccaattgcggctctgaccagcataagacgtgggaatgcatggaagcgccgaatgtgactgctaacgttatttgtacggcgtgtggcggggccgggcacattgccagggactgcaaaaatccgaggcccggcttcgatggggcggtgatggatgctgaggtatgtcagctttttctgtagttttcttaatttagccttacctataccgatttcagtattctgctttgatggctgaacttggcgaaaaacctcccatttctttggaagccggcactgcaccaccgttagtcggtgggaagccgatccccgggttccccggcagtggattacgcccgcgtttcgcgctgcccgcgcccactcctattgtgcgcgttaatttggcgaagcaacaaaatacgcctcaacaacagtccgtctcgggtggcggttaccccgggtggggtgagtgactgactttgttttttgtgctttttctcacagctatcagttccgctcttctctaaagttgatagtgaagtgtttttacttgtagctaaaatcaatataaaggcgttaaatggaaaggcgattttagacaaaatggttttctattaatcgattggtggcgcctaacaatttctttttggcctttcttttgttgtattgccgtacaaatttctaggatacatatacaaaaacatta

SEQ ID NO: 2834 - DNA, 1115 bp, Heterodera glycines
  unsure (1)..(1115): unsure at all n locations
ctttataaaaaattaaatttaattaagtaaaaaataacttttacagacaaaaattcattaattaattttaaaaaatatactaaaagccaaattaaaaaaagaacctttaaataataaaatagataaaaataatatgtcaataggaaaagataaagcaatttttaaaatagcataaagccagaatacgatattggcgcctacttgtatttttaaagcacgacttgcaataatacgtccatatttgaaaattattgaatgtttaaataaaacccaaataaattaaattgttttataaagtacataaatgacattatatcatcaagaatttacactaaaatattcaaaaaaacatacacataaaataagtaaaaaacaaataaaataagtaaaaaaacgcaataattagtatttataatcatttatatatgaaattttatttattaatttaaaaaagaaataaataaatacaattaaattaaataaaagcactaagttgatttaaaatatcgaaataagtttgtttagtgtatatactttttcgaaaaaattgaattaatactgattaaataaatgaataaacgaatgatagatcattttactattattttctataaataaaacataagcaactcattgtatacaaaaacaaacatgtcaattcaagaaaattggtgaaaaaattataaaaaataaaaacatagttttatacataaattttttacttttatatcttctatcgcatattttacaatttaataaaaaatatatattaaaaatatgtgtatataaaatgaaaagcatctttattctttatattaattgttataaaaaattttattttattattattccaatttttatcattgtaagattaatttattttttttcatttaacacctgataaattgaataatttaaattaattagctttttaattaatactattttattcttttttatatttttctatttttgctaatttagtanaattattacaaagtatgaagcagatataattattttttatttttggtgttatgaaatattacagaaatgacgttggatttcgaanaatttcaaaaaagattttttgaatccataactagatgattttc

SEQ ID NO: 2835 - DNA, 6658 bp, Heterodera glycines
  unsure (1)..(6658): unsure at all n locations
tcaatttataaagatcattaatttgaccatttcatttttgatcttagtgtttgttatatctttaaattaatcaatatttgtaaataaatttatttttaatattatctccagcagaaattagactttaatattatattatttttaaacgaaaaatgagtggaggaaaagatgaatagagtggaggaaaagatgaatattgtaattaaaggttttattttattagagtaggtttcttcgagcatttaatatttgtatgcaatatgaagaattgtcatatataaaatttttgctttaaaatactttttttaaatttatgaacaagaagtcttaatttgatatatatgcggcagataatattgcctaatagcatcaacaaacagtgaatttgattataaaaacatttttattttaaatttattttttgttttaatattaattaatggaattatgacttttttcataatttaaattaaagttattaatttttaatgaagtcgattaacattaattaaatttacattattgaaaaaaattatatggtaattttgctaatttttgaattatacctgaatatttgcttaatatagtaattaaatttttatttgtcgcttttaatatatcaacacattttgtcgcctatgtcagataaaatactaattaaaacttttctcattcactcacaattaattttttaaacgtatttgtaatgttcaaaattttaaataatttttgataatgcatatttttttgtttaaatattaattttttgttttgtttaattatattcaacatttaggttttaaaaaaagatttaaataggtttttggctcacatgtacttcgtgagatttagaagtatttttgaaatttataaatttaaatttgaaaataaaagattgctgcaaatttcaatttttcaatttatatctttttctgattgtattcgaggtataaggtaagacttggataataatggtttagtccaaaagttttctttttcaaattctaaatttagtacatttgttgtttttacgacattaatactttctcaattatcgttttaccagagtataaaaaccataattttttaatgttattccgtgaaatatttttaaaattattgttgtgatttaattttaaaattttaattttgtcgggagttagtagttactcctacattttttgggggttggaaaaccaccgttccaaaccaaagcctattggtttaaaccaaagcctattggatgggtgcgagagtgaacctaaacctattgaagggtttttattgattaataataaatttgaataattaaattaaattaaaaataaataaataataaaaataaaaataaataaacaatcccaaaactaaaacctattgatttaaacctaaacctattggatgggtgtgggagtgaacctaaatctattgaaggcttttattgattaataaaaaataaattaaattaaaaataaattaaataataaattataaataaattaaatacataaatttaaaaaaaaaattttttataatttaaaaaataattgaataaaaaagctaagattcattctctctctcactatctttcttttctttctctctctcactctctctcttatctctctctctctctctctctctcactctctctcttttttctttctctctcttatctctctcttttctctcactctctcactctctctcttttttctttctctctctctcattctctcttctctctctctctcactctctttcttttctttctctctctcactctctcttatctctctctctcactctctctcttttttctctctctctctctcactctctctcttttttctttctctctctctctcacattctctctcactctatctcttttctcttgctctctctaataccacacaaagatataaataataataataaattaattaaaaaattaaatttaattaaaattaaattgttaaaataataatagttaaaaaattaataaataaatttaaaataatagataaaaatttaaaaataaatgaaaaaaatataaaattaattaattaaataattattaaagtcaaatcgtattggagggacggacgtcagctgtcgtgccctttagggagggaagcgacgccgggtcatttgagagcacgcaggggccatttgagcgctcgcacgtgtcatctatgcgcccgcaggggctatctgagcgcccgctggtggtcatttaaccgctaatgactgaccgtggatggcataaaatgttagtcagacggcgactcattttagtgtagtgtggcatagcatgaacaatttagttggcaacctgtcaaatgaccacatgcttgagtgaaggtcaagctccgcccacttgtgagggtataaatagccggctattaccagcaaaagtcaacttctcccattcattcgcgaaaattctacccacattcattgcttgcgcgctccgtcaaaaaatatttaaactaacaaatttgcaactacattaccctttcatccaatattttaccaatattcaacttataaaaaaatatattttcaataattttctattacaactataaaatttacatttttctaattcaaaatattctttcatattatatcatttataaatcataaagttttcattcatatattattcaaataaaatgaaacgtttttccctctctcaaaattcttcctcctccttccccaaaaaatcccaaccaaataaatgcattcgtaaaattgataacctcacttcaaaaagtaaaaaatatcaactggtgcgctcaaaatctaaatttgttattgatcaaattgaaaaatgtgcagatccacaggctgaattacgttcatgcgtgcacaaggcggtcgaggaggctattcaagacgcacagaacacacttggaggagcaaataaggtaggtgtcataatttcttcggaacttttagaccagggtgacatcatactgcctataactccaattacattaaatgtcgtggacgccgttttcaaccagttttgtaaagtggagcagagcaaatcgaaacacgtcaacttatatggggccccttttgttgtcaccgtaactgttctaaacactgtcggacttccccgacgacgaacaaccaaaggaagtgcccctccaattcactcttcccaatcacacatcttcaaaattaacaacaacgacaactattgccttttttatgcactggaactgatgcgctactactctttgtataaacgaggaattatcacgcgtgataactggcggtggattaacaacaaccaaacaacggttttacgacaaaaagcgcagcaactgctccgcgaggcggggatccctacaacagagacggagtacgacgcggaagtttatatacatcaagtgcaagggttatggaacgtcaaatatcccggtgagtacaaaatatttatttttaatgattatcagatgcgcccaatcaccaaatccgatatcaccgattaccaattccccattcttctctaccacaacaacaaccactttgacggcatcaaaactctttcaaaatttttcaacaaacgttactattgcatctcctgtgaatccgcctacagtcacaaatttgaacactcttcaaaatgctcttcactatgtcacgggtgccgtgaggtgggcgtcgactatccctgcgaagcccaacaaggctacttcaaaaaatgtttgcactgcaacaactatttctataacaacgactgctatgaacgccacctccacaaggatttgtgcaccaaatttcagcgttgcgaagattgtggggtaatttataatgttaaggttcacggaaatgtaggccaccaatgcggagaaaggttttgtcgtctatgtaagcagtttcatttaaaagaggaagatggcgagaacccctgcaaaagctgcttcatccaacccctaaaaccccataaacttaaaccatacaggatcatcgcatacgattttgaagcgacacaggataaaaaagtaggtaataaattcgaacacgaggtaaactttgcagcggctaccgttatttgcaccgaatgtatcaacaacgacaactggaacaaatctctacaaggaaatccctgcaaaatttgtggcccctaccgcacaatcaccttttcaccctttgactacacggagacaacagtcgaccaaaaaattgtcacacaacaaccactaagtgaattcgtccagtggcttcttttcgatcacaacaaaaaatttcccacggttgcctttgcacattttgggggccgctacgacatgacgatgatcatcaaggaggttttagcgcaaggaattcacaacccggacatcataaagcaaggaaatcgtctctacgagctgaaaatcaaggacaatgaacattgcccactcacaattctacacgacagctacaacttaatgcccatcaaattatctggcctcatcaaatcatttgggcttcatataaaagataaacaacattttccacacatgttcaacaaatcatcaaactatgacaacattctctcccatcttcctccacgtgaagaatactgtcctgatcaaatgaaaatccccgatcaacagaaatttgacaaatggtacaataataattacaaccaaccttttaaccttaaggaaaaactccctgaatattgttgcaacgacgtacaaatactcacccacgccctcgtcgaattacgccgggaattcaaacaactgacacaacggaacggaaaacacgggggaatcgacattctttggcaagccatgaccatcgccagcgcctgcgtcaagaactttgcactcaatcatttgaagcccaactcgctcgccatcgtcccggagaaaggctatacaccacaacagaaccaaagtgcactggctatcaaatacctcgactggtactcccacatcaacaatgtcaacattcaaactgcacactcccgctatggtgaatatgtctttaaacgcgagggtcaggtgtatcaagtggatggttatataaaagggactaatgggaagagggataaaattattgaggtaaatggttgtctgtggcacgggtgtgaggaatgttttgaggacttggacgacgaaacgaaaatgccgaacggaaagacgctaggacaattaagagagagggaggtaaggaagcacgagattcttagccggtacgtagacttggaggtgatctgggaacacgaaatcaatgagcagctgaagaaggacaagcaaatgagggagtttttcgacaactggaaggaccactcaccaataaaaatcagagacgcatttcatggaggacggactgggccaatgaagttactccacacagctaagccgggacaaaaaatcagctacaaggacttcaccagcctctacccatggaccaatttctctacagactatcccctcggtcacccaaaaattatcagctttagattaaatgagcaaactgtcaactggcgagctccatccgacaatccatacaagggacttttaaaagttttacttttacccccaaacaggaatatcaatgtgaccgtaatgcccataaaatttgatgagcgactactcttccctctctgcgaaaaatgtgccaaacacatcaccaatgaacacccgaatggcctcaaagacgacaactactcgtgtccacacttcaatcctaatgaccgtgcctttgtctctacctgcactcaccttgaattgaatgctgcattggaggccggctacaccgtcagaaaactcttccatgtcctgcaatacgaccaatggagcgacaacatcttcaaatcttacgttagcgaaatgatggccctgaagatccacgcaaccggcttcccttcatggtgcagcagcgaagaggagaagaaggaatacattgaggagaaccgtcatcgatttggaattttgttaaacaacgaaaagatgaaggctgaaccagggaagcggtacatcgccaagctctgcctcaactcactttggggccgcttctccatgaggaacctcctctccaaagcaataatcaacaacgacgaaagcctgattcgccaatataccgacgacaagaaaatcgaattagtggacttggaaatgatcgacgacgacaacgacgtattcatgctcacctacaagccgaaagaggagtttgtcgacgaaaataaatactccaatgttgtcatctccctcttcacgacatctgcagctcgcctctacctgtacgaagcactcaaaaaagtcgccgacacccccgactgtgaaattctctactttgacacggacagcgtcatctacgttcaccccgaggaaaacgacccactaccaacaggaaagggacaccttggagaactaacagacgaaaaccccgaccacaatatattggagtttattagtgctggctgcaagaattatgggttgaagctgcaacgcaaggacaccggtgaaatagaacacgatttgaaaataagagggttcacccttgatgcacaaactgttcaaaaaattcattacgatactgttaaggaccaaatcttacgctatggctccgaagacccccctgaccctatcattgtaaattacctccattttattcgccctaatnctaatccaaggtaaagtgtata

SEQ ID NO: 2836 - DNA, 1701 bp, Heterodera glycines
  unsure (1)..(1701): unsure at all n locations
acatttaatttggctctttacgagtatattattttatttcgctatttatactacaattacaatattcgttggtataaatattttcatttgataaaactaaagtaatttgacatcttaaatttttacattgtctatttgttagatattgtttttaagtgttataattacttataattgtaaataattatcaaattccatacgagtcgatttaatcattgaagtgtgtgtgcactaaatgatagtttgtaaagctaaatcaaatcatattaatcattatgaaaaatataataaaaaataaggttttgtttaaaataaatgaaaataaaaaagtggaaaaatataaattaataattaaaaataaaattctgctgaaatcaaatactttattatgttgataacactttcaaaaatatgaattttattatattaaataatatttccttcaagaataacacttttgtaatagagataaccatttgcattaaataatcatatcagcgaaaataataaacctgacaatgattataaattataaacaaagattaatataacttgatgaaataattaaatatatttaaaataatgaatgtaatttgtctccaaatgtacttaatgattacaacttaatttaaaatcaaaaaataaatattgtatgtaagtaaatcaagaaaaaacaatcttttggtctttaaatttgctgagcatttcaacgatggacgcatttggcctgctggacgatttaaaaaggaaaatcagcaattccgcgattaatttgtgtgaaaacatcaattcaagtgcaacatttacgaccgaggccgccgataaatttattcgggaattaaaggcaactttctccaccacttttgaggaaggactcggactctgcaccaaggaattggcacaccttcaattaaaggatggtgccactccaatttacagaaaggcacgaccaatgccacatcattcaaaggaaatcgtcgaaatggaattggaccgattggaacagctgggaattatccgtaaagccgaacatttgacttgggctgccccgattttggtggtcaagaaaggagacggatcagcacgattgtgcatcgattattccacgggattaaatgatgcactgctggattttcaacacccgctgccaattcctgacgacatttttgcgactttgaacggaggaaaatttttctcccaaattgatctcaaagacgcatatttccaaattcaattggatgacgattcaaagaaaatttgcggcatctccacccacaagggcaattattttatggagcgcctgccttttggagtaaaatcggcacccggcattttccaatcaatcatggacaaaatgctcgccggtctgaattttgcgacggcatatttagacgacatcatcgtcgccagccgaacattcgacgaacacaccgatcatttaaaggaagtgttcgatcggctgcaatcattcggattcagggtcaaaatttcgaagtgcgccttcttccaataggaaattaaataccttggattaattattgancagaatggacgccgacccgacccatcaaaaattcaggccattgttgacatgcccgcgccgaccnaatattcgtcattgcgctcatttttgggtatggtcaacattcccnagcatcgtcaggacatgcgcttcattcgcaaccgctggacgtctgctca

SEQ ID NO: 2837 - DNA, 2765 bp, Heterodera glycines
ttcaacgaaagcaaatctgggagtcgcagcgtcggtatggtaacaaagaacatcaatgccacttcactgctgaaagtcggagttttcgtcaacaaaaagaaaacaaaatttgttgccgacagcggcacggaagtgaacataatcgacgaagacgcctatgacaaaattggccgtccaaaaattcaggaatgcgaagaaaaaggcaaactcttcgacggaacaaaggtcgcattcatcggcaaaggagttgccacattccaatttggcgacattgccatcgaccaggagttttacgtcgcaaaaagagggtctttaaatttgctgagcatttcaacgatggacgcatttggcctgctggacgatttaaaaaggaaaatcagcaattccgcgattaatttgtgtgcaaacattaattcaagtgcaacatttacgaccgaggccgccgataaatttattcgggaattaaaggcaactttctccaccacttttgaggaaggactcggactctgcaccaaggaattggcacaccttcaattaaaggatggtgccactccaatttacagaaaggcacgaccaatgccacatcattcaaaggaaatcgtcgaaatggaattggaccgattggaacagctgggaattatccgtaaagccgaacatttgacttgggctgccccgattttggtggtcaagaaaggagacggatcagcacgattgtgcatcgattattccacgggattaaatgatgcactgctggattttcaacacccgctgccaattcctgacgacatctttgcgactttgaacggaggaaaattgttctcccaaattgacctcaaggacgcatatttccaaattcaattggatgacgattcaaagaaaatttgcggcatctccacccacaagggcaattatttaatggagcgcctgcctttcggagtcaaatcggcgcccggcattttccaatcaatcatggacaaaatgctcgccggactgaattttgctacggcatatttagacgacatcatcgtcgccagccgaacattcaacgaacacactgatcatttaaaagaagtgttagaacggctgcaatcatttggttatcgggtcaaaatttcgaaatgcgccttcttccaagaggaaattaaatatcttggattaattattgataagaatggacgccgacccgacccatcaaagatacaagccattgttgacatgcccgcgccgaccaatatttcgtcattgcgctcatttttgggtatggtcaaccattaccagcaattcgtcaggaacatgcgcttcattcgcaagccgctggacgatctgctcaagcacgaagcaaaatggaattggtgcgacaattgtcgcaaatcatttcaaaagttgaaaaacattttgacttcggatttattattgacacattatgatccaaaattggaaataattgtgtccgccgatgcttcggagcttggaatcggcgccgtcatttcccatcgattcgcaaatgggacaattaaggccatcgcacatgcatcaaagtcattcgcgcccgccgaaaagaattactctcaaattgagaaggaaggactggccttgatcttcgctgtgcagaaattccacaaaattatttatggtcggaaatttattctccaaatcgatcataagccgttctctccatttcggaaataaaaagggcattcggcagtgcagcgtcaaccgattgttacgctggtcactcatttttttggcatatgacttcaaaattgaatatgtcaaaaccacggattttggacaggcagacgcactctcccgtctcattgcaaaaggcggagaagaggaaaacgaacgcgtcattgccttgatcaccgccgaaccaattttggaagaaattatccattcagcctcgaaaaatttgccgatcaaattcgaagatttgatcatcgccagcaaaaatgactacaacattcaaaaagtcataaaattcatccgccaaggctggccaaatgaaaagcaaattgagaaagaatcggataccatcaaactcttccatcggcgcaaaagtgatctgacaattttgaaaggctgcctcatgtatggcgaaagagtcgtcattccgaaaatttttcagcccaaaattctccgactttttcacaagggccatccaggaatgaaacggatgaaacaactcgcccgacaatacatattttggccaaaattggacaaagaaattgaggaatttgttcaaaattgtgagccgtgccaattggctgcaaaggcaccgatcaaaaccgatctccattcatggccaaaaccaactggcccgtggcaacgaattcacatcgactttgctgggccattctttggcaaaatattttttattgtcgttgactcattttccaaatacaccgaggtatttgagatgacaaattcatcagcaactgccacaatcgaaaaattgcgttatttatttacgcgccatggcatcccagaaacaattgtttctgacaatggcacgcaattttccagttcggaattcgacaaatttgttgcagccaacggcatcacacacttattttcggccccatataatccaatgtcaaatggacaagtggagagatttgtcgacacatttaagagagcattcagaaaattaaaaggggaggggaagccaaacaaggagatcatcgacacttttctgatcacctatcggacgactccaaacgacacacttcctgatttgaagtgtcccgctgaattgctgctcg

SEQ ID NO: 2838 - DNA, 2562 bp, Heterodera glycines
ccgttgctttcccattttcggaaaataaaaagggcattcggcaggtccagcttcaacccgattgttaccctggttcactcattttgttggcattatgactttcaaaattgaattatgtcaaaaccacggattttggacagccaggcgcactctcccgtctcattgcaaaaggcggagaagaggaaaacgaacgagtcattgccttgatcaccgccgaaccaattttggaagaaattctccattcagcctcgaaaaatttgccgatcaaattcgaagatttggtcatcgccagcaaaaatgactacaacattcagaaagtcatcaaattcattcgccaaggctggccaaatgaaaaacaaattgagaaagaatcggataccatcaaactcttccatcggcgcaaaagtgatctgacaattttgaaaggctgcctcatgtatggcgaaagagtggtcattccgaggatttttcaggccaaaattctccgattatttcacaaaggccaccccggaatgaagagaatgaagcagctcgcccgccaatacatattctggccgaaattggacaaagaaattgaggattatgtccaaaactgtgagccgtgccaattggctgcaaaggcaccgatcaaaaccgatctccattcatggccaaaaccaactggcccgtggcaacgaattcacatcgactttgctgggccattcttcggcaaaacatttttaattgtcgttgattcattttccaaatacccggaagtatttgagatggcaaattcaacagcatcggccacaatcgaaaaattgcgttatttatttacgcgccatggcatcccagaaacaattgtttctgacattggcacgcaattttccagttcggaatttgccaaattcgttgcggccaacggcatcacacacttattttcggccccatataatccaatgtcaaatggacaagtggagagatttgtcgacacatttaagagagcattcagaaaattaaaaggggaggggaagcctaacaaggagatcatcgacacttttctgatcacctaccgtacaaccccaaacgattcacttccggacttgaagtgccccgctgaactgctgctcggtcgaaggccaaggacaacaattgatctgcttcggccaccaccacaccaaccatttgaaattgatttggagatggaaaggcaattcaacaagaaatttggcaccaaaaatcgaagatttattttgaatgagaaagtcttcgctcgccatcgctcctcgcaacattggaagacaggagtgatcagcggcacatctggagtgatttttgaagtcaaatttcccgacggatcattcggccgttttcacgcgaatcaattgcgcaacaggaaaacagccgacaattttgatcagtccttggccatattaaatgaggcatttgagttgccattgcctccggccctgcccaatcaaccacccgacgcagaaaatgccaatttagggcccaatcaattggaaaacgaggtggcagaacccattcaggacaatttggctgctccaattgaggacgtcccaattcaacgacgctatcctcaacgccaacgtcgtaaaccgaaccgcttttcacccgggccatgaactgatcagcctaaaaggggaggtgttcgggcaggcacattttgcccccgatttatttatttccctctcttcattttccttcactgtttgcagtgtctgttctctccgtgttagagacagacacacacatgcatattgattgacctttgcccttcccaattattcctccccattcatggctgaattcattctgttgtttccccaatttatttgctccgctcccccgtttttggatttatttttaatttattatttgcgtaataaatttatttgttgtttggacttgtggtcctaacattggcgacgcccgtcaaaattcatcggactatttattattcgaacgtgttcgaccatttattcaattcgaacaattttcatcgcaaattcatcgcgtcaattggatttattctcgtgttgaataaattcatttttgggaagttcagaaagctcgtgttgatttctgacttcgctgatccatcaaaaaacttaattcctcgtgttggaattggttctgctatgtgcagtttttaattcatcaatcaaatggcaaacgcaaaccccccgacattggaccagctcatcacggtccttcaacagcagcagcaattggtccaacaacttttggccaatcaattaccgcaaaatgctgcactgctgctgctccaccgacaattacaattccgtcactgccagatgttcatccatttgaaccgacggatgacaaaagcaggatttcggaatggttggcccgcttcaaattcgcacttgactgcgcggcacccaatgccattgacgcaacaaaagtcaaatgcctcatgaacaaattgagcgaggccgcattcagcgaatacagccgctccgtcctcccatctgctgtcactgattttaattatgattacacaattttgaaaatggaaaaattatttgcaaggcccca

SEQ ID NO: 2839 - DNA, 3457 bp, Heterodera glycines
aagccatgtttgacatgcccgcgccgacccaatatttcgtcatgcgctcatttttgggtatggtcaaccattaccagcaattcgtcaggaacatgcgcttcattcgcaaaccgctggacgatctgctcaagcacgaagcaaaatggaattggtgcgacaattgtcgcaaatcatttcaaaagttgaaaaacattttgacttcggatttattattgacacattatgatccaaaattggaaataattgtggccgccgatgcttcggagcttggaatcggcgccgtcatttcccatcgattcgcaaatgggacaattaaggccatcgcacatgcatcaaagtcactcgcgcccgccgaaaagaattactctcaaattgagaaggaagggctggccttgatcttcgctgtgcagaaattccacaaaatgatttatggtcggaaatttattctccaaaccgatcataagccgttgctctccattttcggaaataaaaagggcattcggcagtgcagcgtcaaccgattgttacgctggtcactcattttgttggcatatgacttcaaaattgaatatgtcaaaccacggattttggacaggcagacgcactctcccgtctcattgcaaaaggcggagaagaggaaaacgaacgcgtcattgccttgatcaccgccgaaccaattttggaagaaattctccattcagcctcgaaaaatttgccgatcaaattcgaagatttggtcatcgccagcaaaaatgactacaacattcaaaaagtcataaaattcatccgccaaggctggccaaatgaaaagcaaattgagaaagaatcggataccatcaaactcttccatcggcgcaaaagtgatctgacaattttgaaaggctgcctcatgtatggcgaaagagtcgtcattccgaaaatttttcagcccaaaattctccgactttttcacaagggccatccaggaatgaaacggatgaaacaactcgcccgacaatacatatttggccaaaattggacaaagaaattgaggaatttgttcaaaattgtgagccgtgccaattggctgcaaaggcaccgatcaaaaccgatctccattcatggccaaaaccaactggcccgtggcaacgaattcacatcgactttgctgggccattctttggcaaaatattttttattgtcgttgactcattttccaaataccccgaggtatttgagatgacaaattcatcagcaactgccacaatcgaaaaattgcgttatttattcacacgccatggaattccagaaacaattgtttctgacaatggcacgcaattttcgagctcagaattcgccaaatttgttgcggccaacggtatcactcattttttctccgccccatataatccaatgtcaaatggacaagtggaaagatttgtcgacacatttaagagagcattcagaaaattaaaaggggaggggaagccaaacaaggagatcatcgacacttttctgatcacctatcggacgactccaaacacaacgattgatctccttcggccaccgccacaccaaccatttgaaattgatttggagatggaaaggcaattcaacaagaaatttggcaccaaaaatcgaagatttattttgaatgagaaagtcttcgctcgccatcgctcctcgcaacattggaagacagataatttttttgaacgttccattacattataatcgaaaatatttgtaaaaagaattaattgctgatcggacggtgccgaaaagatccaataaaaatttattttttaaaatgtttggatttattatagactaatataattcatttattttattttcggatttgaacccggaccttcaaaaataggaatttaaatgggctactaattccgttcgcccaaaactccgccgggcaaaaaattttcaaacttagaattcaagagaaaaagcttagaaaaattttttcttataaaattctaagaaaaaattaatttcaaaaaatttctagcgattttttcaaaacttaatgatgaaaaactaagttttttcaaaaaattttcaaaaaaatcactggaaaattctttgaaaatatttttatcctcgagttttttaagatacttcatgaaaaaagttttttgagaatttttgacttttcgaatttgagtccgggactcgtaattggtcgaaatggagatcggattcataatcagcgccctcaaaacccaggaacaataatctttatttcgatacatatttaattgtgaccaaatccaaaaaggccaaaaacagacaaaaaaatatacacaaaatgtttttacaaatcaccaaatcctaaaatcaaagacatttaatataaatggaatggaatcatttgcggaaaatcgcactgaaaagcacagtgtcatcgcgaatcagaaaggcacagaacggatggttagcaacaaaacgttcttctttgctcgaaccacactccacttcttcttctgtgactgccgcagcgacggtgccctcctcattcacctaaatttcgttgtttaaattagtttttttttttgagaattgagctaaaactggtcaaaaatatataaattttctctggaccggctggtgacttttttttattttgcaattcgatggtggcaaatttgtataaatggaatccacaaaaataagggcactaattgtgggcaatcaccgtacctcaatgaccgccttctgcaccactttgctgatcagcaacggtttattgttggaaatgccctcaaaattggcgctgtcggtgaacgcggtggccatgcccatgttggtcaacggttcgttcaattcgtgcgtggctttcaacgtgaacttgggcaactgcacctgtgaaaagaagaggattgtcattgtgttttaggacagttcatttaggccaggcccgtatccaggggggggggatccccccgaaatgaaaaagaaaaattcttcaagcaaaaatgggcaattttttaaaattttggcaaattttttgaaaaattcttatcatgctccattaaatcttttaaaaaaaatttccccagcggcgccatcggcaccgctggactccattgaagcattatattttgaaaaattggcccaaaaatggaaaaattagtgccttttggcacaaatcgctacaaaattctgccttttcagcccagctctattttttgtgattttttcggagaaattgtcctcctcctggggtttatctaccttcactttgcatttgtcccgctttttgatcagtttcaccagccttttgccgtccaattgagccaacacttcggtcagtccaaagcgtttcttgggcaacaaaacgaacatgaactccttttcgcctttgtagggcatgccgaggagttggagctgtacaagcaatcagaaaattgtcaaattcataagaaaaaagcatgaaaatgtgtgaattgatcgacctgag

SEQ ID NO: 2840 - DNA, 2332 bp, Heterodera glycines
caaaaaatttttttttgtctacagataggttagtctggcacatagccgtagcgatttcatactaccgttgtggttctatactaataaattcctcaaatatgctcgataacacgaaatttgctctcgttaagcactgaaaaaattcccgagcagctacagataggttagtctggcacatagccgtagcgatttcatactaccgttgtggttctatactaataaattcctcaaatatgctcgataacacgaaatttgctctcgttaagcactgaaaagattcccgagcagataactgggtcagtatttggggtttcgacgattttttgcaattttctggaagagtttaacctcagctttccaatggtatatgaattttttttgttactcgaatattcgcggagatatgcacaatcgaatttcagaaaaaaagatgatgcagaattctataaaaatacatcgtttgatgatcattttctggggacaacgggtgaaaattattcacaagtccaattctgaataataacttgcaaaaaatttttttttgtctacagataggttagtctggcacatagccgtagcgatttcatactaccgttgtggttctatactaataaattcctcaaatatgctcgataacacgaaatttgctctcgttaagcactgaaaagattcccgagcagctacagataggttagtctggcacatagccgtagcgatttcatactaccgttgtggttctatactaataaattcctcaaatatgctcgataacacgaaatttgctctcgttaagcactgaaaagattcccgagcagataactgggtcagtatttggggtttcgacgattttttgcaattttctggaagagtttaacctcagctttccaatggtatatgaattttttttgttactcgaatattcgcggagatatgcacaatcgaatttcagaaaaaaagatgatgcagaattctataaaaatacatcgtttgatgatcattttctggggacaacgggtgaaaattattcacaagtccaattctgaataataacttgcaaaaaaattttttttgtctacagataggttagtctggcacatagccgtagcgatttcatactaccgttgtggttctatactaataaattcctcaaatatgctcgataacacgaaatttgctctcgttaagcactgaaaagattcccgagcagctacagataggttagtctggcacatagccgtagcgatttcatactaccgttgtggttctatactaataaattcctcaaatatgctcgataacacgaaatttgctctcgttaagcactgaaaagattcccgagcagataactgggtcagtatttggggtttcgacgattttttgcaattttctggaagagtttaacctcagctttccaatggtatatgaattttttttgttactcgaatattcgcggagatatgcacaatcgaatttcagaaaaaaagatgatgcagaattctataaaaatacatcgtttgatgatcattttctggggacaacgggtgaaaattattcacaagtccaattctgaataataacttgcaaaaaatttttttttgtctacagataggttagtctggcacatagccgtagcgatttcatactaccgttgtggttctatactaataaattcctcaaatatgctcgataacacgaaatttgctctcgttaagcactgaaaagattcccgagcagataactgggtcagtatttggggtttcgacgattttttgcaattttctggaagagtttaacctcagctttccaatggtatatgaattttttttgttactcgaatattcgcggagatatgcacaatcgaatttcagaaaaaaagatgatgcagaattctataaaaatacatcgtttgatgatcattttctggggacaacgggtgaaaattattcacaagtccaattctgaataataacttgcaaaaaatttttttttgtctacagataggttagtctggcacatagccgtagcgatttcatactaccgttgtggttctatactaataaattcctcaaatatgctcgataacacgaaatttgctctcgttaagcactgaaaagattcccgagcagctacagataggttagtctggcacatagccgtagcgatttcatactaccgttgtggttctatactaataaattcctcaaatatgcatggaacacgaaatttgctctcgttaagcactgaaaagattcgcggagatatgcacaatcggatttcagaaaaaaagatgatggcgaattctataaaaaaacatcgtttgattgatcatttt

SEQ ID NO: 2841 - DNA, 1019 bp, Heterodera glycines
  unsure (1)..(1019): unsure at all n locations
ttttcctccctttttccgcntccttttcctcccattgtcccacccttttcctccctttttccgcntccttttcctcccttttctttcccttttccccttttttctcctttttcctctctttttttctcacttctctctttcccctctcttcaattctctctccaaaaattcattttgtccatttactatttgtttttctatgcaccgaggcaaaagaaacacattttgcccaaaaatggccaatttggcccgaaacggccaacaaaccaaaattggcttatgaatggcttatttgggggcgtagcgacgggcggccaaatccgtcgtccattccccggggaaatgcatttcaaagcgacagattccgaaaaagtttggccagtcgccctcggggcgagtgcattatgccaacaaatttcattcatatttgtagcgttttctcccaggccttcgaagagagaaaagtcggggatagctgagaaatttaaaaatatagcaattagtcaggggaggaaattttcattatgaattgaaaaagataagggaatttttccaaaatgagaaatcttagaattttaaagacgctctcatctgctgatttggagtgcaacagaagggattcgcaatttccgaatctgtcgggggggggggggtaaccctaatttctcgccatcctttaaaattttacaaatttgcattttttaatttaatttttaattaaaaattaaaaagccataaacattatttttctctttattaaattccttttgcattctctccgaataaatgttaaattcgcctccgttttttggtccaccgccggcgaacggcgcccaacgacgggcgacggacgatcattacgacattccatgggagttcaaaaatcgggcgttggccgcggtggttggccaacaatatcagaacaaaaagagaagcgaaaaagcggcggaagtgccaaaagaaagggccgaaaatgaaatggtaaaataaaattaaaaaaagtaggcgacggaatgcca

SEQ ID NO: 2842 - DNA, 5254 bp, Heterodera glycines
  unsure (1)..(5254): unsure at all n locations
ttctccattttcactttttgtgccaatttcagtcgtttttcgactctccccagatggcgtctcttcttccgcgtgctcccccgtgcttctccccgtcctcctccgcctccccttccgcttcttcctcttctgctgaaagtgtttctgccattccccaaaatgtttttccgtccgttccgtcccatcgccacggagagacgccgccgcgccaaacgaacgaacggcgccaatcgccgcgcaaatgcaaaagaccgtcggcggagcagcagaacggcacgtcgtcatcatgtgatgcgatggccaatagcaaaacacagctgcgcaattatccaatggtggagatgccggcgaatgccaaagcaaaagaagtgagaggaaagtgccagggaaatttacaaattattgcgtaactctctctttctctcttcatccatctccaaatttctctctctacaagatgattttctacagtaccctctctctctttctctctctctctctacaagatgattttctacagtaccctctctctctttctctctctctctctctctctacaaaatggtttctatcgtaccccacccttctcaaaggtaacagcgctttgccagcggcgccactgtccgccggcgctggaggagttggacaatttggtgcatgagaagttggaccggtgtcagtctgaacaaattctgggcaagatgaatctcggcgcgcatttgctaaggcgaaggcccgaccgaaacttggcactttccttcagggcaaaagaaggcaattagacacgcagagaatgagacgagagtaatcccatgcttttgcaggtgttttgcacataaaactcgagttccaccaaggcgaatggattctcggcgacggaccgtacggaaatttaattgggccaattaaacaaattggcgggattcaattaaaataggctattcgataattatcatttttaatcgcaggcgcttccccaacgtccacgaaatgcttcgcgcctatcgccgtaaagtgctgccggtgcgcggtgccgaacaaattcgccttggcgttctgctaaagccgtcggattttcccgggggccttttgctgctttgactgtccgacggcggcgtttcctcgtccaagtgatcaaaaaaacatataaatgattgtgatgtacatatgtatacattttataatcgcaaataatatataattgtgatttattggacattgtctttgaaaaataattgcgattttttggaattatgctttactccgagtaaattgttggtaaaatagcatgtaccgtatttgttgaatttgagccccccttttgagcggagttgaaaaattgagctcccgggggttttaattcaataaatacggtaaataataacaccaagacgaatatgaacagataatgaagaaaagaaagagagctaaatcaaaattcatttaaaactaccatttaaaattaaaagtgccgttgaaaaatattaaaatggaaataaacactgtgtccatttgttggcatttcctttttcgttattttccaaaatataattttcccctttttacaacaacagcggagtttgtgctgctaaattagctgattatctgtcttcctcccaaatgcttctctgtccaaattaggctgctccgaagtctctgccgttttgccaaatttgccgatgccctcgggcaaagaattaatccttcggcatttcggtcgtcttacatctcgccaaagggcatttcacttctcccccgcttcgcttccattgctcccgtcgttgtgacaattcgacccaacgcatttttggccataactccgggggaaaaaggggaggcaaaggaaggggagaaaagttcagaaattaaaaaaggaattgccggagggagagaaagaagggcaagccaaaaacactcattcattcattcgaatatcacaaaatatgcttattgttatgagatcaactttttgtttttcattgtttttttctcattatttaaaataattttgctgtgtaaaagcataaattccctaattattcgctaattctgtcttttgttcctttgccaatgaatttgcgctccctttgcttcgttggcattctttcgcttctttttccgttgtgccgtccctttttgaccgagcttcgccattggtcgtacgatggcgttggcacttttttgccaatttgtcgcgtttgtttgtgcacgcgacaaaacggcgtggagtgtgtgccgcgccgggagggcgaaaagtttcagcttagggaagtgagtcgcccattcattttggcataatatttgtctttttcccccattttttttgtcattttcggtgcttttgccacgttgggccgattctctgtcttttgtcaatctttcgttctccgcctttccgcttttcgccactgcgcctcgcattcgtcaacttcagctccgccactgtgccatcgatgctccaatctctccgtcggcatttttgccgtttcactccttggaaagtttccatttgacgcattgtcgtctaatgggtcgtgacaacacattgcctcaagcattgttcagaccattggacaaattgcgcgaattgttcctgtcgggcaacggacttcgaaccgtacgcattgaaattggtgggtacgtacagaacgacgttggcatgaagatttttatataattgtaggcttattaaaggaccgaaattaagctagccaatgaccaaggcttaatcagtttagcaggcccaattctcgaccgattggacttgagccgaaaccgattatgcccttctcgaaaaaattcaaacgacactttcggcatcgaatggcctccggcaagacaactgagccttgaaaatgccaatgtgttagaactgaacagcacacattggacatttggggaagtcaaagtcgaacaacagcagaaggtgcctgataattaattgcttaatcatagcaattcatttgatcagcttaaaatttcactaaaaacggtggagtgccatgtgtcaattactgagagccattggaaggcgtttgaacagctccgaattggaggaaaccacgcacttcgactacacccttctgtactgccacggtatctgctgaatgccgacaaataacaaataattatgtcaattgggcggattatcaattaattggctaattaaatgcctcttactcaccgccgttgatttgcatttgcatttatgcctacaattagactgctcactcttcatcatttggacttttccgatgccgcgtccgtgccggaagagttgtttttggaatggacacgacaggcggaaacgcaatggcatcacattgggctgagaagagcaaaaatcaaagccaaagctggtgctgatcagccaaatctgcgccaaaatcagtggacattttgctcagccaaattggaatggttggacatctcagaaatgggcagcattggtaattaattaataattaattaattggggaaaaggcagcaacaaaaaacagctgaagtcggcacattacgattggacggatgcgttcagctcaaatggctttatgcggacgcaaatgccctgggggacattcaaatcggcgactcgggccctgcggcgcttctgtctttgtccgcacgcgacaaccgccttcgccgttggccagcgggtctgttgcgctcggctcgctctttgtcgtctgttcagttggccaacaattccatcgcgcgactgccgcccgaacttttcgagcagtacacgcagctgaactcgttggacctatcgcaaaatgcattctatcacttccattttggcgattcgtcccatcagcagcagaccacactcatattcctcaacctcagccaaaaccgactccgttccgtttcactcccaacactgtctagtctgaccctcttggacctatcgtacaacattttgacggagttcgcctctttgagttcgctgccctccctggagcatctccacctgagtgggaacgcgggcattcgtctgaccatcgcagcggaacatcccgcgctccttcggcttcacttagccaactgttctcttacgaaaatgcccgatttgagtcggctaatcgcactccgagaattggatttacgtaccaatgggtatggttgttttcattggtttgcttttaattgttttggcacaggctcgagtcagtgccgggccatttgctgccttcgcgcggagtcaatgcgttggacgtcgaggggaacgctctgcgggaattgggctgggattggcgagccgaacaattggccgcgttgcgcgacttgcgcgccgtgggaaatccatgggaatgcgcgtgcgaattcgcaccaccggtggtgcagcaactgttcaccccacaaacacagcaaacgaccgtaagagcagcaacagagggaaaagccggactgtggccattcccatggcttatgaccccccggggcatttggaagaatggcactcaccttcccaaaaggaattgactaaatgcgaaccaatgaacgaatgccattcgaacattttcagaatcaaaggacacttttctgtggggggaaatgttcacgcggagacaaacacagaaaagttgagaatgagcacagagaagcagcagaacagcagcaaaacggtagttattaatttagcactaattaactggctaattaccccccccnncccctcctgcagattccgtcccaaatcccttcgtcttttttctgcctccatttgcgcttattggcgccactttcgtcggcatttatttgctaatgcgcgggtctctgaaaagggaatggcgccgccgttctttcgtttcttcgcatttcgcttatcggcgagttcagtcagatggagaagcaatttgagaaaacaaagagaagaaagtgttgaagggaatgatcacctttccaattgattaggttaactgatcaatccattcacattacaaatttttaattcctcactaaaattaacaaaaactgacaattttaataattcattattttagaaggaattttataaattttttaaatgacctccattgcatgaaaaggtaatactttagatggtacccccgttttgaaaaaaatattttctaagggttttctgggccgctgatcacgaatctggcatccatttcgaccaattcctatcttggaccataattggaacaagaagtcgaacattcagattttccgagtttctcatttttggtactaaatcggcttaaaaataaggaaacaaactataagttat

SEQ ID NO: 2843 - DNA, 2184 bp, Heterodera glycines
  unsure (1)..(2184): unsure at all n locations
gagctggccgatttgtcggaatttgnccaggaggcgccggggcgggccgtggcactggcgaggaattgttgctgaaaactcacattcgaatgtacaaaataaagccacccaaaagggcgcaattcgtctccacccccgcagtttctcccattaaaattgtcataataaatgactgaagaaaggcattgcagaaaatgccccgaaatgttaccggaaatcgttcgccggtgacaccaccggagggggcaaatcggtggccatcgtggccatgttcacgtcgctgatgatgcgcagtgcctccttgcacgattggtacatgcggaggatttcctcacgcttttgagcctcgagcggcgactcctccatcaattgttcctaagcagcaaaatgcgtttttaatatgaacaaaaataaaaccgaagggggctaccgtatccccgccatgttggtacagactcgccaacagttcatccttcagaaagtcgcccaactgaaaaaatatgtgatttttaatcaatgaaaatataatttaagtaataaaattacttgtaaaactttttctttgcttaccttgtttacgataagatgcattatcgccttcgggaccaagtcgcggatggttttgttgataatgcgcatgtacgagtccaccaaatttcgaatggtttccacctgacgctccaactgcgggtccaaactgctcggctcctccacatgaccattctgaaaatgtaaaattgaaattaaaaaacacaaaaaataaataaaaataaatttaaaaaggagaaacggacaaaaaacaaaaaaggacaaacgaaaagacgaaaaatgaacccactcaatggccaaccaacggaaggaaactgacctcttgctttaagggaaggataaataaagcaaacattcggatttgattaaatgcgacaatcaaaagaccaaaacgtaaatgatggactaattttccgaatttgctaatgaaggccctccccccccccgccgttctccgtccgctcacttcgtccgatgtcggctgatgctccttctcaggataaactccggcacggagaaagctggccttccatgcgtccacttcgtccaagtttttagcactcagctccaattctttgtagtctttgtaaatgttcctgagaaggaaggaacaaatttcaataaggaaatgcaaaaataacaaaacccaaaaaaacaaagcaacgaaaagcaaaggcacaaaagaaaaatggggaaattggagacaaaacgcaacaaaaggaaaaggacagaaaggggcaacccaaagggacgacaattgggacgaggacagaacggcaaaaaggcagctcactatcatcgcgagttatgtgcgatttggccctttccgcccactcacctcctggaagcgaaaaacgtaaaaatggagagacaaatgaacacacataattagggataaaaggtggaaattgtaaaagggagggggcagatagggctgtataaaaacagcaattcccgggtcaaactgttcagtttttgaagcatcccttgttaatgcatgtaaaataatgcccaaaaatggacaggaccgaattcacaaagggaaaattggaaagagggaagaatgtattggttttgcgcatttgtgccaaataaaagtttaatgaaacttggcactgtttttggctgatggcttcgtccactccgacacagaccaaaaattgggggaaaatcggaagggatgaagactcactcacatgctaaatgcacacttttcattcaatgattgcgcattttgtaaaaaaaatacaagggaagggaaacggcaaggaatgaatgaatgaatgggcccggccaccccgttcccttcccgtctcactttccgtccgggtagaaaagtgcaaatttgtgctgccgggacatgaagccggcctcgaggtccttcagtttgatgccgtccagtgggagcatgtacttcttctccttctcctgcaaaacccgtttttcggttacttcgccttctttcttccttttttttacctcgtcatctttgtaccacgaaagactgtccgatgttaggacgaaccaacactcgcgagaaccgcgaacaaaactgatgttgtgcacggagagccatccctttgcgatcacttggttgcccaggtttttcttcgtgttcgtggacgacgcctttgc

SEQ ID NO: 2844 - DNA, 1601 bp, Heterodera glycines
agtcgcgcagtcgtgggtatcggttgacgcacaccgcgcactgtcgcacgacgttggccaactcattgaccaccaaatcgacgcatttaagcgccggctccttcagccgttcgatttgcttcttcacgatcgcttcgaatgccatgtcgggggtgaacagaccgaccctggcaaaggcaattagcgaatgatgggcataataattggggaaggaaccgaatgccgtggatgttgcgaatggcgaattgaatctcacggcgcatttccttctcgtcgatggtcattttcacgatttcgaaggggaaacgctcgtggaagagccgattgatgcgagcaccgccggagagttcgttggtgctgaccattttggcggaagaaccctcaatggaccgctccatgtcggtggtgaactgctggaccatcctaagcaaaatggcaacggatgcaagaccaatttattcacagaagcgaccacgtttgataaattagcaaaacaaatattagctaaattctcaatatcagcgacccattagccattgaacgaacataattaaatttcaacagagaaatacacatttagacacccacgtggcgtaaaataagcaattatccccaattatattaattgtatgttttctgagtcgtttctttatggaaggggctgatgtgtgactaaaatttgaccaatgccttccccccccccactcactgcatcagtgccttagttttgcgcgacgggtcgttgaattggaagtttttgtactcggccacctccttctccatggagtacagcttcttctgcaggttgtccctcagcgtgggcagtgtgtctttgatgtgattggtcagctgttggttcagtgccttttgcaggtacggcgtgcccaatctgtccgccatgtgccggtattgttggtgtgacagaaaaaatttccgctcggcgtccagcgcctggcggatgtccttgcggccgacgatgtccttctgagaacgattgatcacgccgacataacctaagcagaaaaggggaagcgaaggcattggaagggaaaaacactcggaaaaggaggaaaatggcatccaaaatgcccaaagaataccccgtctgagtgggaacactttgttctcgaggatgtcccgcgcgtcagtgccttcgtccatcaagtccaacttggtcagtactccgatggtgcggaggccctgagggtccacttcccgggccaatttaagcgcgtccgaagtggccaagtcgctgttggccggtgtaacggccaaaacgaggcaagtttcgcgggaaatgtacgtgccgatcatgtcacggatttgctgctcaatgtcgggcggctgatcgcccaccggaactttggtcagtccgggcaaatcgatcaaagtcaaattgagcactaaaaatattcccaaatttcacaagcagcatcaaattaaatcatcagaaaattttatttacaaattcaaaatttaatgaagaaagtttgtcgattttcgcctacatacgggcataattgggtattgatttgactgttaagctggcttttaaagacacgcaccccgccaaaaaatataaccaaatgacaattccgaaa

SEQ ID NO: 2845 - DNA, 4601 bp, Heterodera glycines
gaaccgaagctgtctgtacgaatcgatgacaaatttgtgccatttccattgccggaccgtccgttgcccagcaaaattcgctttaagcgtctttatattgagtaattcaaaatctgagctatgacaataaaagcattcatcccatttttaggtacatcgatcactccgtcatcgcttttcttcgttcaaatcatcaaattttcgacaaaagaggcaccaatttacagttgttttggatttcttcaccacacaccacggatggccagcggatttgggatgtttttgttcgtgaaatttggcccattttttcgacaaacattcgccatttgggcttttaccatggtgatgatttcgaccatttgcttcgtcgcacttcgccgacaattctcactgatcttaaccaattgaattcaatctattcatttggtctgtcgcccgctgcgattgatgctgattttgatgcaacaatttctgctggccaagcattgtccaaatggttgcactctccgagaaaagatggccaacccaagcgattgcattgcgaagattacaacgcacaagcgaacactgattggatcaacaatttcaaggaggtgtggtccgggggggggggacaaaacgtagccgcaaatttttattttaattaaaaaaattatttaaaatttagttatctagcctaaatcaaaaaaaatagataaattcgaaaaaaattattaagaaaattcaaggaaatgtaaaaaagtcgtttttttatttttctggaaattcagaaaattagtttttatacgagacggcgacgttttaggggtgtacccggtctgtggatggcattctgagttattttctgaaacccgaccccaaaatttctgaaaaattccgaattttatcaaaaatttcggaaatcggaattcagtgccatccctggtgtggccacaattcgacaaatgattgatttttgttttcaaattgtttagcattttcttcgtgccaatgccatttcttccgtcagttacgaaattcatttttatgttcatgcgccgtcaatacaaatggtgccatttgaattggtgaacgaatgcacaaaggaaaagctgacattggccagagcaaaagaaaatgaatggggcatcggttggataatgaaacgatgcaaaattattggggagaccgcgacggtttattggaaagacggaaattgggacaacaattgcaacaatgtgttcttttggcttttcggtaccactaattgcattgggtgagcaataaaaaggggggatttgtttttatacatatccaaatttgagatttgcgcttaattaaggccattgtctccgccaccggcagaagatacgggacaaagcatcacaaattggccgtcttctgctgacaaatgagtgatggacaaaagaacaaaaaacacaatgatgagctgcagaagaaatgaattaattaaaaatgacctaattcatcagtgatcaaatgcattttatgaagaaaaacctctcaatttcggtaaataaatcagatgcataaaaatggcaaaaaatgtacgaaaacacacaaatttgagatttgcacaaaataatcgacaaaaattgcgggtaagactatggatggtggtgggcccccttttttcgaatcccgaattcgaacaaaaagttcaaaattaaattttttgtaagtcatgaaaatacattttcaaaggttttcggggacgctgatcacgagtccgtcatccatttcggccaaatccgcggattcaaacaaaaatttaaattttaaaaattcacatttgtaaattgttgagcttttaactatgttttcagcgcttaatatacctaaatggctgtattggaagagtttcaaaattttacattgaaaaaattgcatgaaaaactggctttgaatgacaatgattttgtcgaatggcttgagcatttgggactcgtgcattcgcgtcgctcatgtccttgatgtggtggaaatacttcgattgtagcagttggtggaaattggcgttgcactacaaagaattgtcgggcaaaaacagggttcttggttcgtagtgcgacttttgcggaccactatttctcgatagaactgtctaaataaagaaaaaataataagaaattttaataaattcattattccaaattgaattagtgaaggtaagctgatgcaaagcgatctgtctcaattggagagaagtcttatttgacataacttttttctttcttttttatagaatttctaacttataattaaactgtgaaaattggcgaaaaaaattcgctaaattaaatataaaagtcagttcaagaattttatagcaagaaaaatttttatcgtgtttcacttccacgctttagttaaccgagagcttaatttttttccggcatgccaaaccaattaaattaacaaacaaaaactaaaatagtttttctttttctcaaaaattgtccgtaatttgctgttattaaaactatgggtccaaaattaaaaatgagcaactacatactatatttatctatggaaactaagcttctttaaaaaaatgggttctttcgatgttgattgcaaacagttgatcgattactcttgaagggcgatgttcaacttggtaaaaatcacaaataaaactacttagtcactcaatttttgaaaaaataatttttttttttgtttttttgacagttcaacccagaaatagtggtccgcaaaagtcggtccgcaaatgtcggctaacctcttggttgggactttttttgaaggtcttaacttgatcaaaagatacacattgggtgtattggttctattataaggttcaaaattgtcgactaagcaagtttttgaactatcatgtttagcaattttatccatgccaataagcatgttttttatttatttcgtgcatttgaaatttggtttcataaatgtgaatttttaaaatttaaatttttgttcgaattcgggtctggggttcggatttggacgaaatggatgccgcggattcgtgatcagcgtacccgaaaacctttggaaatgtattttcatgacttataaaaaattttaattttgaactttttgttcgaattcgggttcgggattcgaaataggctgaaatagatgtcggattcggtttccccgaccctggcaacccctagaatggtgttatctcgaaaataattttgaaatttttttttcaaaaaattttcgtattcactaaaaattaattaaagcctttctataatttaaaaaatttatacttttcataataaatttttattttgattttgattaggggtatcaaccagggctgggcgtaactggattttcaattacggaaatccggattttctcaattacggaattccgtaatccgtcatgacgggtgtcaaacactgtcaataatatttgctgctgaacaatttaggctaaatctgaaggcttcctgcttagaggaacccaaactcgagaccaaaatatttcaagtgcaatttacgactttcgtaactccccgaaacatgtaggggaacaaccctaattttaatcgttaaatttgtgatcgaattcccatcgaaaaaggtatatttttaaaaattagaagaaaaaataactacttgaaggggaactgatccaacacaacaaaaaagaaaacaaccaagagcacaacccactagaccatgcatatgaatgagtaaatgaagcagaaagttgccaaaattaccttaattttaaattttaaaaaagccaatcattaggggtgtaaaaaagtctcggtctcgagtctcgaaagtcgagaccgagacttacaaactcgagaccgagactctcggacagcactactctgctgccgtctttcgcaagagggtggacatggagggggttaggaggcaaacaaagttagggcccacgagtgattacatcaccatcgaccaaacttggggagagatcggtgctcccgagtttgacctctcaaagtctgaacccttttgtcaacacctctgctggcgtgctgaccttctgtccaaatcactgcgcttgggagttccgaatcaggactgggctcccgttctgatcagtgcgatcactccgatgctagcagagcgctgaataggcactcctgcgaaaaggagtccacttcagtttgatgcgccgaaatgccaaagcaaatgggccgaagataaaacactccaatcgccccgcgggtgtctcgccatttctattttcccacccgtccaaaattgccgacacaaaatcgaaaattgtttattgcaagttgggttcaaacttggataattaaacccctcaaattttttggcggacaaaaattagtgacgagaaaggggcgagcgagtgattggtaaatgtctccccagcagaggggatgggcacaacagataaataaatgcaaatagatgctgtctcgttaaacgcacaaaactgatttaaaaaacaaaatttctgtcccgggtattattcgaacgaaatattgtaactgaaacactgaggacaattcaccagtgaaatatggatacagaaaaccatcctagaagcttcaaactaagcaaacaaaaaaaaattggttttcgtgcgtttca

SEQ ID NO: 2846 - DNA, 6286 bp, Heterodera glycines
  unsure (1)..(6286): unsure at all n locations
ttttttatctttctctgcatcaaatttgaaataaaaaaatgcgattaatcgtcaaacgtcaaaagtcttttgctacgccgtcgtccaaaaaaaatcctccctcaacggggcacaagggactgcgacagaaaccaaagaagactccgccatcgaaggggcatttggggctgggattgaaaccgttgaacactccaccaccgaaggcaccgagcccactaatgaatagaaatgtattttgcccttagagtttgtgtttacttgaaaaattaataaaagggttgatcaaagggcccaattggccggcgccaagccgaactcgggcccggcgcttccacaaaatcgtgaacacatttgttgcgaccaaaaaaagaattattgcccagtaaaaagtaggaacaagaagcgaattttgcgtggctgggcatggaacagacggcacaatattcggcacagtatttgggacaaatgccgtttgattatgacagtatttattacaaaagttagtaatatttccaagtatatttctataaaattcccgcatatttttcggcccttccttttgcgttctacgatctgcttcagcagaattagtcaactcatgaaaaaatggataccgaacacacgcagaaaaattggaaaattttagcgaaatttagggaaatagtcaatttttcaagtccccactctgcgttcgacaaatcaccctcatgtcagggttagttggacgcaatgcacgaccctttccttgatctcgccgctgccttttctcgattttcccccttttccttttctctctcttttttctttcccttttttcctttctcccttttttctcgacccccacccttgcacaaaagccttttttcctgacctccccgtggcctgaaacgaacggaaaatatgttttttttgggttattgttaagccatttttcgagttattagtagtgatgctcgaaactctcggtctcgatctcgactcgagaaaagtctcggattttttttggtctcggtcttgagtctcgggttttcagtctcggtctttgagactttcgagactcgagaccgaacttttttacacccctaatgattggctcttggcaaacttatatttttataaaatttagttccttttttgttcaaccttgttaagatatccgtggtccagtggttttgttcttggttctgttccttattttgcgttggatcagttaaatgaaaaattacaagcgtaacaaaaacaatcaaaatgtcactcaacaaaatagtttccccgaacccttaacatttctccaacgggaaggaagtttgcgaatccccctacggaaaaagtctgtgccgatctttgaggtgaggtactgccccaccgcctcctcgacctcggcatcttcagtgaagcgcttgtcccgtaagaaatttttgagagaaaggaaaaggtggtaatccgagggagcaaggtctgggctataaggcggctggggtagcactttccaattcaatgtgttagtgatgtactgggtggtcaaacgtgagcagtgtggaggggcattgtcttggcggaagaccatgggtccatcaaattggccctgctgcctctggatgcggtatgcgatacaaccgcccgcagttggttaatatagaggtactctccaaaatggtcccgggaggcagcagttcccaatacagtgggccatgcacgaaccaaaaaatacacaacattcgctttttttgatggatgttgggacggaggaccaaaatcgggtcttcattcttcttccgccaaacaattttctgcgttgtgccgtcataacatatgtagttagctttcatcacaagtgacaatccggttgagcacatgaccccttcggtgtctggcgatgttcgaaagatacaggtccagccgtcgctgcttctgttgatccgtcagatggtgtgccacccatttggtcctcctcggccgacgaccggactttcgaagccatcgccatgctgttgttttgtggcaatgtcgcgccgacaattctgcacttgaactgtccggctgtcgtcgcaaccgctgtgccaaaacgttcttgtcaaccatcagcggccgccccgaccctcccttgcgtttttgagctggtgcggccctcgcgaaattgctggaaccaatgtcgagccgttcgttctttgcaaacattagctccaacagcctcattgatatgtcgagctgcttgggccactttgtggccaagttggaattgaatgtgtaagagggtatggatattttccttgtcagcggccattacaataagcataaataaattagaaatgcatgaaaatgaatgaatttggtatcaaaatgtagagaacactttaatgtatcgaataaacatcaaattagtctattctaataaaaacgaaaatagttatagtacactaaacataaacggcaactttttatgcaacgacctagttgttttttcgatgggaattcaatcacaattttttaacaattaaaatatgtcatttttggattttttttcacaaagtgcattaaaaagttcaatattttccccggcggcgcctatctgcaccgccggcacctaaaattttgaaaaatgagcaccacaaaaaatggtgtaaagacgtcaatcatatgaaaaggaaaaatggatgggatagcttaaataaggtaaaatgcaaaaaattatgagaaaaaacctcaaaagattcatttttaatcgattttttagtgtgtaagaaaattttttggagaaagtctcggtctcgactcgagaaaagtctcgggttttttgggtctcggtctcggtatctagtctcgggattaagttcggaatcggtctcgagtctcggggtcaagtctcggtctcgggaaatttttgctctcgagcatcactagttattagtagtgaaccgactttgtgacgaaaaatcccgaaatagttaactaaaatagtgacgaaaaagtgccaaaatagtgacaaaatagtgaaaaaagtccaaaatagtgacgaatagtgacataattttcagccaaaaattgagcaaaaaaatctttattcactgattgcagttacaaatgacattcctttcttacatttttttttagcaaatattgaaatttttaaaccaaaaattttgtaagaaaaatttgggggaaaaatttttatgaaaattttccaattctaactggtattttttgaaaaatttttaggtcgattcttaggggtgtattttttgtttttattgcatttttgttaacaaattttccaaaaaatgtcgaaaaagtgaaaaaatagtgacgaaacgccaaaatagtgatttctagtgacgaaaaatgacgtccaaatgaaaaaattttaacgcagaaatgcgttttttgagctcctttcttcaaaacaattgagcaaaaaaaaaagttttttcactagaaatcggttccctagttattagtgactattaggtttttatttttaggtcctaaatgcctaaaaaaaaatttcgaaagaacctatttttgattttatagatacacccttaagcaattaaaattttctaaaaaattcatttaaaaattttattttttgaaaagaatttttgtttttaaaaatttttcctaatttttttacttttttgaataaattttgtcaatttacacacctaaatttgagactttttagagcctattttccttttagaacctatttttagggttttttagagcataaaacctacatattttgcggtttttaatccgaattttttaaatatatttgagaggtttttttcataaatatacattttatcactaatcaattatgattggtccattattttcttaattaattcatttcttcttctgcggctgatcaccgttccgtttttgttcgtttgtccgtcactaattgtcagcagaagacgacactttttcgctgttttgtcccgcttcttgttcttcttctgctgatggcggagacaatggccttaattaagcgaaatttgaattatttaacaaaactaaatgttttttttaattgctcacccaatgcaatcagtactgaaaagccaaatggccacattgttaaaattgttgccccaattttcatctttctgaagctgaacatccgcggcctctccaattttgcatcgcttcattatccaattctccaagtcattttcgttttctttggtcaatgtcagcttttcctttgtccattcgttcaccaattcaaacggcaccattggcattgacggcacgcgaaaagaaaaatgaatttggtaactgacggaagaaatggcattggcacgaagaaaatgctaaacaatttgataaaacaaaaatcacaaaaatgttgggccacacctccttgaaactgtcgatccaattggtgttcccttgttcgttgtaatcttcgcaacgcaatcgcttgggttgtccatcttttctcggagagtgcaaccatttggacaatgcttggccagcagaaattgttgcatttggcccatcaaaatcatcaccaaacgcagcgggcgacagaccatatgaatcgattgaagtcaattggttgagatcagtgagaattgttggcgaagtgcgacgacgcaaattgtccaaatgatcaccacgggaaaagcccaaacagcgaatgtttgccgaaaaaattggccaaatttcacgggccaaaacatcccaaattggttggccattcgtagagtgtggtgatggaatccacaaatataaattggtgcctcttttgtcgaaaatttggtgatttgaacgaagaaaagcgatgacggagtgatggtgtaccgacatttcgccaacttgacatctcgccaactgacatctcgccaactgacatttcgccaactcagccaaaaacattcatttcgccaactcaaccaaaaacattcatttcgccaactcagccaaaaacattcatttcgcctactaagccaaaatctgacatttcgccaactgacatttcgccaaatagttaaaaaaattaaagaaaaaagtaaaaagagtaaaaaaatgctgtgttaatatcaaatacagccctattccagtttacacgtccaatcagtgaccatcatcatttcttatgtcctaacttttttcatatttgttcattccaaccatttttggatcaatcaaagcttaagaattcctttcacttttttataatttcgtttctagcgtaattcagattctagcaagaaatgccaactgtacgcgaaatacttgagagtctgcaaaagcgagtaaaaagaccccgcattgctacaaatgaagacagcgtactgaatgttgagaggacagacgcagaacaacaaattgaaggcacttcacccaggaacaatttggacgtcgcttcgagtgatgacgaagaaaattgtgagcccgttcaattcaaacgtggagaaacaatccggggagctctttgtctttggtatcaaggtgttaatagttttttttttttgatttttggacgagcagaacgtctccagaaaagcacaaaacgacgacaacggtacatcatcaaagaacaaaatgtggtgcgtatccttgacgaggctgactttgaatcgcaagaaggattgacaaacgccttgaatctgatcggacttgtaatgcaaggctttgttgagggacttcacatccgtggaaatgaagacagtgaggaagaaactgatgatacggatggaaattgaatttatgattttaacaatttttacttttatgatttttaacattttacttttttttctttggagtttaataaatatctatttgcttccgtgtatttttaggttaaatttaattattattataataaaaatagctaaatataaaccaatttagaatatatattttggtgaaactcgttgtcaaaatataaattttaggttagtaggcgaaatgaatgttttttgcttagtaggcgaaatgaatgttttttcaaagtcaacagatgcaaaaacaagacgaagaacaacttgtacgaagtgtcaaggaagcgagtgagattatcagaaagttttaattgtgaatgaattgaaaagtccaaattaatgaattttgaattgaattaatttaataacaaacccaattttagttaaccaaagggagcaattgaagcgcaaaatcattttggcgaagatcgtcaccaaaagtttcagtttttagtgctttttactattacgttntcgtttagagtcactaaaattttgggtcgactcgcattgaacgtgggagagagtggccgaacacgaaatgctga

SEQ ID NO: 2847 - DNA, 1356 bp, Heterodera glycines
  unsure (1)..(1356): unsure at all n locations
ccccccnccccccctgttccacaaaatttttggaaaaagcgcgccgcaaaaaaagcagaaaaaaaggagtcgcaaattaggaaaatgatcagtgaaaactagagtggtacgggaccgggaattttgggaaaaaccgtgaccggtaattctcgcccagacccggtcccgacccaccgtagtgaaaacaaaaaaattggaaaaaattcattccggtgaaaaatacaagccatttgaataaattttaaccatttttcattgcataaaataaaaattttaaatgtccttggatttcatgaattttccccactatgtccttgcaaatcggatgcccgtccttggaagccgacattgggcgatcccatccctgccataacgttttgaacctaaaaaaaatttttgccaatgcaccaaaatttaaaagttcggagggattatccataattgacattggtctcatttatggtaatttgttttgacagtgattatttttataatttattttcattttattgcttgttttctttattcacttgctctgtttcgctataattttgacagttacagagtaagtggtccccgcccttctgtgacttatttttcttgcttaataataaattaaatttaatttaaaaaaaaaattaatcaaatcttttttggtaattgcctgaacgctgcgattttatatattttagcttcgttagaatttgtgctttcgaatgataccaaaaaggtagggtttatcgaacatgaacaaagttattgtataaaaacccgggattgacaattgattggactcataaaggtcgattggactcataaactgcactagagcaaaatccgttccctaatcatgacacataaacaaaaagatacaaaaacattcatcaatcccttttcatgtctataaaaatgtttgttttttcactttgtctcgcatttgaaaaaaaaataaaaatttctaacgcaattaattattctgctctttgttgtgtgatatcattcggaactcggccaaaattgtgctaattgccacaaaaatgaaccgacggtaagcaatttgaaaagtcacacaaattcatcatttatttagctaaactgttttccataatttcagttggatttgcaacgacgtttggatggacattttcccatcctttgaccatgctcaactcggcctcaaattggcacttctttcgccacgtttcaatgcgttggtggacaaacatttcgatggcaaaagcgaattgacaatttggagaccaatcgaaattcgtcgcaaggacaaaggaccagaaccgaaactatctgtatggatggatggcaaatttgtgccatttccattgcccgaccgtccgt

SEQ ID NO: 2848 - DNA, 5195 bp, Heterodera glycines
  unsure (1)..(5195): unsure at all n locations
tgttgttgcgcgaagtgtacattttttcacgaaccctatttaacgtcaattggttgtgagtaagcactgaataaaattgttagacaaaaccttgcggaatcaatgacataaacgacatcgtcgatagtcactgatgtttcggcaatatttgtagaaaggattatctgaagacagactttttcgaaacattcataaagattatggcaaacagctttttcaacttttgaatatttccttaacacttcattaaagctttaattataatgcagtggtttaaaattataccgtatttttttttaataattcagcccggtcctccgtttgtaaaaaatttgcaaatttaaccttaaaacactgaaaaacctttcgaactccgtccgggacatgctcaaaaacgcggtgctgctcccgggctgtcagttgagaatgaagtgggagcacgagaaagcgttgttggttggagaagacggggtgatgcatggtgagacgattcagcagcagagagatcaaattccaacctaacaattagtcgatgaaaatgcttttctataaaacacggcagcagcagttgttttttaacgaacctggcaaaaagatcagaaccgccccgggacgaccattcgcgtcaatgtcattgagcagtagctaaatgacccaatttgttaactacagatttgtcgtgtgaagtcacttcaataatgtccagtggaatttccctttcgtccatccttcgcagtgctttgttcacttcaggcccgtacccatccccacatctcattaagttctccgaaagttccattgagtcttccgtttcattcatttcttcagtattttcgccatttttcgcggtggcaccagccgcttttgagtccgaatttgatttccgttttttcttctttttccgttcaggttctggcacgggaggcatgtacttgagcatttgaattacatcctccataaagaaatattggacggggtgtacacgttgagtgatttcgatgatgggacaattgccgaaataattcgtgaacaaagttgtctaaataaacaatctactataattggataaattgaaaatcccacatcgatcgtggcggacatgagcagcactttgagcttcggatttgccttgaccatgtcgcgaacgacgatcaacatgaagtcggtgttgatgtccctttcgtgaatctcgtcaatgatcagatgcgaaattccgcgaaggccatgttccatttttcgcattaacactccgacagtcatgaaccttgacagtagagaaaaaggggtcgtttatgccgtttaagtaactcacattattgccccataaggtcgcggacccatccattcaaagcgcacagaataacccacggactcgccgaccgactcacagcgctcctcggccactctctcggccaaagtaatggccgaaatgcgcctgggttgggtgacaacgcaattgaaatgggcacctttgccctgggtgagatggctttccaacaaatattgacagatttgggtggactttccacatccagttgcgcctttgaccaatactacggaattttgctgcacattgtgcatgatttcatcccgatgctaatggtataataaaaaacaaacaatttccagtttccattgaataaaacctgaaaaacggggagggcttgacgtgaagcagtcaaacgggcaggaatctttttgatcttttcccgcgttaacaaatcgttgcttatccattccaaggaacgaaatgccaatgtttgattgtcaatatttgaagcgctgtaaataatgtttatatttttttataattttaactttattatgagacttacttccacgcattccaattttcctggggcggagcccacacaatgttttggctggggagagcttcgttgtccgaaaatggaaactcttcaactttcttctccataaaaagcgtttttggtttcgaatcggacgcaaaatcaatgagattgtcgactgattctatgccattttgcgtcaaatgtgcgtcgatacgctccaccagagaagggtcgacgctcactttgatctcgggcaactgaaacagggaatgaaccacataattctcgtagtaagtcgctggaagccttacattttcgggagatgccttcttcttcgacagctgataaccggtggccccaggcaaagtccctaaaccggagtttattgcattacatttgtgggggattaaccagttacccatatgataaagctgacggacaattgaaagtgcacagctcgtttctgcaacttttttgttcgaaccgacgccgcgaccattgacagctaaaataatctgttattaaatcggtggtgaattgttacttttgttaagcgacggtataaatattccatgttcggacacaaatgttctaaactttatataaagtgcatgataacaacaaaaacccaaacctgttgtgatcagaacctgtagcaacagtgcgatattcgttggttggaatgcgatttttctggcaaaattcgtttagtgcttgtttgcagttctccattgtccatccacctttaagtgtattttaaaaaagaaaaaaaaaacaaaaacttataccatgaatatcggacgtcatgtcaacggattcagactaaattccataatattttcaatttttagttttttgtacctgaatgatttcttccgccttctgttcaacatattggtcatgcgctgtcttttcataaggtgcccattgcggcggtaaaggaacaatatttgtttcaaaattgtcatccgtaaaatccatttgggcggcattttgttgctgatgataaggttgaccaattgcatcagcggaaacagaatcatttccattttgaggagcattatcaatattcgatgcagattcctaaacagaaatataatgcttgtttttggaaagaaaactgaataaaagcaccagaagctgcagttgtggtacttccgacgcattaattaaaccctcacgcacaagaaattggctaaagtcccttgctaaaagaatttatgattaaataatttgacttcctcggacctgcgttagactgcgcatcttttttagaagtggaatttcccaatccaacttaaaaaaaagaataaagacgattttatcttttaaactcaaccataatttagtccggcgactgtcagttggcagatgaagcgtggcttaccacctcgattttcaggcttgatgttgtaattaggagttcccaatttgcgttttcccaacactgcgtataaagactgtttgatgtcactcatttcttattatgtagaatggtgatggatgatggttctaaaatgtttattgactatggctgggattttacacgttacgaaaaaaaagtagagaacgagattttcaaatcagccggactggtccgagccgaaatttccaaaaacaaccggtttacgggtccggactctcgaaaaccgggcaaaccggaaaactcatcaaccggattttcaaatttccgggtctggaaccggtttcctgtgcttttcgagttattagcacctattttcggtactagttaagtttgggtcccccttttgggtcaaattttttcaaaaatttttttttcttttattgtcgcaattgctttttagattgatggaaaagcttaaaaatttgatcctgtcactgggcagcatacaaacacaattgaatcgacgtggcagaagttcaagcaggaacacaaaacgagatttggcagtcacagatcacttttttccacatacatttctgattttttgtggcgtaagcaatttggaggaccggacattttttataatttgtggacccaaatcgcggaattgtacccaataatcacataaatctccttttatttgttatttaaagcaattgcgacaataaaaacaaaaaaaaattttttttttaatttgaccaaaatataggacccaaactgtactagtaccggtttgctatctatcgaatgtatgaatttctccttgaaacttgtgacaattaattttcgggattttgacgcgggatttgcgacacacaaaattagcaccggcaacattaagtgccgatttactgctgttcttttctcttttcagcttcattctctcctcctcctttttgcgccgaatttttcctttttctctctttctcttccgtctctcctccttccctaatgctattttcctccttttcctcctcttgccttatttctccatttttgctgttgtccatcttcatctcctttcccatcgaaatttgctgtactgcttgaacttctatatacacaaatactgctgaaaatcccgaatgagaaatttctcgagcttttttgagctcattcttcggtcagctgatatgaaaaacgaataaaagggaagggatggccaaaaggagaaaagaaaatacaaacaaatatggcacttttggtgccaaagcaaatagtatatgatggaagattaattatcaccgaatcgcggaaccaattaggaggtcattagtatatttttggattttgacgcatatttcgcatcttgtcaatttctggattacctaatttgatttgttaaaatggaacattttgatttttttattaaagaaatttttaatggaaaaataaaatggttaaacttaaattgttttcgttttgtctaactgactaaaatttccgattaaatgtgaaaaagtgattaagaaaaaaggtaaataaaattgagaagaattttgagatttattagcagatattttgcctggaattaccaattttaaaacataaaaaaataatttctcaaaagattttataaactttagctgattctgatcactttcggcctcagaagagcataaaccaaataattcatctttgcttttcattttttggttgaggattaggttgcttttcccaaagtgccgttgtgcgagcaaagaaaatgccgtccgttcccatttacgggcagaagagggcattaagccactcaaattaaccaaacgaaaatcaaatggacagattaatcaatggcaattaatctgagagaagagaaacaaaatgggaacagcagagatgggcagagaaaccatggcatataaaagcacaaatgaaagatgccaaaaccattcagcaccaaaatccaaattagcactaaattctattttgctcccctnatttattttatttatttaccg

SEQ ID NO: 2849 - DNA, 2887 bp, Heterodera glycines
ttttctaaaaaatcgtttcaaataaaaaaacaaaaagaagcaaaaagtatttactcgtaggtgaacctaacttgggggtgaaaaaattctttgatattcatacattgtcactagcagattcactttgacatggcaatccttaacattgtaaaaattctccgctcccatctgggaacgcatgtcggggctcaatgatgttacattgctggtatttttgaacatcaataattcgttttatcgctcattagttgatccttttttgagtttcacttacattccctccgttttgttcatctcctccttgctcttctccaaatcggccttcattttgtcacgatccactgacaatttttgcattttcttttgcattgacttcgtccattcgttggccctttgtgcctaaattcaataaacaaaatgtaatcgtaaatgtttaattgggttcttctatctacctcattcatcaaatgtccttcgagtttctgctgatgcgcctgttggaatgcgatgacctgattcagtttgactccgaattcgtgcatcaaatcgttgggcgagcgaaacaatgcactcagctcaggattcagatggcggttgagcttcatgagtttggcattctgtttatgacacaccaaacaatcaaacggctgtccatttttgatgggggctttaaaagacaatataggtttaaatgttgaccaaaccatcgaaaaagtgtaacagagcaatattggcgctagtttaagaagagcgcaaggttcggaattagtagatgcccttcaaaacacatggaaaaaccgcaatttttcatcattaccgaaaattttgtccccctttttttagtttcaaaaacgcttttttagcgccgaaatattcttcataaaaaaatcgtacaattcgttttcagacacttcgcacaaagcaaatgtccgcacgaagtaaaccaaagtcgcgttttgttatagttttttgtcggcaccgagaagcattggttgcctaagttgtaatgtgatgtttaagtcagaaatttgttttggttcatacaatgaatccaagttgacatttggtgattgtttaaggattgtttaagaatatttacgtaaaatataagctaaaagaaagaaaagccataagattatagcgaacaacaaaaacacacagggccagaatgaggaactgattaatgggtgaaaaattagagacagaaattggggtaaaggaaagttttagagaaaaataacattttgtcgtgggtacttttggtcaagttgatgatatgacatatgaagcagtaaacaaatccatacatatctttcaattaaatgcgggattaatcccgcaggaccgcgtccgcaaaaaaattgagttcaaatcccgtagcttcgagttgacatcattcattttcggtaatccttcggaattgattggtgtcccgaggtcccgacggaaaaaaagataaaaattttctttacattttttcaagggcaaaaaatagctgatcttatatcagaacttggatctttgatttcgaaaatcattgattttcaaaattatcagaaattttttggtgtatctaaattttcaaaaacgccaaagaatttttttaattgcctaaaaggcgctaaaaaatagagatcggcatttctccattcatttggcagccgcagctgcactagcagtagtaaatatttcggcattggcgacggataaattccggtctctagttgaattgttagaataaaattaggtagttaacacttctaaaaatcatttttataatttgaattttatgcctaatgttctttaaaaaatgttagagcaagcaatggttttatgacgcgcttcctcaacacttaaatttagataaaaatgtctgtttctccttcagctaatcggtcggcctcaattggaatttctgcaacagaaacaacttcaaaccaatcttttttctctgaccaacaatctctttcagtgaatatgtccgctaatcaagtcagtcacataaaaaattgaatttattcattgtctcatcttgttatccgccgaaattagattttttcatagatattaggtaaaatagtatgctgatagatgaacacgaaaacgtgaattctggggtttttggagtcgccgatcacgatatggcattcttttgactaattctggaccactgggctgaattcgaaccaaagtcgaaaacaaatttttattcacattatgttcgaatctgaacagagtaactaagatttaatcgtgttatgttatatgactaatttttgctagtcttattatcaattttaaaaacaaaagtgcgaaattgaaaaaattctcggcgggagcaattcctagggattacctttttaccgacattaagttttaaattgggttttgaatagattaccaactcggaggaaaaaacacaacatttgcgacaaagcgaaggtgaaacaaataaagcaacttacaatgaacagcaaaaaaatggtattcttccaattaaattattattgcaaatcgatgccacttaaataaatatttgttttgaatagcaaactgtgaaatgtccacttttgcagcggcacaaatgcagcaacaacaacaagtaagaggacgaggttttgttttgtggaatctgttgagtgcttcggcttgctctatttttctagtctgatcagcagccgatggctcagccgacgctcttcccaattggtgcgatgccttcaatgtcttcttcgtcgatttcctccacgaaacagccgagagatgtgagtggtattttctcaattgactcactcccattcgattgtcaaaatatgggcgtcggagggtggtgaaaagtcactttccctttgaggctaataatgttaagggcattttggcaacatac

SEQ ID NO: 2850 - DNA, 3683 bp, Heterodera glycines
  unsure (1)..(3683): unsure at all n locations
agagaaaaaaaaaatggnccatgttntgtggaaaaganncgggggagcggtttcttaccggtttccctttgttcgatttgtaatatttggccgggggaataacgcgctggttcaaaggaaccgcattttgtccgttcaaaatgttgcccgaaggctgttggtgattttgggtaatttggggaggattttggaccgccgctggggcattattttgagccgaatgatttggtggcggattttggggaggcggagcattgtaagtttggttgtgagtctgttgttggttattttgggcatccgtagggaaatggtaaaccggagggtttgacgcaccattttggttggtagggtgagggtaaaaaggttgttggtacgggttgtagattcccggagggggtgcctggttgtacccgggattgggtacgttgttgttcatagccgggtaggagtaagtgttggggtatgaataattggaattcatgtttctgcagaacaaatatgaggacgtacgggtataggaggcaattaggaacataaacgagagtggtgtgatggggtgaatttcctatttatatacttccccaatttgctaatagagaatcccatcgggattaatgcacatttggggtgggcaatgtgaaaaaattttataaaattattagcgtaaagtgtgggtgggatttttgtacataggcaatttcgactaacttgtcactgcatgactaatgccggccgtccatctggagttagccattgcattactatggtcggtcgtctttgcggttcgacacggtcgcgtcttaggcgtatgggataacgccgtctacgctccattatcatccatgagaaagcgcaaattgtgataaatatgcaaatggcaagaaagccctgccctataatttcttggtgcatccatacaaaaatctttacctcaaaatatttttggtcaatgaatgactggctttccacctcttcgccatgaattgcttgcactattatgcatattgccattattcttatgaaaaggcggtaacctcggaaaattgggtttagcctaattagacaataaaatactaatatgccaaataatatgacacttatgatgatggccaattgaatgcctccaaaaatccagttaaaaaggtgggaaaaatcgccaaactcgggaaagctaaaacctccgggatggtggtttgttcgcgatcctgaaatgcgccaatttcggcctaatgagggtaaataggagagggtccctttcattacgaacatggtttctcccccagggcaaattactttacaaatggaattgatttcagccgaattaagagagagagaagtgttgtgctggatggggttatttgtgcatgggatggcccaattcgccccattttcacacgaaatttcggctaggggggtaccgtaactagctgtacaggtgtaagagaagcggctcccgattcggcaccggtagcaacctgtgatccctgctgggattattttacacgtggccatttgatgacttatggccaattttattccttccatttttaaggcaatttggatcggtacaaaatctgtttcggcccaaatttccttagggtgacggtaatttaggacaaatgggccaatggacaacggtaatttagtcgttggatcttccaacaatttttcaacgtccgtttcgcggcaatgacagcggacagtgccttcactgtggtccggtcggcactttgtgcaagaatttagggaaagactgcactgcattaagtttgccgatatttcatccggacaattcagagatggttgaaaagacggtacgagtgcggctttgtcccggcctccaatgaatatgccggataatccaggagcggcgggactgccaaaaacggctggcgttacggataattttgccattttaagatggaaagtgtggcccgaatataggaccgtttcctcaaaatgtgatggatttccatgcaaattaatttttacccttaacataatcctaaagtcccaggcaggacatctgaatatttcgtaaacaaatttatttccgtgtttagtgggaacagcataattccgataatataggcaagcggaattggtccctccgcagccattaaaccaaaaggacccactatcgatgcagtaggtgtttccgggataattattcgcctcggctaattcgggaacagactgatttgttaacagattttcacaattcttcccggtgcaggaccccattccagggcaccgtttgttccctaatgtttcaattttgtaggatctgataaagcccaaagactcgggaatgcattcctgaaacaatcccttaagggtgaaggtcatggttcccaaaagtacggattctggccctcttatcagtaaatccacgggttggccgactgggagaagatttactagggtaacagaattgaaactacattccgttccgtttgaatttgtctcacattcctctgtgtttgctgttatagtggctggttcgcctaatccgggtgtgaatgcttgggatagacaaataagtgccaaagccatccccagtttagtcaatggcttaaagcgcctatttcggtgtattttcctccactgctcatattcatcatctgagtcttctgtggtcaattgccttgtctttgtcttttttattgtttttggccagcggcacaaaacggtgaaaagacagcgcttcgaagtgcggaggagacaacgagtccacttcaaaaagcaacaaagaaaaaacagcgctactccggtgaggaaaagcaaaagtccggtcaaaatcgcggagaccgtgggagagcaatggaaattaaaaatccgttcccagcaccagtaacagtccaaaattagacaaatatcgactggggcacattgggcggaaacggtagtggagatgtttggtccattccaaaattgggctagacaggagacccctaacagaaggttctcgtcgggaattgcaaaaaggaatggatttttatactcccgatttccacaaattccgtcgcaacatatttcaacccgttggatatcatcccgtcctatgacatttattccctgggtattacatgaaaatgagttgctaacattggctgattgggttggatttcccatcaatttcgggagggtagggaaagcactaatgggtccgaaaaacagagaaatgacgaaggtcagcgttataatagacgaaaggaaggatgccgaagtggtggatcctggtcgcttatctgcccacttaacaaaccgtttttgtggtcggggtggttcttttgcccatctgagcattggttttgtggccttttttgccttttctagtgatatgttttcggcgacatcatcatttccattttccgttaggaaatctcccccgggcgggagagagttttctttttccttaggaatttcttctaaaggtaccaatttggacactggtcttgaaatgattctaccatttggcatgaggatattagcgcttcgagggttctcttttggctcatgtaattcgatgatttttcctaaagaacatgtgtttcttggaaatccttcattttctacaaggacaatctgattaagacagggacggttttgggcagtgatccgtggccccttatgattcgttagagttcgctgtcggagcataagcaaatattcttgggacc

SEQ ID NO: 2851 - DNA, 1212 bp, Heterodera glycines
agcaagtcactgtggcagaagggaccaggtgaagtgctctttgatgggcgaaccgcccgtcttgtgcaacgaggacagccgctcgcactcgacgattagcgagggcagagggggcggcggcgccgggcgcggacggacgggcggcggtggcggaggcaccggccgttggggcggactccacggctgccaggactgttctcgcggcttggctctaacctgaaaagcagaggaattttatacaccgaagagttggagcagtacactcacgctaaaatcgaacacggccggatcccgtgacagtccagtgatctgtccacagtgcgtttgcacttgggtggtgctgggaggcaactggtagcgctgcacgagttggacgtcgcatggattgtacgcggggaacacgcgttcctcctgtcattgattttgttacagtaatcgcttctttgatattctgacactcaccacatattgctgagtgccaacaggtgcccatttgcaggcgaacttgtcgaagtagttggccccttgctggtccgtctgccacaccaattgcgcctcctgtggccccgttgagtaaacgcgtggtttcgggtcgtattgtacgacggacagcgcgacgggtcgcgtttggaagcgcacttcgggcgaccatggccccgccccgcgagcggtgaacgcgcgcacacgagcggaataagcggtggagggcagcaggccggtcaagtgcactcgagtggtccgtgtcacgtccgtcagacgcggaatttgggcggaaagacgatcggcagcggctatttcgtactgtaatagcaaatggaatacggtaagtggaaagagaaaaagcacagacttcatattcagtaatgtctccgttggtgtgaacgcctaaagggaagtctggtcaagccaatccgttctccattttctcacatggcggcgcgtgccaactcagttcggcattttgttcccccacattgtccacgcggaaatttgccggaggcgcggtcggcgccgactcatcagtctgagcaaatcggacactgatcacccgtccacccatgcccttcgctccccacctgaacttccctggtgacgcgttccccgattacctggacctcccgcgttacgcgttcgccggcgcccaactgagtgcgggcggcgactccgatgcgatatttggagtgggggtgtagttgttggatggtatacgag

SEQ ID NO: 2852 - DNA, 2473 bp, Heterodera glycines
cccgcgtcgtttcgtcccgcgtcatttcgtcccgcgtcttttcgtcccgcgtcatttcgtcccgcgtcgtttcgtcccccaagccaaaatgagtcatttcgtccccaaatttctttttatttataaaatatttagtttttaaagtgttaccactaaaaatttttctgggtttagttaaacaaatcataaatttacgaatttagacgtatgatgaatcgtaaaaaaattgaaaatcttcaaaaatgtcgtaagcgcaagtttttggataacaatgacagtgaaaacgaaacgctatctgctgatcaccgtgagcaaaatgagaacaacaacgaccgcgacgatgattttgaagaccgcccctatggagatggagcagtttctcctctactttgcgaagacgtacatcggaatgacgcagcaacagctgcttgatggtgaaaatgcgtttggagttcgtcctggtggtctttctccattttcgtgtccgtttttttcattttgttttatttttattaatttgcttttaagcgtttgctgggacatcatttgcgtccgttggatctgaccatacgtactcacggcagcccttgcaatttggcatcgactcgcccgccccctcaacactatcatggccgtcaacagtggagcaaaattcgccgttggtgcagtactcattgagtccatcatcaacgacgacattgcagccaggcacagaaaaattcccaaaattgttgatttaaaaaattttaagcccgtccttgggaagaacccgtcgttcgtcgcgcactgttcccaattccatattggaacgtgcactcgcatgcggcttctgccctcgctcggaccaacaatggcctcgaagcaacccatcttcatttctctgtatttattacttataaaaccccaaataaaataattttagaagggtctttgtcatcacccagccctttccgatttcatttctgggcccgtaccaaaagaatgaggtaggggttaacctaccctcagctgcgggtagacctacccgttacccgcactaaaagaactacccttagttgagggtaacttaacccggttcacttaccctcagctgcgggtaactttttaacccgcactaaaagaatcgagtaactggtaaccctaccctcagctgcgggtaacttttctaccctgacccataccagggtaacaatatgagcatgttttttaaaaaattccgaaaaaatttaaaaagatgacattaaaaaatttccttttgctaaattgtactaaaaagtctgctctatccaatgatataattttggttaaaaaatttttggatttcactgagctagagtatcgtcaaaaattttgtaaatttttactaattttttttgttggtttcttgtctattttacttttaccggttcaaaattatgattattcgattctagacaaagttattctcctttttttgaaaaaatattcgccctttggaacatgaaatacccacaaaaattcactatgtttaacgtttaataactttctttataagtaatataattaaacaacttagtataattcgatagctctaagtttcctcactaattctataaaatttcatagaatttaattaagtattgaaagagttatgattagaaaagtcaaacatctctttttgtaaggcaatttcatcatagtgatactaaaagaaacgggtaacggatagccaaacccgcagctgcgggtgagcccagcgagaacccggtaacattcatttagtacgggttaacccgcagctgagggtgagttaaccgggttaagttacccgggtaagtctacccgggtaacattacctcgttcttttggtacgggccaggcaaaatttgttaattttactcattttttcttcttacactttaatgactatttgtcatgggttcggatccgctcgacagatgatgaattattttgaatttttttcaaagtattattccacttaacatatttttattctgttattttaatttattttatgatgctatttgatagaaaattgtttgctgatcattttttaaaagaagtttatggctctatcatttgttttaagttttttatgaatttttaaaaattttgtcattttcatcgatttttcagaactttgatcacttttttctgatcatttttggggccggggccaaaaaagccgaaaattggcaatagcaaatcgactatgctctacacgaaagaagtgattttaaagtgatctgggtggttacagttcggaatgttcccttgtgagcaatgatacattaatctttcctcgctagtcttgacctcccccccccccgcctaccccaactttgtccattggcacctttctgttcagttcgttccatcgctgttctgtcctcctccgccactccaccacaaaatggtccaccgtttcctctccgtccgtgctgtctctgctccgccaactcagtcttggcgt

SEQ ID NO: 2853 - DNA, 1158 bp, Heterodera glycines
ctgatcgcccacgggtggtccgtttccgactccaaaacatggctgatccgcgtgagactcgcacgcgctgaccgatagaacgcccactttgttcgtccacctgccgaatggagcactgttgttgaccttctcacttctgtgctcgcctgaagttccacttcggcattagcacatcgccacgcgctttgcggaggcggcatccaagtgacacggacatggcctgggtcgggagtgtcaatggccaaattggacggagggagcagagggacgagacaggtgggcgaagaacggacctttggggggggggggagaaaatgccgatcaacaaggcaaatgaaagaaaaggacgaatgaagcgccaaattatcagatcactactggttccaatggcaagttgtttgtttttgtttttacctctggcgatgtgtacagcacgtaagagttcctgtccaatgcctgaattttcacttcgtacggcaccccaacagaaagtccgctcagcaaaacgctgttctcctccccttcgccaacgtacggcacaatttgactgcaaaatcggagttataaatcatcgccctattatgatcttaaatgtggacaaaattcacccaaaagggttccatccggcgccgggggcgcggtacaaaaggcggtaaccgaacaccccgcggccactgccttctgaacgccatttgacctgtagggaaccatcggaactttgggagaaagtcggcgcggagatgagtgctaaaaaggggagatggcatgagaaagatggaaagcagggaaaaagcggaaaagggaaagcaagcaaaagacggtgaaaagtgagagagcggaagagaaaaaggcaaacgatcaaagggcagggaacaaaaatgattagagtaatcagcgtagagaaagaatgagttaattgagtaaatagggggcggggagggaggggagggaggggacagacatcacggcacgccacacacagtgtttacctcgaccattttgttcggatttgttggtgctgaaagtgtccggacgacaccaaaagtcagtgcgcggatcgcagatgatggaacgacgaaatcgaacggcagctggaagggagtggaggtggggaggagacggaagagaaggagagaaagaggagagagtgcatttgcg

SEQ ID NO: 2854 - DNA, 2151 bp, Heterodera glycines
catttttcgagttccacctggtatgcccgtacgtctcccaccgattgtccgttcactttccatcgcacaatcgttttggcgccctccgtcggttcgacgcgcacttcgcttactgaaatgcccggcagttggtcgtccggcgaagtaatgccaatgcgctgttcttccgacgaagtcttgaccaaaatgaagaacagtgggctgcccctttggctccaacgacccttcggctctttcagttcgtacgtcacttccgcttcgtattgccgtccaaagtccaatccctgcaggttcaagcagtagtccgtctccgcgtaggtgctcagccccggcggacattgcaattcggcgggggactgaaccaacgaagtccacggggcggaagcagaagcggtcggtttgtaagacactcttaatggaagaagaatgatgcccttttgccagtttggacccacttaaagcgcgcaatgttctcgcggtgttccggcggcggactccacaccaaaaaggagtgaggtggtgccaaaacaatgcgcaggcggtataaattctcagcagatgcctttggctgtaccgcgtccgtcttttggtcctccaacttcagcagttcgtcctcatctttgccctcggcggttgtcactccaatcgcaacactccacggactgtgcccgtgctgaagacgtgtgcggacacggaaagtgtacgcggtggccgcttcgaggtcaccgacggtggcggaagtatccgcagagaaggcagtcgtctcggggggcgattggtcggaaggccaaatctaaggtaaatggttggcagcgttattttcgatttcggcatgccgatgcatcagtcgataaccaccgaccgcgtgttcgtatccctgtatatcgccctcgcacttggactgctcccagctgaaccgtacgctttccgtgccaacttcgtccgcttttggcaccgccggtgccattctttcgcatgacttttcgtccgctctgtgcgcgattagctgctccccggtcaccgccactgctcggcttcgctcgtcgacgaacacaacgcggacggataaagcgttgtcctccagctcagtgagacgcgcagccaaactttggtgcccattctctttgggcggtttaatctctgccgccgcacggcgccattttgaatcattgccaaggcgaaactcaacgacgaaatgagtggcgggaacagtcggctcggacttccagtgcacctgttattaatgaaattcgacttggttttgaccattcgtaccttcaattgttcgtttttgatcacttccaaacggttgatcacctttggccactgtcgctctctctcctttctccctacccccccccctccctctctttctcttctttctctctctccccttaccctttcttcctttcttctttatcactcactatcactcttgctctttctatcgtcatgtctctctttctccccctctctctctctcccccgctttctctgtctctctctctcttcctcaccgtctctcatttcctctcccactctcttcccctgatcacctcgtgccttccctctctcatttcgacaatcactggcttttgcgacagcttttgcattggttctgtgttcgttcgaattaacatgtggtagatgcgtttcggttcatggtccctgtgatttgatcagtcattcatttcacattgttttgtctgttttgccattttaaatttattttttggccatttgcccgtgactcacgcgtatgcgaccacgccgactcggtactgagtgtcggggcgcagttcggcaaaataagcggtgtgctgcttgggacccactcggctgcgctccattctctccccttcgcccgcccctttcgcggcttcgtctgtctttttctgctgctcatccgtcaccatttcggacaaaacgacctgtaaatgtttaaaatggcgcatcagcaccaacattttcacctcgtaatgttgcagcaaagggtcctccaaatgaggccaatcaattcgaatttcgttatttcccgcgtattccaagcgcatttctccagactcttccggcactgaaaaacggcgtaaaaattagtgagagaagggaagtaaattcactgcttttattggcattattccccccattttc

SEQ ID NO: 2855 - DNA, 1443 bp, Heterodera glycines
tcctctttccgggcactggaaaaacgggggtaaaaattacgtggagagatggggatgtaaattcactcgcatttattgggcattattccccccattttctccattttgtcccctcttctctcctcaccttcgcccttcgtcgagacagtgaacagttcggcattccatgggcccacaatgtgtgccctgtccactcgctctgattttgactcgcgtattctgttcccgacaaaagcccggtgatgctagcggatggttgtgccacagtttgacgatggacgtcgaactgctgactgccaagcccacgaagttcgatttggtactcgccgatggagccgcactcaggcggttgccaagcctaagggggggggggggggggatgaatggaataggggaaggaaatgagcggattgatcaaacgactactgatcagagagaactgatcatccgatcgatcgatcgtccaaaggcatggcttaccaatgccacgctgaattgtgccctttccttcacgtccacgtcgcccggttcagagatttcgtccggttcgcattttatgctgacaatttcgttgcgggcgcggatttccggcgtctccaccagaacttcgcccttatcgccaagcactttgatgcgtacaaaataggaaatgccggtgggtaactttggaatctgaaaagaaagagggggagggaatctgtgccattgagtgatcattcactaattatcaacgaatcattccaattataattagcaatcactgcccatcacagactgattaatcatgaaattgaaaatgctttgtttactttttctccccacgccttgtccatttgtccccctttatccccactgtcttttgtttgttttgtcatgcgatatccccccccccctctttcccttctgtccccccccccttttcacctgtactctgtactggtggtttggtcctttgtatgggatcattcccgagtgcacattccattgggactccttctcggcccgatattcgacgatgaatccgcgaatggatgagtccgggtggtctccgctttgaatgccttcccattccactgttaacagcgattcggtggtggcgcgccgatgtcgaagggaaagggaatctgatcaatggggggatcaattaagaatggatttggctgatggttagtgtctgtgtttctgatcactgatcggcactgatttggccctcattttaaaaaaaattccaattcaaagtaccaatttgtggcaataaatcgaccaattgttgagctcgaatttggtaaatggcactgtttggaagatgaatggaagggcaaatgaaatgggcaagtaaaaggtgaagaagaatgggccaaaatcgcaacaaatcgggccttagccgaaggcgactttgtccagaggacgatggactcattctgcggatgccaacggagtcgg

SEQ ID NO: 2856 - DNA, 9893 bp, Heterodera glycines
aatttgctgaccaacgaaattttcaacacacaatgacttacaaaataataaagtaataatgataaggggtgaaaagaacggggagggttgaactaatcacttttatgtgttaaatttttattattttttacgagtttttcatctttttgtgcctttattatatacaatattaattcccaattttctattgtatttgttccctccacccaacattcgttgttaaaattgccaaaaataaattttaattttttactcattggctttttgcaattcaaaatacacaattaattaagaaaataaaacaatttatactttaaaaaagcaaatgataaagagttttgtctaaatgagaggccaaaatgagagaatgaatggtgcggtcggttcgccctcattttccggtccaaaatcacacagaagaagcgggcgcaatattggccacgatcaaatggtccaaactgcgcacaaattgcagctccaacttcagcgggtgctttagcagattggacaggatttcctcggtgaagccccacagccaatacaactgaagaaaaggggggggggaaattgaaattttcgtgagcctggaaaaattctcccagaccaagacccagaaaaaccggatattagccctgaaccgggttctggtcaagttgccgaatgcccctgacccgtaattttaaaattccttccctcgcccctcccaaaaagtgctcactttgcgttggcttgcgacggttcggtcattccagcagagaaagccggtgacaaatgcgcaattgccacgccgtttgatgaccaactgaacgcaaaaccaatgaatttcagttcggcttcatttttccccggtttctcattttttacttcgaaatttcattttggtttgaaaactcaccaattttttaaattatccaaatggcaaaatcccctaattatgtaaaaattcgcacttcggtgggccccgcaatttcgggcaaaaattcgaagaacagcgcgcgacagaagcgccggatgatttcgtcctgagcaatggtcagccccggctgctgctcgaactccttcaagttctgcgtgttccacgccatccacgccttgtgattgcctaaaatgggacaaaagacaattcaatttgtgacatttgaatctcggaaataaaacgccttccttccccggccattaaaaaggccaaattcgtagttaattggcaaaaaatgtgaaagtcttgccaatgtgatggggccgtctcagcatgtcgtaggtgagccgcaatgtttcgtttttcttcagcaaatgccgctggaaataattttgggtcaaaacactgaacaatttatgaatgtgtaattggaattttatggctcttggtcttatttttgctaacaataagacaatgccgaggaattttataaattgtgttggtcaattttatagtaaatttagtaaaaaaaagcctgaaatttccgacatctcattctgttctctctatcggatgccaattcataagaaatgttcactcactctgttgtaaaatttgcctgccacatttttggagagcgccgaactcgtcgaaaacggcggaaacgacgacgaaaaagtgggcaaaaacggaggaacggcggaaaagcggtggcaacgaaagggcaaaggcggaagagcaccagacatttggaagggaagggaagcggaaaaacaactgaaaatggggacaaaatttacttaaaaaacggggggggggaaatgggcaaaaatgttatgaaaacaaacaaatgaaatgtaaatgatgtagctacaatatcagtgatcagaatatatcttccttttcgaactattcatttattatttttcaaaaatgaataaatttctgaatttctctgttttttgtgtcaaaatttaaacatttttaattttaaattttgtctatttatttgttcatccgtctttctcttcttcttcttcttcctcgcccttttccctcctgccgttttgtgcttcgcttttctgttcggcgagtgccaacgcgcgccttttgtgcgattcgttgcgcatcagccaattgaaaaggggcgacggaatgcactggaagagcagttcagcctgggaaaacagacgtttttttgaaaaaaaaagaaaaaaatcaacaatttgttggagcttcagtcattttgaaataaaattctttttccaaaagcacatgcgtttcctggtacttttggattttgtgcacataccccaaaatctaaaaaaatatgtcaaaaggataaacggagttttttgatgaaataaaaggaataatttgcaccagaatggcaaaaacctcagatttgttccccaaaaatattttgtttttaatggagctccttagaatttcaaggtttaaaagcccttcgaaattatgaggaggggactgatggagatgaagcccagtctgtgtatagtcctagccccgagtccccgcgactccaatccatccacctgaatttggtgtatcgggtggcccgtcgtgtccgacacaatgccaaccgttcgaattgcatgccgcgcgtaggccgccggggacggcaccaaaaaggagggccgtccctttgtccgcgaggccattttggtggacaccaacaaagggcagagggactggatgacaatgttggcactctttgggccggcaccacagcacagagagggggcgaattcggcacgcaaaatggcggacagatggacaatgaaatgctaaaaattgggggggggggtaaatgcgattgagagaaaaattgaaagaaaatgaaaaaatgaatgccaggaatagaaaatcccgaaatcgccaaaattcgggacttttaatgacgcacaaatttcggcattcgaaataaacccccaaaaattttgccttggccgccgaatagacgccgtagtaataccaatggcaacgggcggccgcggaggcgacgttcacaatgacaccacgtccacgggaggccatttgtcggaggacaaaagcggacaaaagagcgacgggcaaagtgttgacaatctgtggggcaaattgatggaaatggaattcaaagaagggggttaaaatgcatttgaaatttgtgaaaaatgtaaattaatgggatcaaaatttgtgtaaaaatatgaaaaaatgccaacatggatagaagaaattaaaagaaaacatacagaaacatcgacaatttcttggaaccctccgggcgaattgtccaaccgttcagggtaactgttgaccatgccgacattattcactgaacggaattttattgccaaagaaaaccttaaaagatttttgattatttttttccccattcaaaatgccaatgtttccactttaattgccattttctcacccaaaatgccaatgttcaagtcactgatggcaccaaaaatgtgtcgttcgtagtccgccgggttggcgttggtgaagtcgaattgtatcgtctgcagctgcacttcgccccgctgtccgttggtggccgaatactgcttcagctcggtggccaccgcctccaatttgtgggccgagcgcgagatcagcaccaggttgaagccgcgcagggccaactccgcggcataggctttgccaatgccatcggtggcgcccgttacaacggcccaattggcatcccctggcaatcagagggcattattaaaatgatttaagggagtattgtgatcaatgagagcaatttccaattttcatttggactttgatcagttcagttactaatgtatttgtttgtttgcttttttatcagtgatcagtcataattcctgatcactttctttgatttgatcggtttcatcccatcgccttgattttttgtgcgtaggtttgtgtcaaatttgatgtattttaaaatccaatcatttttcttgaattttgatcaagttgcttcctgatcactttttctttacctcccgcaagttcgtgcaggtcgcgcggttttgcgatcacataagggtagagaatgttgtacagagagcgaaacactttcacgagaagcaaaccgagcccaacgcatccaatggcattgacaacaaataaaaaaagcatcagaaaatgacaattttaataaaggaaatacaaaaagaaaaactgttctaactgtaagaaatacagaattcgtgtccctttaaatagatgagaatgtactgtatgattcggaaaattccgtgggacgcataaaaatttttaaatcaattacggtatgaatatgtgaaggagatcaaataacaattcaagagaaaattataacgcaaaataaaaatggcccgtttataccataaaattaaacaattttttgttttgtgacaaaaatgcacagcataaaataaacaaaaaatacagcaaaaaccacgaaccatgagtatgaaaggagtacaaatgttgcagtaaaatatgacagaattctaggaatgatagaacatttaaaaataacccataatataacagggcaaaaccccccacgtgggcataattttgtctcaaaataatgatacaatttaaaaaggtggtggatgatttgttgcataaaaccgcagtgttatcgcatgacgacaatggcattcattgatggagtgccatcagtcggtttttgatggctttgcgtttggcgtcgctctctctccgctggcgttgccaatgcccgactgctcaaacacagcacgtatttcggcgaaaacctgcaaaacggatgccaatttgacgaattcctagcaaatcacagttgcactgatcaggaggttattccgattcagtccgacatttccaaatgggttcggtcccatggcactcacaaattagcaggggtttgggatgggaaaaaggaaagggcgtgcgtaaaaatttgaattttcaacttttgttcggccaggaattagtcaagttgagcaattaacgaaaaaggaagactaaaaaggccaaatttaatgaggaaaacggaattattgaaggggtgtggcgagcaagaagcttttgtcgactcaaaatcagtggagtctgtctcaaaattcgatttccccccccccctccaaaacaccgacaataattatgaaagtccataagtttgtgatcagttgcagttccccctcgccccccttaattactggagaaaacttcgtaattcaactccaaaaaagaaacactgactgaccaagtccggtcccttggtgctgtccaccgtcttcaccaaattcagcgacgcgtaatggtcaatgatcggtaccgtttgttggttgtaagtgacgattcgtttccgtattgactcctaacagaggaaacaaattcttaccaaatgacatcaattcatttaaaataatttggcaattcaaaatttttaaaaaatgtgtagttcctgaaaattttggccaactctttaattaatttcacaaatttttctccgcctaattttgaaaatagcatcacccctcccctcccacttttcacctcgttgtcatcggttcggccttggccacggtttagacatcgttgcacacaaatctgttgaaatctcgtaaatcaaaatttttgagtgttttatgcctcaatcggcgcttggatgctcagaacgaagagcactttggcattggtgcccatttcgcgttgccaaccgtcgaagttgtccttgttgcgcgggaatccgtcgacgagaaaaccggcggcagtgtccgaccgggcgaccattgcctgacgagaaaatgtccacaaatttgtttggtgaaacatcttccctaattatgtgaccgtgccggcacataataatgcctgccctttttaacagttagcaaattaggttatttattctgtcaataaaatgtcctcaaaacgcacattttccaacagtttgcacgtgatttccaccggcacaatgctgccctcgcggatgtgccggtcgatcagctcgccaaaggtggagccttcccgttggcgttcctcgcgcaacaaatcgccggcactcaaatggacgaagccgaaattcttaaaataacgggagagagtgatcattttaaaaaaatggaaagaaattaaccaaaatcataaggggattgactatcaaaatgccatgttttctttgcccaccttttcaatgcgttggcattgcgtccctttgccactgccgggcggacccaacacaaaaatcactttgaacattgacattgtcctcctgctgttttgctgttgcgttggcactgtttggcgaagggtcgccgaaattttggcaaattgtctcacttaaaaattaaaaataaatttaggtaataaaaatcaaacaaacgacaataaaacatggttatttgctttgaaaatgaatttcttatctttccgttcatttattttacacagagaatttctgtgaaaaaaataacgaaaatttatttaattgttgcaattagagaattacttaatgaaaagaaattaattccttagtgatgtgttgctctttctacctaatgggttgaaataatgaaaaaagaaagacagaaatggaaaaaatggagcacagaaaatgactaacaattccccggggaaggaaaaatggagcaaaacaccacaacaatccaacaaggtttttgtttctcattgttattccaatagacgaaaatactgtgttgattcagtttaaaaggtgtgccccgtggcaaaaaatagaaaccgtcaaacggaaaaatgcatttcactaacacataaattctggattaaatattcaatttttgaaagtgagcaatcaaaggacagataaaacaaaattaattagtacggatattaacttacccaaaggcgctgttaatgccggggagaaaagcagtgccgacaaacgatgcacaggaaagagagtggcaagccctattgtgtttctaataaaattttaaaaaaaaaatttggattttattaaaataattggaattcgaggaaaccaaatggataaaactgaaattacgtaaatctggaaacatttatagctctgataaaattataaattataagttacaaattgtaagaaaatcaaaaattagaaaatgaaaacattgaaacataatgtaacaaacaaagttggctgattgttaaaatcagccaattaaaaattagttagaattaagggaattagcaaaattcgtccatcaatgcgtccgcgtgggacttcgcctgctgctggccactcccgtgcatcagttcttgcctggtcctctgctgtttctgacgctgttcgactttttcggcttgaagtcggagaatttcttccatgctcacctgaaaaaaggaacaaaattaagtgtggaagaaataattctgttcgttgttcctttaaaatttagcgacaggtctaaattagaaatctgaaaatattcctgaaatggaggctctctgattgtgaaaaattttcaccaatttccctgcttaaatcggtcccacctttttgaatgggttcggctttgtgtcgtccacctcgccggccagcacaacattttcgccacggataaggaaaatgccgcgcggaatgtccccataaaattcgtccacgtgaattcgttccagcgtttcgtgcagcaccaaattggcgaactgaagggaagacgaattgaaaattaatttacggattcataatttggtgacctggtcaagggtgcgcagataaccgacgagtgtcttcccatctcgcagcacaaccaccagctttttgtccagttggtccagcagtgaaactgcgcctggcagaaacgggtccggcaattccattaaaattaggtaattagttaattgtttatgttatcggctgaatgaaatttcatggctgatcagttgcacacaaagatgcaaaaattaaaattaaaattaggaaatgccgaggaaagtaatctaaaattgaggaatgattccggaaaactgttggagtcgctgacccacaaaatgtccagcccacgaaatgtccaagtctcgaatttgagttttttattattcagatgggcctaaggttaggcatggggtaatataaagggtatattcgtattcagcgaccccgaaaaccctaaaaatcctaaattagactcattttgtttttataaattttgaaaaattttggacatttcgtggcttggacactttgtgggggcgccgttggagtccagaagaaaaaaattatattggcattatgtttcaattaatttaaattataaatttgaaaaagcggctttttgatttttaaaaaaccaagggattgatttccccgttcccagttttctgggcttccatctgcaaaagtgccgaataatcaacatctaacttaattgctttgattaaatgtaaattaaactctaattagaacaaaatacagtaaaatgaataatgaaaatgtcaataatgcgatggttaatgacacccgcgtaaatgtaaatgacaactgtcagaatccaaatgatacccgtgtccatgtcaatgacactcggtcggtttttgcctcaattaacccgttgaagcgtcgcgttagcttccgcgacattccgaacattcggcaagttggatgaaaacatttaatcagtcgactatctaatttagtgagtttgagcagccttcttcttcctctactgcaccttctcctttgccttgtaaattcataacttaatcaatttgataagatttaatcccttttcttttagccgggtttttggacacaactcataccatttttaaatcgttgatggtggcgcaaacaccgaccaaactgctgaaggtattttcttttgaagaagaatacattttaatttcttaagacaaattcacgtttttaaggttgatgaggtggccaagtatgggtcgctggacgaacaactggacgtaactcatgtcatacaacacactccgtttcgtaatcgtgagtttttaaattattggaccttgtgtccctgaatttcaataaatgccattcaagtgaaggtgttgaatattttacaattagtcactttttcaggccaccaaagcccgttgctgcttgatgacctgacgaaacaacatgcctcatcacttttgtttggctctcaggtaaaatttagaaaatgaaaaaaattttctttttaaaaaccttttaggataattacggacttgacgaattgtcggaagatgctcgttcgatgaatataagcattcagcaacagcaggtcctatcataatgttactagtaaacatcctaaaaggattattggctctttctttaaggtcgctatttcactcgtcaaatccgctgctcaaacgtcggcgtcatccgccgacgcgatgacaatgattacggaaacgccgaaaagttcgcactattcgacggtaaatttaggcattgattttcacatttaaattttagcaaattttgaatttgcaggccacccgaaccgttcctattgactttgaggatgagcgcgtgtccgaatctccgcaacttccgcctcctccgactgtgccaattccaatgggccatctgaacgattcggagtttgaacagtggcacgagacggaaatggacgaggcaatggaagggtattgcgacgctgtcaagcagtacacggacaaatacgggtgaggaattggtggtgggatatagaaaattgtaaaaatttaattgcatcgttttttcagccgtttggcagcggagaaaaagcgtttgttgagccaaatcgacgcggtgaaagagcgcattttcaaattccgttccgatttttccgaggcgtaccaacagaacgaggagaagcggcgtgcgttgtgtgccgatttgacgaatatttaacgggggagaaacaacaaaaaataattcttttaatgtgtgatttgcatggaatgacttttttgcctcatgtgctttttgtcttaatgcaataaatgattttgattaaaggaatga

SEQ ID NO: 2857 - DNA, 1694 bp, Heterodera glycines
ttttcaggcttccaaagcccgttgctgcttgatgaccttaccaaaaaacatggcccatcacttttatttgggtctcaggttacaaaaactgaaatattgtttttaaaaaatattttaggaaaattatggacttgacgaattgtcggcagatgctcgttcgatgaaaataagcgccggtgcgatgacaattcttacggaaacgccgaaaagttcgcaccattcgacggtaaatttatgcattgattttcatatttaaattttagcaaattttgaatttgcaggccacccgaaccgttcctattgactttgaggatgagcgcgtgtccgaatctccgcaacttccgcctcctccgactgtgcaaattccaatgggccatctgaacgattcggagtttgaacagtggcacgagacggaaatggacgaggcaatggaagggtattgcgacgctgtcaagcagtacacggacaaagacgggtgaggaattggtgggatatagaaaattgtaaaaatttaattgaatcgttttttcagccgtttggcagcggagaaaaagcgtttgttgagccgaatcgacgcggtgaaagagcgcattttcaaattccgttccgatttttccgaggcgtaccaccagaacgaggagaagcgccgtgcgttgtgtgccgatttgacgaatatttaacgggggagaaacaacaaaaaataattcttttaatgtgtgatttgcatggaatgacttttttgcctcatgtgctttttgtcttaatacaataaatgattttgattaaaggaatgataacaatgtccactcatttttccgcagaaaatggaacacaaaagtttgtagcttcctcgatgttgtcagtctcttctatgtcgcattcgtgaccggcaaccccggggggaggacatcttttttgatggggtaatactggaagaaaaataatttttttggttggagcccagattctcaagttattacttttaatggaaagcttttatttgatccttttcaatttgtatgtttcctccaatgtcaccaacataaaacccgggatttaaaacaggcaatctttcggaattgtggtcccgaaaatttttttttaatttgtatggcactttttctaggcttaaaaatacgctaatcacgaatatgaactcggatttgcccaattccgaaccccggacccgaattcgaacaaaaacttgaatttttttttcaaaaatatacgttaaaatcgatcaaattttggcgtaaaccgcgcatttttatccaattaacaatttgaagcattattttaatcaaaaaataatagttgttgcatagttttttatcccaaaaaaatgcattcttgaaattttttttttaatttttgttcgaactcgggtcaggagttcggaattgggccaatccaagttcagattcgtaatcagcacccttgaaaacccttaaaatatgaattttaaataaaaaaaattttttcgggaccacaattccgaaagattgccttccgtgccatccctaactaataggaaacctatttttttttgtcgtgtatcactcacaatgctcgcctggctgtggcgatggcggtcgagcctccttcggctttttcgaccctggggtggacagggggaggagggaattacgatgaacataaatgcgaaaattacactcatttctcccttctctccc

SEQ ID NO: 2858 - DNA, 3019 bp, Heterodera glycines
  unsure (1)..(3019): unsure at all n locations
cctcagtgtattcatcaattttgtcattttctaaatatttgtccaaactttgaattgtttcgcatcctttttccaccgcccaattggccaactcgctgaaaagtgatcgattttggttagtacagaacagatgatttatttaatcttggtgttcttttagaggatgagtgttttttttgtgaaaaagtggatttacaataaatttcaatgcttctaacattgaaattaactttggcatacttttttttcttgttgggaaatttaccctggactagttttaaatttatagagtaccaattgttaaaatatttactgccaaaatttttacccataaaaaatattttttaataatatgatcaagtttcttataattagcccatttaatttttgagatgataattattattgtcaagctctccttgtggtcaaacactaatttaagtaaattatcattttaaaatggttatatttttatacttgtaaaaaatatttttatatttctgacttaattttataagaaacataaattttaaaaaagtagaaatcagttggcatgcgaatgacttgaacctctaatctataaacattaataaaggcactaccgatagaccagtgatcacagtgtgaatttattaataattggtttatttatttatctcctaaatagtggaacttttggcataccatatctttggcacagaggctcattccgttgttataattttttttttttttttttgttatacaaccaagggtgatctactcagcgacaaaatttcatttaaaaattccaccttcatttaacaattaatattaagaaaaacaaaaagtgaatttttatatctaattccaaaaattgtctgaaatattgctgttcccaactttagacccaaaatttcaatcacctcaactgcttaacgcaaaaaaaacaaagataaaaaaatctagatgttttttagataattcaaaccagaaataggactcgtaaatgtcggctaactaaagatgtgactatattgatgaatttgagagtcttaaacaaaaatatgaactttttatcatgtaatttttccccattattaatttaatgtcgtttaactgaaaacatatctgagattgaaaaaggggataaaaggcctaacattttgcccatttaaaaaaaattcatgtctacctgtttttgtcgttgttttctttttggttgcctgctacacctaaatttacgcaagtttttcattttcccagttaaccctaacctcggatttcatctagcagcacaatgtcatcgcttttaaaattgacggtattcagctttgacaatgccaatgttggaaaaagcaataatgtaagcgtaagcaaatggatcattttaatgtaaaattaaaaaaaaaattttggataaagctatataaaagataaaattttttgtttggatttagctatgtaaaagaaaaattaaatgtcttagtgtatgcatacctataaaaatgaagtgttggcatccaacactataatgatgtcataaaatttttattttcatccacgaaaaatttacaatactatttcgttgtttctctttttctttctaatttctctcatcacttcggcatactatcttgtcatttttttttctaaaaagcactcactcgctagagaaaaaaattttgcaccgaatattctataaggaattaataactttctgtcctgttttttagtaaactaatttaaaattttcatattccttttttctccttttggtgcactattttcaaaactttaaccaatgaaaaaaacatgaattttgttggataggatcaaagatcacttacacctcatcactgttattgacttttcccctccccctttctctgtcttacattatttccattgtctccctctctgccatctcctccacatttctctgaccccgcgtctttataagggtgcccattccctcactcatggctctccgctctattcattcgcattggacacttattattttgttctcctccgccgctgcactcctccgacctcaccatttttgtgcatttatttttatttgattattaataaattgttggtacacaacaattttggcgcagtcagcagcagcagataaattctgcacatcattaagccaaatcaaggctaattctgcaaaatctagccaatttaaggcatatttgcacaatcttcaagccaaatcaaggcataattctgcaagcctaattttggcacttcaaaagcctgggtggctttcaacggacagcgacaaaaactgatcacctgggtggtgtaagttccgctgggtgcggtttctcatcgacaaaaactgatcacctgggtggtgtaagttccgctgggtgcggtttttcatcgacaaaaactgatcacctggggggtgtaaagttccgctgggtgcggtttatcaacaaacaaaatggacgcgcaacaacttcagcagattttggatgcggctcttaaaaaatcagccgaagtttttgccgccgcactcaacactcaaaatcaaaacccaaacgcagggtcatccacaacggcatcacttgcggcatcaatcaatgcccgcctcgaaaaattcaattataatccggaggttggacagacatacgatgcttggttgaatcgatacggaaaaatcgttcaacaagacggcgcttcgctcccagagcagtccaaagtccaacttttggtcggaaaattagacgaggaggaatacaaacggtacgttgacagcattgcccctaaagccaccgaacaattcaactggctcgaaaccgtggcaaatctgaaaaagatttttggtgagacgaggtcgctcttcctcccgcgtttcgattgttttcnaattcgncaatgccaaaaccaagacctttcgagtcttttggcacaaatcattcatcgtgtgaaatgccgaattgatttgaagaaagagagctaagtgcatgattctcatcatctctttacgcgacgaattttcggatttgaaacagcgatg

SEQ ID NO: 2859 - DNA, 4669 bp, Heterodera glycines
tagcgcagcgattttagcagcgccaagtaggtgttcgagctgatgtttgacggctggaaaacagtaataaaatataaaaatattgggtttttaagaaaagttttctccaattttaacttgatatgacctgcatataagaaaattttggagaaacttcatgttggataggatcaaagatcacttacacctcatcactgttattgacttttcccctccccctttctctgtcttacattatttccattgtctcctccctctctgcctatctcctccacatttctctgaccccgcgtctttataagggtgcccattccctcactcatggctctccgctccattcattcgcattggacatttatttattattttgttctcctccgccgctgcactcctccgacctcaccattttgtgcatttatttttatttgattattaataaattgtttgtacacaacaattttggcgcagtcagcagcagcagataaattctgcacatcattaagccaaatcaaggctaattctgcaaaatctagctaatttaaggcatatttgcacaatcttcaagccaaatcaaggcataattctgcaagcctaattttggcacttcaaaagcctgggtggctttcaacggacagcgacaaaaactgatcacctgggtggtgtaagttccgctgggtgcggtttctcatcgacaaaaactgatcacctggggggtgtaaagttccgctgggtgcggtttatcaacaaacaaaatggacgcgcaacaacttcagcagattttggatgcggctcttaaaaaatcagccgaagtttttgccgccgcactcaacactcaaaatcaaaacccaaacgcagggtcatccacaacggcatcacttgcggcatcaatcaatgcccgcctcgaaaaattcaattataatccggaggttggacagacatacgatgcttggttgaatcgatacggaaaaatcgttcaacaagacggcgcttcgctcccagagcagtccaaagtccaacttttggtcggaaaattagacgaggaggaatacaaacggtacgttgacagcattgcccctaaagccaccgaacaattcaactggctcgaaaccgtggcaaatctgaaaaagatttttggtgagacgaggtcgctcttcctccgccgtttcgactgttttcaaattcgccaaagccaaaaccaagacctttcgagtcttttggcacaaatcaattcatcgtgtgaaaacgccgaattggatttgaagaaagaagagctaaagtgcatgattctcatcatctctttacgcgacgaattttcggatttgaaacagcgatgtcttcagcgaatggaagaagcccgaaccaatgggaaaagcatcaccctacaggaattgggcgaagaatgcaaaaagtaccaaattttgaaggaaagcacattggcactcagcacaaaacagtacaatgccaatgccattcgtgccaagccacaacaaataaaggacaaggcagacgcaacaaagcaatatgccaaaccaaaagcggttccaaaaccgtatgagagcaagcacaaattgtcaaaccgtccatgccaatcatgcggaagcacaaatcattggcgctccgattgtgtgcacagagatgccaaatgcccaaaatgtggtaaaatcggacatctcggcaaagtttgccgaagcaattcttcaattcgccacatccaaacggtgaatacaactgaaaggcatgcacaaatcaacacagtcatcatcgacttaaattgcatggaaatcaacgcagaccatccaaaatggtggaaaataccaatcaaagtgaatggctcagattatccaatgcatgttgattccggcgcacaaatctcattattcacaatccaaacatggattcaaatgggcaaaccgcctttgaagtcagcacaaattcgcgtcaaaaattgcaatgaccaaatatttgcaattgaaggacaattttggtgcgaagttgaatacatggggcgtccacccaagaaattgttggcatatgtgagccccgaaattacccataatttattgggcatgccatggattgaagctttggaagtgattccgaaagagattatgcacccaaatcttcatccaaaaatcaatacaatttcaacgaaaataaacgaaatcaaagacacggagacattaatttcggcgctcaaaacaacacattccgatgtcttcagcccagaattaggtcactgcaccaaattcaaggccaatctcattctgtaaaacggtgtcaaacctatctactgcaaggcaagaccagtgccacacggggctttggacgacgtaaatgccgaaattgaccgtcttttgaaaatggaggcaataaagccgattgaatttagccattgggccgcgccaattctggcagttaaaaagaggaatgccaaaacacgcgcgtgtatcgatttttccacgggattaaacgatgcacttgagcttcaccgccatccgctgccacgtccagaggacatttacaatgcaatcgcaggctcaaaacatttttctcgtctcgatttgcgcgacgcttatctgcaattggaattgtctgaggagtctaaaaagctgtgtacaatcaacacacaccgcggacttttccaatgccagcgtttaccattcggcataaaatcagcgcccgcaatttttcaaagtttgatggacaaaataattacacccatcaatggtgcatttgtctatctcgatgatgtgattatcgccaacacaactctcgaccaacacgtcaaaacaattaccaaagtttttgacaaaatcaaacaatttggtttccgaattcaacaggaaaagtgcagttttctacaaaaagaaaccatttcccttggccacataatttctgaaaatggctttcgcccggacccatcaagagccgaggctattcgaaaaatgccagcgccacacgacaagtcaacactacggtctttccttggagcactcacatactacggcaaattcatcaaacaaatgcgcgaaataagaagcccattagatgaattgcttaaaaaggatgtaccgtggaattgggaaactgatcaacaaaaatccttcgaaaaagctaaagaaattatgctttcggatttattgctgacgcatttcgaccccaaattgccgtcattgtggccgctgatgcttcaaaaggaggaattggtgcaacaatcagccatcaatttcccgacaaaagtgaacgtgtcattgaacacgcatcatgcactttcacggctgcgcaacaaaattacagccaaatcgaaaaagaggctttaggattggtttttgcggtacaaaaatttcaccgcatgctctacggcagaaaattcattctgttgaccgatcacaagcccctactggccatcttcggatcaacaaaaggcattccaatatattcagccagccgacttcagcgctgggcgttaattttgtcaaattacgaatttgatattaaatacgtcaacacaaaagcattcggaaatgccgacgtactttcgaggctcatcgctaattacccaaggccatcagaagacattctcatcgcaaatatctgcaacgatactgattgctgtgttaattttgtgtttgaggcgaaaatagagcaactcccgatcaccgcaaaaataatagcggatgaaacagcaaaagacgaaattttacaacaaatcagtgccttcaccaaacaaggatggccgcaaaaatttgacaacattaaattgtctccttttcttccaaaaaaggcacaaatatccgaaatcgaaggatgtctcgcctacggtgaacgaattataatcccttcgacgctccggaacaacatcctcaaatcattgcatttcgcgcatcccggcattgtgcgaatgaaagccattgccaggaaccatgtttactggcccggaattgactccgaaattgaacgactggtgaagcaatgcgaggaatgtcactcagcagccaaaaatcctacaaaagcgaatctttagccatggaaagcagcaaacggagtttttgagcgaattcacattgatttcgccggcccgtgtgctgacggccaaacataccttgttttggtcgacgcttactcaaaatggccagaagtatggcaaatggaaaggacatccagccaactcaccatttcaatgctgaaatcattcgtgcatcggcttggaattcccaaagaaattgtctccgacaatggaagccaatttcgatccgccgaatttgcacaattctgcaaagaattcgacataaaacacaccttcacgccgccgttccacccaatgtcgaatggggccgctgaacggtttgtcgacatttttaaaaggtcaatgaaaaagtgccgtcaagaaggcaaagattggcttcaaaaagtgcttttggcgtatcgcacgacaccaaacacggcactcaacggtcattcgccagacgatttttcatttttcaatttaaatatttattaatttgactcaggacaaatgtgacaaattaggacagatctcatccctaaagatgagtttgcatcgtgtgttatttgccacgagccagtgcccgtgtgcaacaacgacaaaattgaatttaaggagccatttcctccctccaatcatgaaggcaatcaccgatggtttgtg

SEQ ID NO: 2860 - DNA, 10376 bp, Heterodera glycines
  unsure (1)..(10376): unsure at all n locations
ccttgttaacatgtaaataaaattaggtgcgtttcagagcattttnctgaaaaaatattcatgaattaattttgcaaaaaattggaaaagtacgcaaaattgcaatgtttaaaatttttaaagaaacattatgggacagttaaataattatatgaataagcattcttctcagctgttaccctgcaaaatctggtgcatttctgatcactactcgtaaaattatgagtgattgaattttcactaaaaagttaagcctaaactttttggcctgtttaaaaaggaattaaaaatttttaaaaattttaatcatcttcctttttgatagaaaaagcatcagagagccttattaacatgtaaataaaatttatcagattcagatcgccatgaaggagtaatctgatcatgttggtccaaaagatttatttgttcagcatcaaaagttagcttacaaattagaggaaatttttctgatttttttctctatataaatagatttttggttaaatttaagaaaaatttgaaaaattttcttaataaacttagttaaaaaataaaatttttccttggagatttctacaaaagcctaattttcatcaaaaaatttgctcaaaatcgtaaacttagtcattttttggaaaaggtacgcagcaaaaaaagcggattgtgttttggtttctttaaaatatcttttaggaatttttccagcgattaaattccgtttttctaaataaatttaaattaaaaaaatcactagaaaaaaattttttaatcaaggatcacggctcacggagtttttggggtgccgtgatctcggattttttttaaagccccgtgatcacggctcacggatttccgtgattggaaattcaatcacggccagccctggttgggatataccataaaataggacaactaaaggaaaataaaattttatcttcaattcacagagtttaaaaaagagatgggcacaaataaaacaggaacagtgaaaaacaaaaaaatttaatacaactcatcgtcgaactagaaggtcaccggcttgcgctccgcttttttgacgaatttggggtgcacaatgagttgggccattgtttcgtcgtctttggctgtgcatttgtactccccgtggtcttcaatgagtacattgatgatcagcaggcgacgacggcatccagcccgttcctgtaaaacaagaagcatcaataaaatacacaatagaaaaacaaaatgaaatttggcataaaaacaaattttagataatgtaaaaaaatataaaattaaaaaaaatattgttaaaaaatggttttgtttctgacttttctaatatattttttaaatttctgataggcatttgaattgaagaatttgagctagttttggtttgaattttggaaatatccatacttagggatttttgggcttaaaggaatcccaaaataggtaatttaacctcctactcaattttttaaattgatctttcataacacaaaatatgaatgtattctttgattagcaagagatttgccccctccttcccaccttaaagtgccgcccgtccatcccgatctcggcaccgtcatggaaccatttcacatcgatctccttgtcgttcacttcgcattcaaaagtggcattttccttttcgttggcatgctgcgagttcaacggcacaacaaatgtgtcacggggctcctccaccacatacacttggcgtttgctggaaatttttgtgccataatttaaatgaaaattaatttttaaaaataataataattttggctcctggcaaatgcgtcagtggaaaaggtgtcaataatacagtatttttaaaataaagttactgtagcattaagtattgtattattacaaaaggacaaaattgtctaataattttgttctgaattttatcaattaagtttttaaaagtcaaaatacctaattgaaactttcccaaatccctaaaaaacaagttgtgatttcggtaatattactaccgtatctcaatttaaagaaatcctgattcactgacgcattttccactgacccattttccgttcacgatttttatttaatcaaaaaaattgaatttcaataatttcttttgccatgtctttaaatttttgtcaccatcaaaaaaaaagaaaaggcactgaaattttttttttgaaatttcagtcaaattaaaaagaaaataagcgaagtgcagaatttggcatcgattttttggcaccattccaaaattcggtgcaaaattttttggtggtagctgtttttggctcaccgtcgttcagccttgcttttgggctcggcatcactccgttggcgctgtttttcctgttccgaattgctaatgcccgtgccacgttttttctgcttggcccggaagtccaaatttgactgtaaatttattttttgtaaatattattatttaaatttggctggcaattttttttcacttcggccgctggcgtgacaagcagcttggcgccaactttgtgcttgccatgcgcgttcttcaccatcaatgtgtactcgcccccatcttgtggccgacatttggaaatgatcagagaaacctgacaatatttttaacattattttaatttgataaaatatttttaacattattttaggatttgataaaattttttttattaaatttactgctaagttttgaatttagtttagaaataaatgagctacattaattaattaattgagtgccgtaaaaatcccttccaagattagaactacagtaaaaagttttcttgtcctccatttgagggctacggtatgaaaaaatgtaattttagtgaaattaaaacaaaaatttttttagtgatttctcagttttatgataaatgactttttcgcaaaaaaatttttttccaaaaaacagcagtttttttaaatttctgtgtttaaaaatttcatttaaaaattgccacttacatgtcccgtgtcaccgtccgtttggcaccgcactcggtcgtcggtcaatggcatttttcggccgccctttttccacacaattgtcggtgccgggttgccctccacgacgcatttgatgatggccaattcgccctcaaccaccgtcacattttcagggatttcgacaatccgtgccggtgtgccggatgtttccaggtcctttaaaaaatagaaataaaaaaggggtgcccaaaaattgaaaaaaacaattaaaaagtgaaagatttttgtttttgtgctgcttttctcaaggaaaaatattaataaataaaaaatccaaaaaataggcgccaaaaatggcgaaataggcacaaaaaaagcgcctaggtgtattaagcacaaaaatcccgaaaagcatacacaataattttgaaatttttttttaccaaatttgccatcctttttgtcaccaccgccatgttctgtcgctcctcctcgttgttgtccacctcgtcccttgcctcttcgcccgcagcgcaagccgctgctgccgcctttgccgaccggtccgccgcggtgctgccaacgcgtcgccttccgctaccggacgcggtccgctctattttttctcggaattaaaattgagtacatttataagttttgtacatccctactttgagtatttaaaattttatgaaaatataataaatttgataaaaacttaaaataataatttatgttgtttagtgaagaatttattattttaaaaaaattaaataaaagattttaaaatttaatatgtggaaatattgtaaaagccttgcaatttttttaaattttaattttgctaatggattttctccactgattgattgaccagtgatggactgattgtccggggcttctttgttaggcactaaattgattgaaaaccaaaagtttcagtggaaaagctcttaaactgctcatttacaaaatcaattaaatttctttcatagaatgaaattgaaaaaaacatttttgatcatatattttaattagttaaaaaagcatttaaaacacttttccgcattttttcgagttttcaatctttttcagtgtcaaaaaaatccgacaaaattacattccaagctgtgagtcaaaacaaaattcagctttgaattgtgaattcctaattttaacggtaaaaaattattttagtgcttccggatggtttcccacgaattagaaaatccttgaaaatgtgcaaaaataattaaaaataatgatctgatgaggaaagtatttccaatcactattcttaggcatttaccgtacaatatgaaacattttttaccaagtgagcgaaggccaatttcaacagtgcctggcggcacctcttcagctggatcctcggcatccgattcgtcaaactgtaattgggtttaaaaaatgaaataaatataatcttacaaaataatgaaaattttaagtttaatttaatttttttctatttttatcaattatttaaacaaatcgtttaatcattaaacaattcttttaattttcataattgtaaaaaatatatgttattttcggaaacatgtgatttcgtcagaagtgatttcgtcagtaagggatttcgtcagtgataataatcattttttacgaaaaaacatttaaaattaaaattcgttcgatatttaaatgcaaaatgaaattatttgctcggttgtcaatcgatatatggaccggtcatttgcatatcataaaatattttgtatttgtgcctcgtttttgctacttttataatcctatatgttaatttcttggtcgccagccattcattctgcataatcttggaatttcgcttttaattttcttaccaggggtggagcgcgaccgcggcaatttgaatccgcaatgcgcgaccgcgtgagctttctgtcctcgctccatccctgtctaataattttgtatttctacattttgagtatgttgatgctcttaatcattttatgtctccaagtcgaatcataggcgtctgccgatcacgcatggaaacgaccttttccttttcgagtgtgttacgattaggtgattttcgcgtagcccagctgacgtaaagtgggacgtgaaaagcgcaaatcaaaatggattcggcagagcaacaatttgagaaatcttatagaagactgcaaatcgtgactcgtttaaatatttagagcttggactcgaatttttgaatttttttagctagttgtacgctttaattaattttcactgacgaaatcactcactgacgaaatcacttactgacgaaatcactcactgacgaaatcaccgggaaccttattttcgggcctaaactgtgtaagagccattttccataaataattagtcacattctaatttgtcgatccaaatttaaataaaaaagtggacacgaaaatttgattatgtaaatttataatattattttcttatgttaatcattttaaaaaactcaaaacattaaactccaaaaatgaaatttgcagatcaaatcttttaaacagtattttctttaacttttcaaattttacatatttttccaaaagttcacaaattaggattttttggtgaaaatctgttgtaaaaatgttaaattgtttaaaaaaaacgcaaaaaaagtaaatcttgatcagaatttttgatgatcaaaattattttatgccgaatgaaaattttcgttataattgcttagaatttaaattttgttttgagatcattcgatagccttaagtgttttatttgcaaaatttcaaaaaatgagaaattttttgaaatttaggtgagctaatagttttgttgaaaatttttatttgatggctttttatataacaccatcaccctttttaatagtattaatagaacgattcagcaccaaatccggaatgtccctgccatcaagccacaaaaaagctaaaactttcaccccccctctgccatcaatattccctttttttgcacttcatgaaccgctcattccaatataaaaaaataaaaattgaggggttctcgttgtttagccttaccaaaagcgaatagattttcaagcttggaaaaaattttattaagaaaaagcttgaaaattttgactttttctcaattttcttgtaaaacttttttggtatttgtctaatcgcgaagcaatagcttagaaaaagcttctaaaagctttcgaatgataccaacaatgttggatttggataacaaataaaaaaagctatagcggaaaaacatgccggggccgaaccgtgggggccgaactgacgtagaccgcaaatatgcatgaaatatgcattaaaaatgagttttttcaattttacaaaaaaatacctacctacctaagtatttttttgttgatttttgcaaaaatgagtgttgaaaaataaagccccccccctaaattagaacccccccccccctaaaataaagcccccctttcgagggggattgaacaataaagcccccggggctatattttaggaaatacggtaatttattaaaaataattttttttaattattaaatatacagaaatcttgaaaatctcctagttccacgtttgcggagttcaaccaagtcatttttataaattttttgacataggtagaaagaatttattttaaaatatttccgtcttttttatttaacatctataaatattttaataaaaatttaaattcacataaataaaattcaactcacccaacaatgtgcgacagcgatcagtgaaaagtcggacagcgcaaacagtgatttgacggacaaagcgcaaaaatggcgtgtgaaattcggcactcaaatcgtttgctgctttaaaattaaaaaaacatttattaagttaaaagcaatgaaaatttttcctttattcctctcttgagcaattaaataaaatgaatttttaaaattaaatttacttttttcattttaaaaaaatttaacttatttaaaaagaagggccaatttcataggcgcaaacgtctggggtgcaaaatgcaagttaaacaaataatcaaattttttgcgggcatttctcccccccccccccctaattgatttgtggtggtcatcttaggtcatctttttgaccaaatgaatgatttttgcaaaatcaattaaaaaaatatgcagctgggaaaattaaaaagattggagtgaggggggaggggaaaaggaggagggcggatggggaacgggaagaggaaagagagcgggagggagcggagggaggcagtgagaggggaggggaaaggaggacggggagggaggaggaaggatgagggagggagcggagggaggggagcgagcagtattttttaaatcaaaaacacattaaaaagggggtaggtcaaacggaatttttgctaggactctgaacattaaagtgactgcattttttgcctttataaatgattttttgtgccctattttccaaaaaaaattttggggaacatgggggtcctgcgctgccggtatgccagggttcggatcgaaaatttttcaaaataagaatatcaaggctaaaaaataagatgctaaaaccaaaaataagaacatttcgcaaaattgcttaaaatcacttatttttaatttattcgatcaaaaatatgtcagttattatttttttgtctcccattatcgttttaacaactttggagaaaaaattagcgaatcataaatttagtgcattcgggatcaaaaaatcagattattaacaattttttttgcggtattttttcaaaaaactttcttttttttttaggcggggagtccggcggtgccggtagacgccgacacgaaaattttttgggatttttcatgaattttgttaaaatttccaaaaagatggaagtctggattccgatttccgaaatttttgcaaaaattcgggaatttatttttttaaattttttgccaattcaaaatggtttattattgtgaaataattattttgtatgtgctttctacttcgtttttgtttccaaatgaaactaaaaagcataaaatttgccatccctgctctaatgttagaagatatttataagcaagtgctgagctaagcatttaatcaattcatcaaaaaagttcgcggctgaaaatctaataagtcagaatttttgcatattttaatttacagttttttacatgcctgcaatgctttgtcatttttgagagcttaataatgctaattaagagcttccgggtgattccatggttctttcaaatttttatttgtagcacttcggcgctcaattcgctgtttttcttaaaaaaaaattagatttcatatttaaaatgtatttatttttactttttttattattttcgcccgttcctaagccaattttttccatgaattgaacaatggactgaaccagttccattcgcccgatttgttcaatgaacgtcaatgatggcgtagaatctgcgatcagagtgatcagataagagagagggggcaaaaaatgcatttgaaatgacgtcagactggctttaagcaactaatttttgtgttattactcaacgctattccttctatttatttatgacctaaccaaactaattatatattttttggtggcaaaaaaaatcaggaaaaaagtggaaatattttgaaaaatatcggaattatgaagcatttattttcaaataaatattcaagtttttaagtaatattttttgaattttccaaatctgataaaattcagtagaaaagtgaaaaatattaccgagcataaatttccaaaaaataataaaaagcgcacaaaaaatgaaagttgttttaccaattttttcaaaaaatgccaaatctgacgaaaaatggcactattaaatgagcatacagtagttagtatttttcaatgcttagctttccttacattcattgttggtgggttgggttgattgcaatttttgttgataattgaattctgtccgctgttgcttggcgctgctgtagctttcggccactattggcgctgccatttggccatgaataattgccataaaaatgattaaatgataataataaaaaatggacatttcgccagcctaaaaagcattcgtttttaaataaatatcgatacagtcatggtcatatgccccataacagctcatggggatgaggtacctatccatagaaaaatagatttcgcaagtattgaaagattatctgggatttttgggtcgctgcatggtgtcacattgtttctgggctatccattggtaccacacattcctcgtttgctttattcctttttgtaaaaatttgtgttttcttccatatagtcaaatttcggggtggtcatatgtttaggaacactacccatattttttttcatcagcattaaaaaaatctaaaaaaattcaggtaagcataactttggatgctgatcaaaaaaggtagcaacaccaagttgatcagatcactccttcatggtgctctgatcagcccattttggctgggaacgaggggtaaatttcaaaaaaaatttctagggggttgggaaaatttttctggaaattttgagtaggcccattttatagagaacaaaatttgctaccgaattgcctttggaatagtgggtgtacgatttaggcccgctgagatacgtcgacttttatttcggtgcctataaaaagaactgtatttcttaagaaaatagtgcattttaaactacgtcaaaattgaagaattgataagacaaaatggaatatggaagttggataagacaaattaagaatgatgaaatgcattggaaaatacaaatcattaaattgtaaacaaagattcacctattattacattgtattatcagaaaatacgtactatgaaaaaacataaactcacatagaaatttacagtaaaaattaattttataaaattgtcaagaataagaataaaaataatgagcaccaatgaaacaactcattttattgatttataaaaaaaaaaaaaattaaaaatcatataaagaggtggatgaaagaaaaggtgctgggacgttagtcaaaaaccatcaaaatgggcgttagtcaaaaaactatcaaatgaataattgttgacagaaaactattcataatttcgtctaaaatagatcaaattttataatatagatatttttcgatagccctaattgtattctattatcctgcaaaatttttaaaaaattctttaagtttaaaaaaagttatgatttgagaagctcaaaaaaccaagtttttttgaacattttaagtcatactttcttgatacttaacgaaactttttggaattttgtaggctaatagaaaacacttagagctatttaatgatatcaagaattaaaaatttagatgcttttgaacaaagtcatatcaaaaaatattttcatttgatggatgtttgactaacgcccattaagaaggtttttgactaa

SEQ ID NO: 2861 - DNA, 7874 bp, Heterodera glycines
  unsure (1)..(7874): unsure at all n locations
ctcactntcattgctctttaaaatctaatattttttaaattgtagctggcgttaggttgggttttccttttcacaattatgaatgaattgttttttttaaataatgagttcccttttggcctgcgaattaattttaaaaaatgacataaaaacgactgtgaaacccataaaaaaaatttagattttacgtcattacacagcttttttcgcatttggtgaacttaacttcatccgattactaaaaaggtaaaatcatcaaaatgaaaacgacgaccaaaagtaatctctggattgcattactatattttgttgtccgcacctttcacccgctcacattcaactgttttttttatttagcccgtctccgaaggcgacttgtgacttttgttttttcgccgaatttctctccgcgaccattttctcgatgtcagagtttacttcgtccgacggatcagggaaaaggtttgtagttttttttagttttagcaataagaaaaattcttttgctgtaaaatatagtaaatgaaaatcaaatttcgtttttagcgttagcagtaaggtcagtgagtcggaaagctacgacgcgaccacgcttggtaaattgatgaacctcgacgccaaagtggtcgaatggctcgagaaagagccatatacggacgacgatccgctcttggttcttgacttccttggtccgtttaacaatcttcatggcgactacaaccaaaacaaggcctttttggtgcagaagttggtatgtcttaacagcaaattaacatgaaagctggatcaaattcaaaataaaaatttcaatcagaaagtagaaaatttcatggaaaatttgagggttttatcacaaacaaaaacgtgtcgtgctacgtaattgaaagtaacataatagaacactacgtagtacatattatggttggtataaatcgatcatttcgttattaggttgccgctggaggggctagaatcgccgcgaacgtggacaacgttatcaaatttgcgacttgggacatgtttttcgaagcgcgtcgcattttgcaggctgacatggaagtgcgtcactttttctacaatcaaatccggcaaattgctcttcaaaacaacattaaccaatttccgatcgtctctacaaccgtggttacgttttggtcagatgactcgcagaaattgaagacgcagccgtgtcagttcttcgagttttaaaggatgatccattgttcattcagcattttttgttgcaaataaagacttattgcctttaaatcatttgagtaattagagtttaatcatgtacctaaatttttcaaatagggttggtctgctgggaccaaattgatgcttttggacccagtcaatacagaatcgtgtaaatatctttacccggacccgatttgtctaaccctatttccaggttccaaaaatatcgaagaattacttgtacactttattatggatgctcgggttctacatgttgattacgtggtggtgggtggcggtgttgcgggtgtttgcgttgttcaagagctgtgcgatttattggaaagggacgaagttgctggcacatcaaaccatcgcatcgtttttatctcaggcgccgaaggattcgttaagcgtgtggccaatcaaagacaggttgagatgtctgttcaagcctgatgcagtcaatctttaaggttggacaggtcacaatggccttcgacgtggagggcattgacccaaatttactttttggcgggtcaagcagaattcaattagttcagacccaacccatccaaaagtaatccgattacgcgacctgcaaacagttaaggaactacaaaaacaactggggaacgccagacgtctgctcattgtcgggaatggcggaattgccaccgaattggcgtaatttaatagacgagaaacttaaattctttcgaatttgtgacaaatttacaattttcttagatttgaattgcgcaacattgaaattgtgtgggcgatacgacattcatcaatttcagcaacttattttggtaatttttcttttcctttttgaaattgtttattaaaaaaggtttagatattgctgcagcaaaattcttcgagtctaaattggcttccgggagactgaagggcgaccagaaatccgaggtccacgctgacaggtccttcattacatttttggagatgtttggtcgattttagttgcctgacttttctataattggttgaagaaaatatgcaaaaccctctaaattattattttaatttgaattgatcaaattgtctttgccagattcactagtttggtggtccaacgcacggacaatgccgaattgaccgccaatgcgtcagacgatgagacactgcgcgagcattttggcgccgcgctgggcccgcattggctggccaaattggagcagaatgagtcgcatgaaaatgttaattattttcggttcttatcacttttgtgaccccccccctgaaatttttatttttagctatcatgagttttgcgtggtgaaattttacgtgcaaaaaatttaaaaaatgtaaagttaaaacatcaggcgggcggcatgaaatctacaatgcagcccaaccatctgatatgagatagtggagccgtgctcaattttttcttcaattacattaagcagagtctctgcagtcataaagcattcacgcgtttcccgacatatccccccaaacacccactgctctggtaaaatgcgtcccacatggtttttgcgttcgaaaacatggcctcgtcgatttcgaccgtcaaattgtttccgcctattttatgttgctgttgttattgtgattgatgatcaactatttataaaacagtgatgcattaactaacaacatttataaacagtctcagattatctttaatccttttaaaatgtctttttcatgccgcccgcctgatgtttgaactttacattttttaaaatttttcacgtaactcacgcaaaactcatgatagctaaaaatgaacgtcatattcgtgttcagcgcataaaaatgccctataaaaaattgttaaaaaaaattttatggggggtcacaaaagggattagaacctcattttcaatcgtattatcgccactttcattgctttttcaatttcagtccgttcgaaaagtacacgtcatttccgatgtggaactgattgggctgagtgaccaaaggccatcatcattcgccatcgattcggccgtttctttctgtgaacttccttcacattttcttggtgcccaaacggattggccattgtgggcacaattgagcaacggagagcgatggttgggatgtgatctgatcgtcgatgccagcggagtggtcccaaactctgaccaatggaagagcgattgtccagaggttgtgccgctgtgcttatcgccagaaaatgtgccacaatttgttctaagctttctcttgccgaagattatggcattctggtcaacgaacagatgaggtaaggagacggaataggtcacaaatgtttatcattcaaaaatttaggacaaatattgaagacgttttcgccgcgggcgatgtttgcacagcgaattggacagcaaaaagtccccattggaagcaggtgaatgaattcatggccacgggttgggtggtaagagacctttttatatttccagatccgactctggacacaagcgcgacagatgggcttgttctgtgcccgatgtatgctcattgacaacggtacacactttgtttggttggagatattaaaaccatttctcacaacctcctttaaaatttagcccaaacaaaaaggaaccgaattagttcatttcaaccttaagttttgctcgacatcgctttcgaacttttcacccacgtcacttctttttttggcttcaaagtgattttgcttggcgatttttcgggcgaacgattggaaaaaccctttgagaagaattatcggatcactgaaggctgtgaatatgtgaaggttctgacaaaggatcaccgtgtgcacggggcggtgttggtcggcgagactgacatggagggagcgattgaaaatctgattctgaaccaaaccgacattggtcaaattgagcaagtatttctagatcctgatttcgatcttgaagatttttttgattaatcccaattattttgcatttaatataccaaaactatatgataaattcaattttgaactcaaataatttagcaaactatgttcataaaacaatattttactagcacttaattatactaacaatgaacaaacagaaaggtcatttgtcttggtgtgttcttggcccatctcaatgcgcaagaaatccgcaatatttgccccatgtgcttccaaatattcgttgacagtctgttcaggattgagcatgaatggctggtgcaacagctgagtttcttctccgtccattctcgtcagcttaaatgggattggtgccttctctaagaaattgccatcccacctcggattggtcaacttgtgaagcgttcaaatcctcctcttccccgccgtcactttcattttccgcattagctgagcgttccttctccgttccctccccattgtcaacgatttccatttgagttgctcgtttagctccctttttccttggttcacccaaactttccggcgccattccaatgatgtgctgacaaagcacttgaccaagttgtgctgttggaaagtcagaaacactctcatccgatttgtgacccaaagacaccaacgaaataaaacgtcccaattgaacgccattaaattcctctaaaaacaaaaattatttcactcataaaaaccatacgacgaccttttggatgggtttgaccaaaaagtgttcctggtgaagaagaaatgacagatgctcgggcgagttgaatattctcgccaactttactcacagtggcaacgatcgcctcatcggcggttcgtccatccatcatgcggaatttatcatgttcttaacacaaattggaaatgttggtttttgcatcaaaccatagaatcaacccaccaatattcttcagcgttagtttctgtgcttcatcaggcaaaggcagcaactccgaagcacagttccgcaaggcattcaccaattctgtgacctgaatattttccatttgataaatagcaggattaaataaataccaaattcttgaattctgcactacagaatttcgatggcacattccttcagcgaatgccaatagggagcagggcaaagaagaaagatgcctttaaaatcaaatggaaaaatcagccaaaaaagacaagaatggccaaccatttgtctcgggtcaaaagcttccaaccaatcgccatgcttctgtttgttgtcatatacatggagactaagaaagtcaatagaaatattttgaaaaaatctaattataaaaggaagaaaatattcagagaccggttaaaatagttttggtacattcatattcaacttttttgttgtttggtttattttttttaaaccaacaataaaattaaataacaaatctggaaattttgtctttgaattgtagagaaatttgataaagaaatgattaaatgataactcaggcacaaagacaataaattagaaaaatcaaaagctatggaatatttccaattagacagaagacacggagatgagctttacgggtgtttgttgttgcttcttttgggcatggcttttacaatttgcgcaacgactttttcaacaaatgcagcgcacaagcgtaattctcaaaatgcacgaagcgaatgtgtttgccctaaaatgaaaattgttgaaacaaaaaaattcagggaaatttcaatgagttgattgactaatgacaaaagcacaccttacaaaaaaaactgggcaaatgcgcgggttttagccctttctgccgtcgtctgtacaacacaacgttgctcagctgcgtgttcagcgacttcgggtcaacactgtccactgacccttcgagcgcagtttcgtccttaagctcaatgaccaccgcagtgccaatgctgccttgtaaaaatgtgccgagcgtcacagctaccatatcggaaatggaaacactttgaccaactgattagagatttggattttcttttgggtatatctatttctctttcctcttttatctctctctctctctctctcaaattttcgctctatcctttccctctctctctcaaatgtttctctctattgttgggattggtactcttttgtccgcccattattattttcatttctttatttctctcccgtttattctcttttctctcttcgttcatgtcccacataaataccgcgcgccctctgacctctccgtcattcagttgtacccatttattttgcttatattgtttaatcaatattcgccctttgcccttctgtccctcgtcatttatttatattgtgttttccccaacttgaataaatttgttatttattcaattcgccggttcgggacttatcgccggttcgggacttgacggcacaacacctatcctttccatctcaaatatttctttctattcctcgttttaccctttctgattttcctccagccctccctactcccttgctgtccccattgtcataatgtgctaaccaacttgaaaagttttcctaagttaaaataggtcaaaaaatcggctctaatgtctttattagtccaatcgacttttatgagtccaaccaattgaaaatactttgtttttatataataattttttcatgttcgaacaaaccctttatttttggtatcattcgaaagtccatagtctgaataatgtaattatacgagaaaacaagagaattataacatttaaagaaagttacaaatggaaataatcagcatcactcaattcatatcttttttggtaattgcatgaacgctgcgattttatatcttttagcttcgttacacttggtgctttcgaatgataccaaaaagataggtttagctcgaacatgagcaaagttattgtataaaaacgaagtattttcaattgattggactcataaagtgcatttgtgccaaaaaaaaatcgaccattttcgcataaaaaccctgatttttctgaaaatagccatcgattcagtcgaataaaagctcccattttatcaacacaaaatttgccaagtttgtcagcttaacgactaatttgaattagattgacaaaatatttcaccgctttcatttacttcgacatgtccgtgtttagcagttcggattctgcgacttggtaaaattgattagaatataataaatcgttaccaagttatggtttttcagcggggtacctaaaactatggatgtaccaaatacctttgtctcaacaaataaaaaaaattttgtttctagcagcaacagtgaggcgtttttcgaaagtgcggaagagctcggggaagccttggatctccatcccgatgttattaaatatctaaaggaagcgccgcgttcggatgaggacccgattttggtgcttgattacaccgatttgttcaatggccttcaaggcactctcaaggacaacaaaacctgggtggcgaatctcctggtatgatttattggcttgaaattcatgatgaaaattcagtcgaaaattaatgcaaggcaaattttcgtatttaatgctcaagttaaattttcggtaatactgtcgatggtacccccccccccctttttttgaaagtttttttttgttttcgaaagacgcgaaagcgtgtttcctaggggtttaggggccgctgatcacgaatccggcgtctatttcgaccgatttcgaaccccggacctgaattcggacgaaagttcgaattcgatttttcgaatttcggatttttgatacaaaatggcttaaataattttttattcaa

SEQ ID NO: 2862 - DNA, 1051 bp, Heterodera glycines
  unsure (1)..(1051): unsure at all n locations
gaattttcaaaaacaaaatgtgcccattttcctgaaatttaacataactgataaatagtcttgttacgcatcaatcattccgttaattaggtgggccagaacgccgaaaaaatccgtgacaacgtgttcaaattcaagaacttgacggacctttactctgcgcaagacaatttgaagtcggacccgctccttcgacatcttttctatttcccgaaccctttgattgcgcaacaactcaacattcatcagactccggtgatttcgtccattgttatcacatttttatctgatgtgtctgaaaattttcaaacggatccttatgatttcttcaagttctagagatgtcttgttgttctcttattgtgttaaataaagatcttttaaattaatgaattgctctttcattctaataattttatttaaaattatactatcttttcttcattaaaattacgccatttcttgagtgattcaaactggggaatgccagacgtgtgctcattaacgagattgccagggaattggcgtaatttaatagccgaaaacttaaattctttcgaatttgtgacaaatttacaattttcttagatttgaattgcataacattgagattgtgagggcgatacgacatcatcagtttcagcgactttttggtaatttcgatactagcagtgaacagaaatgtcgtttgtcttggtgtgttcttggcccatctcaatgcgcaagaaatccgcaatatttgccccatgtgcttccaaatattcgttgacagtctgttcaggattgagcatgaatggctggtgcaacagctgagtttcttctccgtccattctcgtcagcttaaatggggattggtgccttctctaagaaattgccatcccacctcggattggtcaacttgtgaagcgttcaaatcctccccttnccccgccgtcactttcattttccgcattaggctgagcgttccttctccccgtcctcccatttgtcacgattctccatttgaagtgctcgtttagctcctttttttctttggtcacccaaactttcc

SEQ ID NO: 2863 - DNA, 3990 bp, Heterodera glycines
agggggaggagggtgtattttcgttttttagaaatcccaaatagcaagaattttgcatgaattgaagccgtttttcgccaaaaaatgactatttttgccattttggtccacattttttcaaaaatatggtaaaatgggggtaacctgtaaaatcctgtcaagttggggctggtcatccgggcccgacgaaaatgccatttggaatggtttgtccagtgcgataaggtcatctgaaaggcaaaaaaaatcaaataaataaaacgcaaatacaaatcccgaacgttttttaaaaatcatggccattctaggtggtaccccctcccactttttcgaaaaaaatataaattaaactttacagaatttcataatacatttttagggattttcgggctcgattcaatttcatattcacatttatactctctgaatttttcggcttattataatccggattaggggtgcagaattggtcggaattgaatgtgagattcacgtttaacgaccccgataatccctaaaatgtgtttcatcaactctttttcaaattttgagattttgaaaaggtggacacttggccctcaattgccttaaagagcgaaaagttgcagaggggagcagaaaatttttctgtcttttatatatacgaaaatcatggaacaagtagctatcaccagtctcgtagatgacccgttttgccatgcagtcgaccaattcggcacggtcaaatttccaaattgggtctatcaaagcccacaactgtttgatgccgctggtcccgtcagactggttcagctcgaacagttcagcagcatcatctgcttctgctgtgtcaatttctgttgttgtcattggtggactgtccaatggcggcatcatttgttgttgttgttgaactctgaaaaaacgggatgcaaaaaagaaaattggaatttcaatggaaaatccctcgaaaacgaagttttcaaggaaattttttaatttagcctcaaaaagtaagccgatttgcaccattgaaccctctttttgcaacaaaaaaatggttgaccccctccatttttacgtcaaaacggaagcagcccaactcgggcgttttttaatttttaatttttgaaaagtcatgtgtttctaggaggtttaaggggtcgttgaacacgaatctgacatacgtttaatatgatatgattccgaaccctggaccccgaattcaatacctaataggtaagtctaaatctcaaaattttcaaaattcaaccaaatgcacgaaggaatgggggtttcgagggtgatgattacgaatctgaacttggatttccccaattccggacccttttgagcacaaattaaaaaaaaaataaaaatagaaacccccattcttcaggattgccaaaaaaaatttcgaaaaaggtgtgtctatcactggctgtactcgtactgtcctgactcgcagttttagattctatagtcatttttcggcagcctggattttttctatgcctgtacttttgcccagaaaatccaggtccaacatggaatattaaaaaaaaaatttaaaaaaaaagacttttttcaaaatgtcgaatctagaaatttcaaaagttggcgacgcttttttaattgtgaatgccaatttttctcgtggcaccttcgcgggaagaactgttcctcaatgaatgtttgagcatcagtgtcggcaccgtttttcccatccattttttcctgctcctccttttccgataattccgggaagaaatgcgcttcgaacacatcagcctcatcgcttcgtccgccgctttgctctcgccgtttgaaggtcgattttggcacttttgctctgtgctgatataattgtggcaatggcatggaatcgagcgatttgatgccgaaaaagtcatcctccgtgggcattttgcgagggaatgaaaggatttgaagatttttctaaattggaacttccaatcccgcagccgcagcaggatccacgaatttgatttttgtattgacaaaaaacattatgccaaaaattttttgaataaatttaaaataaattttggttttgtttttgacaatcaaaattttattttttaaaaaatttactcaaaaaaacaagacgcgaatcaagggttagaaggacaaacaaaaaccattccccgagcgtttttttcccgtcctgattttgaaaaattttttactagcctattaaatttttttctaaaaatttccttcaagccatcattcttggatttgagatcactatgaggaatgaatgcactgtctaacttggtttaattaatttttttgttcacatcttcttagaaatttttgccaaatagacctaacacacaaatataagaagaaaacaaaattgggaagtgtagatgaatttttttgtaaatttacacgccctctaaaattggctcaaatttgctggaagaaaatttatacatacaataaactttgaagaaatgtaagttttatgcacttgaaaaaaaattgaaaaaattcacgctagatcaacttttatgccaggggtcggtctgtcctatttgtcagttgtcctgatttggagggtccaaatctgataaaatgaaaatgtccgatttgtaagatttgtcctgatttggaggtggtgaccaaaatttgttctgacttcttaaacgaactcattatttttaaattttatggcaaaatgtcacttttatcaagaaaatataagatttgaggcaaaattggtcattgttggactaaaatctgttaaaatcgcattaaaaattacaaaatttttcccggcggcgcctatcggcgccaccggacatccctgtccatcccccaaaattttttgaaaaaacgcgccgcaaagaaagcgtttttaaaagcgacaaaaagtcaacgcttgatttttaattgcaaaaattggcctttttgatgaaaagctgttaacagatcagaacgaaattacaaaatttttccggcggcgcctttcggcaccgccggaccctctcctcttgccccttcaccaaaagtttttttggaaaaatgcgccgcaaaaatttttaaaaatctgattttttgatcccaatgcactgaaatttacgatttgcttatttcctccccaaaattgttaaattcgataatgtgaggtgaaaaatataattttaattcattttttgatcgaataaattgtaaaaataactgatttgaagcaattttgcaaaatgtgctgcttttctacaccaaaatctgattttttgggccgatgtcctgattttgaaaaattttcgatcgcacccctgatttatgctgataaaaatattaattgcaacactttgatcagataactcctcttcagagtgatcggaagtgttcacaattttagtatcccaataccatggagttgggtccgctctccaccttttgtaaatgtaaaactgcacccacccacaatcatttttgatttataacaaaaggatatagaatttcagtgcactgacaaaggggggacggaaaaaaatgttcgatgaaaaattttggttttaattttattttacattttaaaaagctaaaaacaaaattacaattgaagaaaagcataaagaagattaaaaagaacaatttcatagcaaaaatcattaaaatgccaaaaaaaaatttccccgtcggcgcctttcggaaccgccggccactaaaaatctttacctttagaccgcatcattttttggacaaagattttaaatccgcgatgcgcgatccgcgaccgtaggatttaaaatccgcgatgcgcgatccgcggcaaataataattagtttttttcgagtttataaatatcattatgaattttagcagacaattggaaaaaccctattttttgcaaattttcatcttttagtcttaaatacccgggaaacgacaaaattttccgattattacagaaaacaaatttttatttgaagaagaaaaacataaaaatgataaaaacgagcaaattgatcgaa

SEQ ID NO: 2864 - DNA, 6225 bp, Heterodera glycines
  unsure (1)..(6225): unsure at all n locations
taaaattaatgatttttcatggaaattcttttaaatatatagccaaaatttcaaaaaagatttcccggggcgcctatcggcaccgccggatccttaaaatcttaaattttcttaaaaaacttgctcaatttgcaaaaaattggtcattttgaacagaatctaacaatgtattgtattaaaattttcaatttttttcccggcggcgctttttcaagaaatacaccgcaaaaaattttgtaaaattactaaagggagtcaaaaatataaagttaataaatgttttgttcgaattaattataaaaaataatttatttaagcaatttgaaaaaattttctgatttttgactcaaaaataagattttttatttcaaatttctcctttataaatttttctatatatttttaatttaataaattgattgtcctttaaatttgtgcattaaaaatatttttgtgagtttttaattaaatttttgaattactcccgctcccgcccgggactcccgttaaaaatggacgggattttaatgggagcgggatttttacgggaatcccgttcgggactcccgtcccggaaaattttgaactcccgctcccggaaattttttttaccggacaaagtgttggtcaacagaacaaaaacaccgaacagaaattggatggaaaatatgccgtggtggacaaaaacaatgttttgggtgggcacaattggcaaattaatttaaaattaaaaatggcgttataaaaaaatgcattttttgagaggggacaaaaccctcgtattatatcgggattttatacatatttggtacatatttcggacttttttcttacatattttcatttttttacatatttgaggattttttacggaaatttttggaaattctcaaaaaaaatccaaaaatttcggcaaatttttcatttttttacatagctattctgagaatttttgaaaatttttagaaatttcttgtgaaaaaattaaaaaatcttttttttaaatgtacccctccaaaaataatttttaaatgttaaaaggtgattttaaacattttggtcatttttatggcattttgtgcctatttaacactttatgaaaaaaaattttccaaaaaataacaattaaaaaaaattttatttacatattttcgtacatattttgggtttttatacatatttcttacatatttcgggatttttttttacatatttatgtacatatatgaccactttttgtacatattttttacagccctaattataaatatttaggtgttaaaaaattaatttttctttttaaaatgtatttattgctaatttagttgctttagtgacgtcatcgggcgaccattcgccgccggcggttgtctcagcgaatgttgcaaaggtgggaaggaaaccttaattatttcacaaatgccatttaatttcaggaagtgcctaattcgcagcaacaaaatgattgggatgccaaagtttgccacaaagacatcgaaatcattggggaaaagcaattgacgatcaattgcaagggcaacagatttggtatttaatataaaaattaaaaaatgtaattaattaattactttcttaattaggatggcactctgtttttgcgaaatttccaattacgaacttttgtcgtcccggaattttctacttcgaaatgaaagtgttcaaattgaaaaggtgttcattttgatgatttcttagcgttttatttataattttgaatttattttaacagttttgccgcgattggattcgccacgaaggaagtgccattggacgggtcaattggtcaaattttgaacagttacgggtaccgaagcgatggctcatttggctgtaatggcatcaatcggccgtgcaaaatgccaatgtcattatttggttcgtcattttcccccgtggcaatgcaatcggcggacgtggaaatggcatacaaatcatcggagttttccactggtgacgtggtcggatgtggcattttcttggatactcgactgatcttcttgacgaagaatggccaacgaatgggtgggccaattaaaatgaaaaaacaaattaattaaaatttaatttttaagattattcctcttttttcattcaaactcccgccaattctctcaattctctgtttccgtgcgtttctttgtgggtgggcgacaaaatcgaggcgaactttgggccaaatttcaaattcaatttggcgactctctgaagaaagcaaaaagaatggaagaaggagaaattcatctaattgctgtcatttttactttattatgtttattttttaaattcttttttttcaattttgattttggctttataatactaattactattttatttgctattcatttcgtttattaaaacgtcgattttgtgactcagtttcaagtttcttcgaaaaaattcctatgaatcttaaaaattaatacgagaaacttcacaaaataatttaatttctcttaaataaggatggcatttcttgactcttggttttaaactagggtttctccccgactccgagccccccccccccaggcccgtaccaaaggaatttttacaaatatttgttctattctcagatattaattaaatccaatttttcaattgcatttttaaataaaattctgaattggggcattcttttttaggtcatcattttgccttaatttatgttaattgaccccgataaatatgttaatataagcaactgcagaatcagcagatgttcatttattacttctccaatttgtttaataatttatcatttattaaaatttacatcttttattgtgaactttcattttaggaacttaatgaaaagtttgtcaaaatggaattggtattgaaattaaaaatgtgagtgttatttaaagtgtcatttttttgaaaattaaatgggaattgctaattaattttgaaaaaaaaaattttttttaattattaaatgattttagaagggactccaataaaagttgaggcagaaggaaacgaatgtactgctggcgaaatcgaagcggaaaatgggaaaatgaaaacaaacaaaaaaactaattttgcggatcaatttttgagaaaaatttcaattcttagggttgtatttttctttttattgcatttttgttaaggattttccgaagatcccgacacaattagtgccactaaaagcaaaaagaacacattgttacaattgttatcccaattttcatcgttcttctgctgctgaaccgtcacggcctccccaattttgcatcgtttcattatccatcggttgtccaattcctttgctttggccaatgtcagcttttcctttgtccattcgttcaccaattcaaatgtcacaattgatggcgcatgaacagtaaaatgaatttggtaactgacggaagaaatggcattggcacggagaaattgctaaacaatttggaaaataaaaatagaagtagtcaaaatcagtaatatgcaaaaaaatatgggaccataccttcttgaaattgttgacccaatcgaagtacacttgtcgttcaaaagtgtgcaacacaatcgcttgggttggccatcttttctcggtgtgtgcaaaatcgtcaccaatcgcaattgcctcgggcaacagaccatatgaatcgattgaattcaactgattgagatcagtgataatggtcggcgaagtgcgacgaagaaaattgtccaactgatcaccatgttaaagcgtaaatggcgaatgtttgtcgaaaaaatgggccaaatatcacgcacaaaaatgtcccaaattggctgtacatccatgatgtgtgatgatggaatccacaaatataagtcggtcctcttttgtcgaaattttggtgatttgaacgaagaaaagcgatgacggaatgatcgatgtacctgaaaatttttctaaaatcatccattattaaacattcttggtatcattcgtaagccttagttatcctctagtaggctgcaaagcttcaaaaaatttcattatgtttaaaaaaggttatggccagaaaattttaaaaagttggttttctaaacatttttggctataaattttttgaaaccagacggaattttttgaaattttgcatgctaatagaggatcttaggactatccaattttgacatgacaactcgtacaacaagggacctatcaaagaatagactagtttcatctttcattttaacattttacaatattttttaataggaaagattttctttttaattttttaaaattaaattgtcttttgtatgagttgtcatgagttgttgccaatgttttccaatttttaactcattctcagcacgcaacaatgaattcaagaaaaaaaagcattggaaagtgggtccgacgatgtagtagtgattttgtccaaaaaattctaacttttcaacggggaaagaggtgagaggtgtccgccgagaaaacaaattttcgtttttcaccctgcctcccccggccctctacgcaccccttggactgtgtgtgatttttaaatatttacgaaaatttatgaaaaaacaacttttttaatgcttattgtttcttgccaaccatttctgcgtccaattttggcacatacaacattgaaatgtgctacgaaaggggacatcgtattcgggggaaagggatgaacgagccaatgatccgggccctggattaatggcctccccgaattgggatccccgggtcgcgcgactgattggatgcgtatggagaaatgccaagaaggagtaaaacagatatcatttattagccgataaataagttgaaaatcccatcgcaaaaagcccatctcgctctatcgctctcgactctttagcccccccttgactgactgccgcgagaacggggagaacgggaaaaggaagcgaaaggggcggggaaaaagacaacaaagtgatcgatgatcgcttataatcatattccgtctctgtgcctcacacgtccctccttcttttgagtttgtccacaaactctcagttctgccgtgctggtggattggtgcaacgagtggagacatgacctggctggttacaacgccaacatcgaatttcggcacgagttcgtgaaaattcgcgctgaacatgacgagaaggaagtggcggattggagatgtccctggattggctgataggagaattttggaaattgagattatttggtcgatttaaatcgttcaatggcctcccatttcgagacagaacagccgcggttgaagacgaacgaccgggtgccaaccaatcagcatgaaaacgatagttctggactgactcaccagaatcatcgactaaaagtccacggacgtagctcgaactcgggcttttgatggacttaacaacggacggggatgttaccaccgtaaactcaatggccttattcagaaatctggaccaaattgggctgcctcccaattcaagaaagtcgcctattacaattagtccatgttttccacgggaaagggcaacattcaccctttgggcatcaccccaaaattcactcttacgatcctttgaaaaattggcccgttgccaattgctgaactgttgctgcttggtgactgtcgtcgtgacgatggtgatatcggcctcgtgcccctgcattgcgtctgcagtggcagagacaatggaccgactaaacccttgctctttcagctcagtgccaatctgcgcagcttgcccagcatgaaaggaaattatgcggatgctgccggggaatccgtccaacaaggccaagaggtccagtactgtccgagtttgtccgctgtttgttgccgaaaagctcgtcagttccggttccattagtgattcctggtggatcaataaaagaggggattccgccaccggcattttccaaaaatcgattagcatcctgaaagaacccggcccaggctgaaggcgttccccgtggggtttgtacgccatgtgctcaacacaggccacaatctgccaatgagaacggtaatttgtcagcagtgttgtcctatccaccgctttagccttgtccnaatttatcagaactgtgtcaaacccaaatcctaccctaaccggctcgggaacgctttgcatgttgaccgccaattggtaccggtccccggtaacaaaaaccttttttatctcacagagagcccgacaagttgagcagacttgcacgaatggtccctgaccagcctcgtccaacaccacgatgttcccgtcacaaatcag

SEQ ID NO: 2865 - DNA, 759 bp, Heterodera glycines
atcaaattagtatagttaattgcctaaattcaattattaaaaatttaattattagtttgagtaaattacctaacccaaacattggaatcattaaaatctttgccgccaaacgatactcaatgaaattttgtcccgaaaatgctgtataaacaaacaaaaaatggccaaactggtggagcatttcaaaaaaggaacaaagtgccaaaaggtaattaacggtgccacggaatgaccttaaatagggttaaattatgaatcaataagcttattccaagaatttatctacactaattacgcactttgttaaaaaggttacaccaatgacagaagaattgaaaatgatgccaaatgtggcaatgattccataagtcagtgcgcaaccaatcagagaccagctgggatggaggtctttgaaggccaaataaaactgcaaaaattaaaaaaaaacaatttttaaatatttcaattaatgactaccgtgttgttgttcgttgagttgtcattcattttgctgaatttttgtttaattaattttttttaagataaaacaacaaatggcaatacttaatttgcttgagtaaaaccgaaagctcacctgacaattaatttaattaaatgtttctgaatttacataatatttgtgattttttgtgtctgcctttctgttcatggcacctgccaattttaatgaaattacacgttttacatttttcaataattaaataataaatgaataacgttttttgtcgtacctaactg

SEQ ID NO: 2866 - DNA, 3650 bp, Heterodera glycines
tttgtgcctaattgggatttggccagtaaattgaattcgccaaggagtgatttggccagtaaaagcaaatttttaaaatggcagagaattaattaagttcacacaaattaaacgcggaaacaacgattcatttcgtcagtagctctaaatttaaaaagttgagagatgaataaaaattgctgaattttaattctacaaaataattgatacagtatttaattagaaaaaataataattttcgtattgacctttcaatcggcggtagacctataaacttttgccaggcaacaacacgtagacacatggaactgagcaatgatcaattatcgttgaaactgtgtaaagttgtgcaaaccctcttggacaactctaaattttagtaagaataaaaatatataaatatcatttaaattatatttaaaaagttaaaattttcaaattattttttggatcacttcaaatgttccgtcgatcgctatctcatttctgaagtttcgcaatgtttgtattccaaaattcgagcaaaaacaattattcttccaccatcaacgtttccatccaaaatgacaaaattctgcaaccgagcaggtatggcaattgccgtggcagggagggcatccaaacaaacatctgctgcgtttattttaggaattttgtaattaaaattaatttttaattcgtaatttattaagaaatcacctcttcttggttctttcttttttggtatttgtaattccaagccatattagatgctgaaggtgcgcttccgactcgcacatcaataggcaaattgctccgcgtttctcttacaatgttccggcttgttgtcggaaaatcgcttgccgcctcctgtcgaagtaattcattggcatcacggacctttaaagggatgagaacaaccatgttcccccgttttgccattcaccccccccccctgttttaccatttttttcctaaaattgctggatggttatgtgcagcagtgacacggccttttccgaagaatccagcgcttgccaaatttgttgaatgactaccgaaatgatgaaaaagttcaacggagccttcgatgtttgcagtctctcgcctttgttcctccggaatttgtttacaactacttttgcattttggtttcatcattgaattccactcctgaactgcgagaactgataatgtactttgtcaataaatggattgcccaaggcgaataatcgaaaatgaagaagtgcttttgcctgatgctggtgggctgctgacggttggattcgtaggcaaattgaggcattgaaccttgcacaaatgaatgcgctgtttccgattcaactttggaatgttgtttacagagttgccgaagggctttgccgtacgaacaattcgtgtgaaataagattttgagattgaaattatggtcagtttcatttgagggatggcataaatggtggaatgaacattaaaggcaatcagagattgagtacatttctgcgaaagatgataaaggaggatgaaatgtggggagttagtgtggcagattttcaggcggcacctgctgatggtattagagggtcacatgtcagccgccgatcaaaatatatcagacaacaatttgcaagctttgttagcagattttgataacagtgatccgattttatatatgagttcatgttcctaccactcatttctgatcaaaaatcaaactaaagaattatttttctgatcaaatactgtatccattattttgtagaattaaaatttaaccattattatttaattgattctctgccatttttaaaatttgcttttactgtcgaaatcactatttgtcgaattcaatttactgtcgaaatcacaattaggcacaaagagtaagtgaaatagttcactgtagaaatcacttactgtcgaaatcaaccactgtcgaaatcacctgacacgatattgtcacacttcgtttaaattttcgagttgtattttcgaatcacaaaaatattttattaaaatgaatgaaaaaaggtgcaaaagcctcgcgttcacctgacaattaatgtttgagaatttcaattatttgtcattttctgttacttttcttttggtcatcaaaatttattattccttttgttaattaaattcaatgccaataatgacaatgaaaaaaaataatgcctaccaatcatatgacaattaaacactaattgactaatggaagcccatcgtgcagtgttaaatgattttattatgtacactgaaaatcggggaaattttcgaaaaatttgtagggggttggtaaaatgtttctgcaaaaaagtcacacgtactatttcttaagaaatacagtaatttttgtagacacaaaactgctgaagtgcccatacctaatcgcgtgtaagttgaagtcccatcatccaaaaagcgaattggaagtaagtttttttgtgctcttttcaataaaaactattttaaaagtacctatgcatttttttataaaattttataaattttaactagaaaatataaattctcaaaaatgtaagaaacaaatgaaaatgtgtatgtaaaaattgcgaaatttttgattttttgtacatttaataaaaatttcctcaaaaaatgctcaaaaattgcaaaatatgtacaaaaaattgcaaaaaagtccaaaatatgtataaaaatatgtaaataaaagtcctgattttgttctcaaacataaaaaagaaatttttttccctacttttagactatagagaatccaggaaaaaatgtatttaaataaaaaatgaagccccactaatcacaaacttagtccttctgaaaatctttttttaataagatgtttgcgctcacgtttaggtgccaagccaaaaataaaaaaatcaccaattaacaggaaaatttaatatttaattttataaaattaaaatgtttttaatgaaatttaaaaaacaaaaaataaataagaatatcaaaaattcacggatttacaaaataaaattcaataaaaccaaaatgtttcgctttttggtgattgttttcgttttttatacatatttgaagttttgaaaatttataggaatttcttatgaaaaattaaaatatttttaaaaagacagccaaaaaatctcttttttcaataaaaatgagatcataaattaaatgtaaaagtgctcaaatgttattttaatttatttaggccttttgacgccattttgtgcttattcacgcttttcgaagaattttttgtccaaaaaattgtaataaaaatatttatttacatattttcgaaccggcgtctgtgactttccggacaaatgttctaccagctgaactaccgaccctgccacacaatcatcccaaaacagataggacaagccttctttgtaaaaaatgtggcactttcccaagggtaactcttcgattttcgcgcaaaaaattcacgaattatccctttttatcaaaaatttattactttaaataagtgttggacatgtcacaaaatggttttatgtgctatgaattttctcctaatttattcagcttttctttgctctccaaagtcaaaatcccgatgacaacggtgtgtcttcctttccatggccaaccgaattgtgttggggcagggttgggcatcaaatggcttggaattggggacattttgg

SEQ ID NO: 2867 - DNA, 2470 bp, Heterodera glycines
ccgcttgggcatcccacgtgagatgaaagttcactttttattccatccattccatccacagtacttttcgcgattgagcatactgtagattggtcagcagcagagaaagtgtaaatgtaattggacatcacagcaaccacttgctgactgcccggacagcacggaaaacctatggaatttaaatttataaatttgcaaattaaattctaaattagaaacataaagatttccattaaatgtttttaaaatgtgattttaaaaattattaaaattaacttggcattgcattgcaacagactaaaaagacaattaggaaaacggagaaaacatcgcaaaaatattttttttttatttactgaataaaaatttgatgattttttgttttgtcggtgcagttaaataccctcttttttcatttccttaatagcgtggattttaataaatctttttagcggaaattgatgctttttcacgtgaatttacaaagacttccggaattttgtagaatttttaaaataataataatattttatttttaatctgtttttttcatattattattgcacatgaaatacatttatcttaaatgtctcatgaattttaaaaatccagatttcttttattgttaaaaaagtctctaagtgataaatctgaaaatttcccaagggtaactcttcgatttcgcgcaaaaaattcacgaattatccctttttatcaaaaatttattactttaaataagtgttggacatgtcacaaaatggttttatgtgctatgaattttctcctaatttattcagcttttctttgctctcaaaagtcaaaatccgatgacaacggtgtgtcttcctttccatggccaaccgaactgtgttggccagggttggcaatcacatggcttggacttggcacattttggtgcgcggaaatccctggaaaaatatttatttgcttgattatcaaataattagttttatttgcctttgcttgggtgtccaatgtgcacatccgtaacttcaatgttcatttcttggccaattgctttgattgcttggctttcctgtacaaatttgcttttcatgttttgccattctgtgtcgttgcccgcatggccagcagcagcagcggccaagtcgaacatggcacgggcaaagcccaaattgtagggacactcatcctcataattgatttccatttttgcaatatcttaatgaggtaattaggaaaatttcatattaattatttatgtctttcaatgatctgctgatagtattgtaattactagtcagctgtcggtcgatttcgttcacaatttgtgcttgtcctccccttgggcatccgatgcgataggacagttcattttttattccttccacagtattttttgcggttgagcatactgtagatttgtcctcactagtgaaagtgccaatgtaattggacatcacagcaaccacttgctgacttcccgggcagcacgggaaatctgtggaatttaaatttcataatttttgtatatttccattgaatgctttaaaattttaaagttaaatgttttttttgttttatttgtgtttacttggcattgcattgcaacagaccaaaaagacaattgggaagatggagagcagcagagaaaacatggtaaaattatttaatgaataaaaatattttaaataatattgttagtttttctgttcgcttaaatatccatccttttttcttatttccttcatagacgtggcttttatagacaaaaacatcaaaaaatctttttttgcggaaattgatggattttcttatttgctttcacgtgaatttacagacttcgctattttgtaaaaaaaaaattttaataataaatattctttaaatatttttttgtataattgtattctttcttgttaaaaatgtcttcggccgaaaaaggccaaaaattttataataataatatgttattgttctgttttagaacattttaaattattttaaaaatatttttttgagaaaatatttttaattgttttttatactttttaaaaagggattttttactataaaaactataaagtaaaattatttatatttttcaaaaagaaaactctctttttttactttttttttgttaaatcttttgcaatacattttattgtacaaaagaatacaattcaaaataggaaattactttttgtccgtcgccacaaatttttcaataaatatcactttttttcagcagctcgcattcattggtaattattgtttgttttgtataaaataaaatcaaaaattttactatttttaatatataaattatttttcgacttttatttcttttttgcaaaaagaaaaatcagtgctttttctcacatttccgagtaatttaccgtccataatcctttgtttgatattttggagataaaaaaattaagaaaaacaaatcagtgtttatattattaaatttgccaatccattt

SEQ ID NO: 2868 - DNA, 3610 bp, Heterodera glycines
cttgattatcaaataattagttttatttgccttgctggggtgtccaatgtgcacatccgtacttcaatgttcattcttggcccaatgctttgattgcttggctttcctgctcaaatgacctttcatgtttgccattctgtgccgttgcccgcatgcccagcagcagcagcggccaagtcgaacatggcacgggcaaagcccaaattgtacgggcactcgtcctcataattgatcttcattttcgcaatgtcttaatgagataattagaaaacaaaatttcatattaaatatttatatttccaatgatctgctgatagtattgtaattactagtcagctgtcggtcgatttcgttcacaatttgtgcttctcctccgcttgggcatcccacgcgagatgaaagttcactttttattccttccacagtattttttgcggttgagcatactgtagatttgtcctcactagtgaaagtgccaatgtaattggacatcacagcaaccacttgctgacttcccgggcagcacgggaaatctgtggaatttaaatttcataattttgtgaaaaatgccactttggaaaaataaacatttccattggatgctttaagattttaaaaggtttttttttaatttatttaatttacttggcattgccttgcaacagaccaaaaagacaattgggaagatggagagcatcagagaaaacatggcaaaaagattttttatttaataatgaataaaatatattaatgatgtctttattttattttttcagtgcacttaaatacccctttttctgatttccttaatagacgtggattttattagacaaaaacatcaaaaaatctttttagcggaaattggtggattttcttatttgctttcacgtgaatttaaaaaagactcgctattttgtaaagattttttaaaataattatatattttctatatgaatttttcttgttaaaaaagcattcggccgaaaaatacaaaatatttttaattttaaattttaaaaattattttacgtacttttttaccttttctctttttcaaaaactttcttttaattaaatataaatttttttttggggggttttagggaataaatctatattccgctatttttgcgtttttagtccatattttggccatttttggcaaaatttcacaaaaaaaatgcaaaaaaaaaggcgaaaaatacacccttaaagatcgacttttttggaaaagctagaatctaataaaaattggcagtttttagcttaaatacatttttcgtaattttttagggtttaaagcatatattttggcagtttttagtccatattttggtccatatttggtcatttttgacctttttagtccatatttcgggcttttttagtccatattttatgtccatatttgccgttttttagtccataattttattggtctgttttggagtgttttttaaattagtttcggattttttaataaattttttaattattttttataccatttaaaaagggatttttttaaattataaaactataaagtaaaattatttataattttggaatataaaaactcactttttctgtttttctttgttaaatctttagcaatgttttcttttgtacaaaacaattcaattcaaaatgggaaaattactttttgtccaccacaaattcagcaataaatgtcacttttttccagcagatcgtataatgggtaattatgatttgttttgtataaatacaattaaaaataagaccaatttcaataagttttttttcagaagaatcccgcgttaatttattttttgtaaagtgaaaaaatcggctttttctcaaatttctgagtatgtatttttgcatttccgagttgtcacccctgagcctaatcaacgaaattcgaaaaactaataaaagaattaagggctgaaacataaatacggatttcatccataattaattattaaatataaaacatttcatttcctaaattttgttcagttaaattttagacaaaaatgttgtcaaaagtttgttttccaaaatgtttgttgctgttgttattcggctgtataattggcaataaattttcattatgcgaccaaattttatcgcctcaaacaactgaagaaaaagattattcggaatgcggaattccggactttgatccgttcaatgaacgaagcgcagaggattcttcggaaatcagccatgtaattatgttattaattaccttttttcatattagggttgcgcatcagggatgggccaaattgaaaaataaaatcgaaaagcgaaatttgcgaaactgaaaaatgcgaaatgaaaaaaaagcgaaatgcgaaaagccaaaatatgcgaaatgcgaaaagcgaaattttttaaaaaaattttaccaatagcttgaggttgtgatgcaaaaaaaaaatctgcattttccggttcgatctttttctcagatagaaaatgacaaattctactcattttgtggttaaaatttcaaaaattaaggtaaaatgaaggtccggcggtgccgatacgcgccgccggaaaattttttggaaattgtaataaaatatggtaggaaaagttgcaaaattttcaaaaaatttaccgttttttcaaaaaaataaatcgcaaggcaaaaaaaatgcaccaaaaagttcaagataaaagcttcaagccaagttaaaaactcgttttcgtgcatattaggctatagcaagttagcaaaaaaggtaattattagagttgcacggaaccaggaattttgacaaaaaccgggaccgggacttacggggaccagaaaagtcgggaccgggacctcgattttcgtccgggactgggaccaaccggggattttcccaagtgaaattttttgaaaaaaaatttgaaaatttgagtgcactttgttacaaaaaattgcctatattcaaaaatgtacccataaaattttttaattctcgtttgtggggagaaattcgaagaatttttccattatgcaattttgagtgtaatatgttaacagaaaataataaactgaagcattcgttttaataattaaattttcaaatatattcatttcttaggggtggaaattttgcattttgcgccaaaaagcgaaatgcgaaaagcgaaacgccaaaaaatgcgaataatgcgaaaagcgaaacctcggcccatccctggtacatatgtcattgaaaattaaatctttcttgctctcctctggtcttaatgaaatgggcagtcctttttcaagtatgtccttgaaagtttttaatttcttttgccccttggcgtttgttcaatggccactcattttttcatgtaatttgtccattaaacaacactttttctctcgccagttattctcccaaggacgtttgtacatgttaaaaattgacattttcattttattcctagtcagggatttaagttgtttttttagcttagtatgcattcatttggcttactgtagcagcgggctgttggccacaactgaaaagtggtggggatactgtagttatttatattattaaatttttgtgttaggctctaactgtattgcttaatatattatgggttaggggtataagttctatga

SEQ ID NO: 2869 - DNA, 979 bp, Heterodera glycines
attctgtgccactcgcgcattcgcttttcctccctcacactttttgttctgcgcaatgcgtcgctccatctgagcgcgcgtctccaccgcctcccgcgcctttctttccgcgatgctcaacgcctccgccattttggcaaagttttcattgatgtgcacttaaattagcatgctttggctaatgctttgctccacccattttgcccaccttgttgcaatccgcgcccatccgccgccaatcgcttgtccaatgccacggtgtaccctttggggtttttccagttggaaatgcaaggcggaattttccagtcggcctgttcctttgcgcttacctcaaaaagaaataaataggatgagtttgccagtttgagtgcatttccaagtcatatctcgcaaaatgaatgggtccctgaaaacgcacttttctcgtcggcgaatgcatcaccggcgccggcggagagggcggcgcccgagggattttctgattgatcctaaaacacaaatttaatgcaccagtaacaacattgctcttcatgttatggttactgaaaacgtggcggttccatcgggtccttttgctcctccaccagccgaatgattctctgttgggcgccgcccgcgtttaggcccgactgttggctgggcgtgtagcgaatgtattgggcaggcgccgtctttttggcgtgttgaacgggcaaagcggcggcaatctaaaagtatgaaagtaacaactttcaaaatgtacattaaagaggtggaaaaaggggtcgacgccgaattttacgtttatttattgctttttaacatatttttcgcacttttttcttttcatctaatttaataaatggccaaattttcattcacaataattctatcatgagttatgcagtttattgaaaaataatctgttttgatatgaccattattttttaatttgtagaaatgaattttaataattggatagagccaggactacttt

SEQ ID NO: 2870 - DNA, 1983 bp, Heterodera glycines
caattaataattaatttccgtccattttttgtccctttttcgtccgtctcactttgtcttttccgtgcgcaatgcgtgcaatttcgtcaaatcgcaactttccctcctcgtcaaattgcagtgccaccgttttgtctttgtttcttccgactgcgcgttccattcccatgcctaaaggagaaagaaacgcggaaaattacgacaaattaacatttttaaaggaccaagtggaaattgcgcgatgtgaatctccggaaaggcaccgccatcgccaaagtcctgaaaaagtattaaaattagcaaaaaattattttagtaaaggggacaaaaatatacttcaggcgtacgtggcacaaatcctttgcggtgcccatagggcggtggttctttgatggcaactgtttttgatgcggcattgtgattgatggccacctaaattagcgtgggggtgtggtattttaaacggattttcagtgtaattattaaacagggacttgatcgaatattttttaaaagaacatcaaggctaaaaaacaaaaaatgacaaaatttgcagattctagactaattttttaaagaaaaataagtttttggacgccggcattgccaataggcgccgccgggggaaaattttcacgaattttgttagaaatttgtcattttttagaaacttcctcttacaaataaaaatagggcactacccccaaatcagaacattccttagaaataataacagatctaatccctgttgttaatgcaaatccaaaacctcgtggcctttgaaccaggggtcacgcgtgacaacatttgcccattcatcctttccttcgttttggataggcgaaggtaatattctgaaaatgtcaaatgtattatattataataacggttaacaaaactcactcgttgagcttaatagacgacatatttgaaaaaagattcaaatggaagaaaggttctgaatatgagttataccaaatggtgaaattttcataatatagatcctgacagtactacactgttggaaaaaagggtaatagtcaggttgttccccacttttttggtaaaaacgtgtaaaacatgttcttgtgagtggtttcggggtcgctgatcacaaaatggacatctatttcgatcaatttcggaccagccccgaattgtaacaaaattcgaactcatttttcactagaacactatgggtacgccccactgtgcagagaaaagcctagtactatctcgtcgtttctctttttctttgtaatttctctcactttggcgtactatctcttcattttaattatgtaaaaaacaacattcacttcgctacgtttaactttttttctacacgttaaatccaccccaaattttgcatatcgatagagaaaaggaaaatgagcaaactttcagtgttttgagtaaaaattttggcctagaaagttattcaattcgcatttatctgaaattttttaaattttttaggatttatggctaaaaaaaaattattgcttaagcttcaaggcagaagaggtgctgaacaactgaaaaaaaggcgagaggaaagaaaagctcagacggccaaggcgacagaagcccggctggccaagaatagtgagtttttccattcatttttaataaaatcctaattttccaaatttttagccgctccccagccgaacactgatgcagaaacgccacaaccatccgaagaagagccgtcgacatcagaggcaccggcgcgggacaacgacggacgaccaccatcaactccaacaccgatgacaccgcaggaaatggacgtgccgtcggtggagatggtggacaccgatgtgcaaatcccttcaacgcctgccgatgaagaccaacaagccgagcccgtgccgtcaacatccacggcacgctgtgacctcatggcgacaccatcaacttcaaagtgcgccggtgcctttggtcttgacgatggtgagtgcgaaattccatcaaaaa

SEQ ID NO: 2871 - DNA, 2611 bp, Heterodera glycines
  unsure (1)..(2611): unsure at all n locations
ttcgctaattcaaataattttggttataaaagaacaaattcactttcgacatttaacatcaatagaaaaattattagttttaggcattttggttaaaatcagcagtcaatgagctgagttataaggtgataaaaatttgaaactctcgtaacttttttctgagatgacaaattacttagcatttgcttagaaaaagattctccttttcaaaatccttttttagataccaaatttgttcagtttggttgggaatgaagcgaattatggcagatcaaaataaaaaatacaaaaaaggcattttccagtgtaaattttgaattaacgccaaaaatttacgccaaatgcgctatttggcgttatgagcaattttgtctgacactggcgcgtacccatagtgctagaatcaactttattgggcatgaatcccgattttctatttcatttcgtatacactgcgactcacaattttgggctcccggtacaaaaaaaagtttattttttattcataaaacagaacgccaaattgcaaatcttaaaattctttgagattttcccttctaaaaatggcagagccgagattcgagttaaaaactaatacgggaaaaggcggggatcccgtcccgttcttttccgttttcccgtttccgtaaattttttttccaaaagatcgaatcgccgaaaagctgactgaattgggcgcggccggaacggaaggaaagtgagggatggaacttttcatcttggaaaagcagttcctcaagaaattcaaaaatttatttaattactcattttaaaaacaatcgaaataattggcaaaaaaattttaaattattattatttactcatttaatgacggaattgaagcaaaatgctggttatttatttaagtttgattatttaaaagaaaagagacatggcaaatcgcaaaattagttatggaccgattggaacaatcaaatggtcaacggcgatcagttggtatttctgcacaaatttggtgaaacggttgcacagcgcagtttcttcctaaaagtgaattgaaaatggatacaaaaaaatgaaagacccacgatctttccacctcaaatgagtcaaaaatctggcgatgatggaaataggcgtgggagaagattcggtagagtcgtcggcacaccgatccaattttggcgattgacgactctttgatggtggctctgctggggaagtagcggttgctgttcagcagagaggcggccccgtccaaagtgtgccgcgtgtagtcaatggcactgcactccttcgggtttttgtgcgccgcgcacaaaacttttgacaaaataagaaatgaaaagtggaaggataataatagagtttgacattttgaaaaaagcccccgggcctagatctgaatcccatgttggacatggacaaaaatccaggtccaggaaaaatcaacgcatggcatggcccgggccttgatttttgaaatttgttttaaaaagtaacaatggttctagtcggatttatgcattactcatacttgatcaatgcatgattcttggtctgaaacgaaagcttaaagttcgataaatgcaaagaaaagaacaaatactggcattataaaagaaattacaatgagaaaacgaaattcaactttttcgagtatattcaagtataattttttgtttattgcctttagctcagaatttagttatacataagattaccaagagtttaagcattcatttgataccaagaatggaagccttagtcaagaaagaaaaaagttatggcctaagaaactgagtatggtcattcataggacgcgtaaaaccgactaaaccgcaacaataaaaagagcaaattcttaagtattttcctggaaattaagatttttcgtacataacctggaaaaacccaggcctaagccaagctcaactaactattttgagacagaaaatcaataaggaagactcacaaatccactgctcagtcgcggtcatttgtgtgcaactttcggggtgacactgctcctatttggggaaggggttgataattcacatggttaaaatccaaaaaacatctctgatgaaattgtttcgcaataagtcaaaaaacaaaacctgtaaaagtacggccaacccgctgagctccaggcaaaactggcgcaactgttcgtacttccatacgccctcgtccacgcccgcggggcagtccaagatcaagtccagcccatgcgcatctctcccaatgcattgctgaatccactgctgcacagcgaaagtgccgtccatctcgtncaatgccaattcgccccatttgttccattccgcccggggtggtgccccggacagttgcgaaaaatttggccacatgaattttgtcttncttcaaattngggtgaatgaacgcaagaaatannatcgggggagggggagaaattgcaaaaaatataatgtcaataatttaaatattaaaacagacaaatatccctctctctttcccttcttcaagtgatacggtaataatttaaagaatgaccgattaaattgcagttcatttacaaaagttgttttgcattgcaatactttatttcattatttttgtgcctttcaacttcgatcacttaatt

SEQ ID NO: 2872 - DNA, 5681 bp, Heterodera glycines
ggttggtggggcggggggtctgagtgctcgtttcgacgtttcgctggcgggcaggtgcccatggggcatggggttggtgggggcggcaacttcaaagtggtccaataggtttgggtttggcacacgcccctcccatatgctttgggttctgggcggcatcttcaaagggatgcgcccctcccataggcatgggttggtgcggggcggcaacatcaaagagctacgcccctcccataggcacgggtccctgtccggcaacatcaaagggctgcgcctctcccataggcttgggtccctgggcggcaacatcaaagggctgcgcctctcccataggcttgggtccctgggcggcaacatcaaagggctgcgcctctcccataggcacgggattgtgcggtaaacacccgctcggaacccgctcgcttttggtactttatactactgccctcgtccacgcccgcggggcagtccaagatcaagtccagcccatgcgcatctctcccaatgcattgctgaatccactgctgcacagcgaaagtgccgtccatctcgtcaaatgccaattcgccccatttgttccattccgcccgggtggtgcccggacagttgcgaaaattggccaacatgaattttgtcttctttcaaattggtgaaatgaacgcaagaaataaaatcgggggagggggagaaattggcaaaaaatataatgtcaataattttaatatttaaaaacagaacaaatatccctctctctttccctttcttccaagtgatacggtaataatttaaaagaatgaccgaattaaattgcagttcaatttacaaaagttgttttgcattgcaaatactttattttcattatttttgtgcctttcaacttcgatcacttaattacgttaattatgtacaagtgccttttattcgtacacataaaaatcattttcggccaaaaaattggctcagcagtgaagtcgccccgtccgcttctgttgcctctgctcgtttggcaccgctcctcaccagggaacgcacaatggcatcgatgttggagccggcgcccgactttggctgttctaattgggaagaggcgccgtaccccgcgaaattgggaccaaaaacggagggagacgactgatcagaatcaacggaagagccttaaaagagggcaaaaggaatggaaacatggcaaaggtggaaggaaatacccaaaaaagtgcccataagcgactcgatgattgatctcgactgaggccgtgaattgccggcacccaatgggccttaaaaacgctcactctgagaagaaaatggtcatttgtcccttttaccgcctatttggagattgatgaaaaagacctgaagttgggggatgaaagtgtaggaaacgtcctccttctgctcgcccaggaaaaaatagctgacattgttaagagtgtaactgcgcaatttgtactcgcgaaggaccaactgaggaaaaaaggatggaaaaggaaaaataaattgaaatgggacagacggaaaagggaccacctgaagcacatcgaagatgatccgcccgtccatggagacgaatttgttcacccgattgcccatttgtttcgactgcatggcggcgtccctttgtcgacacattgacccgcgaattcgactcaacagacagacggttttgtcaatctgtgacaaaaataaaataaatgaaattggcgaaaggtacgaaccaaaataggaaaatgtattcctttagtacaaaaaattaatcgtgtgttgagaattaatacctttaaatgctttgcccgatccaaaatgtatggaagatcaaagttttggatgttgtaaccggtgagcaaatcgggatcgacgcaaagcacaaacgcggcccatttctacacacatgggaccgatggaaatgaatataaaaattggagaggaaaaaaaacactcgcctcgagcaattccttctcgtcacggcactcgacaatgtcagagccgacgaccgactcacaaccgccaacgacgaaacagttgcggacaaactcctccctttggccctccaccttgaccatgttggcgatttggatgatcgggtcacgcgaagcgtccggaaaagtgcctatttcaaggggaaatttataaaaaatcgcttacttaactcattcacccaatggtcccatgcattcgatgtcaaagctcagcgtacgtaacgcggcgatgtgggaccaattgggttcatctgcggagtgcacgttcaagtcgttgacatagattgtgacctgcacaattggaaatgcaataaaatgggacccatgggttgttcccacctcaatttggcaatttgtgttccgttgtttcgggtcgatgtaagtaaatttccgagcgggacactcggcccaaccgcaaccgacgaggccaaggtcggccatgaaacgcacttcgaagtccaagttggcctcgaaggcctggcagggcctaaagtttgccgaatggcccacttcgtcggcggcaattctctccaacacgtaaagtactcgagaacctattagtatttacaactaaactttaaactcattgaaaatagggcatgcaacttacatgcggtgattatgcggggtgaaagcacaaaaatcttcaaaaacaattgctggcgaagttcggcgtgaaagccgaacaaatttgagccgtataccaactcaatgccggtgaccatcgccgacgcatccttcggaacgccactttgtgcacttatctgaggaaaagttcgaacagtcgaatgatcaccccatttcgctctaaattgaaagagtcaaaacttctgagttgttggttttatccgaatacaggatcgggatcaaaaattggtcagaaatgatgtcacccaaaaacccacggcatgcaacatttttgtcaaataaaagaaaaggctacaacatttttatggttattgtttgtcctgtcaagattgttcagccaagtggaggccgaccacttaaaaaacaaaagtaaatttctgacttcaaacgggcgagaaaaatttattcttgaaacaggcatcgaaaattgatgatttttgggttttctcattgaaattttttaaagaaagcagctttcatcaccgagggaccatggaaaaatgaaaaaaccgaactttcgttaaaaataaagaaaaactactgtcaaaagaaagggcaatttcagcgatttattaactgaatcatatcatcatatatacaggacaatcaatttttcatttttttgcactggtccgtccgatgattcatccatcgcttcttcttttgctagttcgggccgtccgcacggtgcgaagtgacctgccatcggtcgatgtcctcttgcgatcgagtcggtgaatttaccttaattcgtaacattacaaataagtaaataagtgaaaatagtacgggagcaggcgcgagttcagactggtggtggagagcgtagtgcacatcaggtggagtgacgtcggtaaacaacgtcatgtcaatttggatgctggtggagtagactgatttatcggacattgcttaaattccgttaactgaataatgaggaaaacaatggaaattttttgtttataactgtttcagtgaatatgaattgtccttctttattcattacgccaatatgtttttgtgcgctaatttaaaaatatcagttccatgcgcacgcttccgtgtcaaggagctttaagaagccataactttttttggttctagtcggttttacgcgtcccatggcattttacgcgtcccatgacattttacgcgtcccatgacattttacgcgtcccatgacattttacgcgtcccaacaacatattacgcgtcccatcacattttacgcgtcccaacaacattttacgcgtcccatcacattttacgcgtcccatcaaaatttccatccaaattggtttatttacaaattaacattaaaaaataggaatatattttcaaacaggatagttgtgacgcatttcctctaaaatattttgaaatatttttgtgtttgagtggtaacgacgaaatgcgtactggtacaaatatgtttgcaacaattcagggttagtcccatgaaggtgttttaagctttgctttagagccctccaggtcgcttcaattccctgggtgtgtatttgagggttagttggatctacgaagtgtaattgatgatttacaaaacgatggttgtactgctgctgcatgttatttatcccaccatatgctgcccacccatcgctaacgatgctcgtgccgacttcgatgttttcggcaatgataggcagaagtgttgctgctgagcgatcagcaacaggaaagaacctaacactgtttgtgccacgttcaaccataccgaagacccattcgtaagcacgatttaacatccgtcctctattatatttggccctatacatttttgtttcatctatctcgacaaccctacccacccctcccagcttctcattcgtttcaatcctccttgcccatgcttggcataaatctctaagaaaattatagaaatctataatcgtttctttgtgagacacgccagtttctctcatcactgcatccaaagtgcttgctggatgagtggcccagaagtaacacagtctcaggctttggtgtagtgacagatgcatatggttgaaaaaagaaccaaatctgggtgaaaatcggcttgaactttcgctgttttggattgcttttcgacagtgacttcatcgccacttaaaatcaattttttataatttaaattccctattttactgttaagccctccgggttctgggcatatttgacaagtgatgcccggtgctgttgacattcggcacaagtcaacgcatttgctataaggccatagcgagcaagccatttcaatgtcttttcataccctcaaaataacccaagataataaataagttttttgcgcataccggctggcccatcctctccaagatattctctcacaagcgtctcataacttaaatcacccaatgcagctaatgccccgggaggcataacatcaccatcattcggttgcagaatggtaaacctttgccgtgggacacctagtgaattattcagcccatgtccattttgttgataatcatgatgctcgactcggttgttaatccgttgcagaaggctattttgttccggtgaacacaaattaaaatacatccaacaaagtgtgactgggtgatatgcagtaatcctttttaactaaaaatttctgattgttaatcctaagttcagcagaccaaattttccaagaagaaatcgctgattattgacttgcatgttgatcgtaatgcaagaaggtaactacagtaatgaccaatctcttccttgatcaccgtaacactttcgttccgcaacagctcaacaatattcataattccatggcaaagaagacaaccaattgatccatttaggttgacatcatttggtgtgcttaggccattttgtaatcccatgtaaagtgaagggcaggcaccctcagcagttaatctgccacgactaaattcaatcaggcatgcaggttgttcagctgggcctgggcgacatgtttttgtccaggcgagatgccgatggaatgtcgagcaggtgattgcgcactcctcccatttgtgagaaaagccatcggcaggactgttagttgcttattcgcat

SEQ ID NO: 2873 - DNA, 1787 bp, Heterodera glycines
  unsure (1)..(1787): unsure at all n locations
cgattgtgtctcagatttgttgtaaaaatttttcctgactcaaaaatttgcggcaaattacggatcaaaacaaaataaatgctcagcaattactactggttgtttttcctataaatttaaatataaattgataaggatttaggaatagtcgctccgcattcagtatccattgcattgcaggaaatgaccggacttcccttttcaatttctattgactcatcaaaccataaaaccaaactttttccattggtggtgcgttatttcaagcaacaaagttgaatttccgtcaaacttattgacttggaggcattaagtggagagacttcggccgaagtttgattcatatttttttgtttattggatcattttttattttcatacagatttatgactggataattaaaattttggaacggcataaattagacattgcgctacttgtggcattttgtggcgacaatgtgaacgcaaactttgggggcgcagaacttgctggccagcggaatatttacacaaaattgaaagcgcaccggaacaacctcattcctgtggggtgcccagcacacattttacaaaattcagcgaagaagggcgccgacaatttgcctatcaatattgaatcgatcgttttcaaattggcatcggagttccggaattcgacaaagagagtggaaagacttaaagaaattttggcgtgcccgcatgggaaattccggcagccatggcgcatttctgccggtggctcaaagtcgcagaagaagagctgaataggggaggcgaactggcaagatttgttgcaacagcgcatctccgtctggtaggttgaattgtcaatcctttggagaaaaataggcttaggttcaaatccacccggcagaagacgcgaacggcagattagcaagattgctgatgaatcttttgctaaagagaagagggaagggcccaatcatcctgcgcgagtccatccatgacaagtacgatgagtgcatgaggaccggaaacatagaagctttcatcgtggagatcaacgttgaacttaacaacttggagaagccgggttgcagttgctaacgcggtcgaattgtgtttttatttaagagtccaaaagcttacttttagcatattttttgcgtttttcataactatgttccttaaacgaaattaaatcgaaatgcacccaataagattggcttttcaagttttgaaataagtaattttttattaactcaaatactcagccaaaaaaagtgctaaaaatttatgaaacaattgcgttctttttgatgaatttgatgcaaaagaggactaatatcaattctggtcctattaacatccccttttatagatttaacacaaaatacaaactgggcaaaaaattcattccctttgctgggagggtaacaaaattgtggaatcaactcgataaagaactaataaaaacaaattctttaaatcaatttaaaataaaacttaaagttcactagggtaatatgtaagaccgggaaagctagaatgtaacaaatttctaagtgatttggtatttcgacctcatttgactttgacctcaatttattattatttattttcacatatttttgtctttttttaattcctgtgatcatccatatattttgtcacttactctacgacacatttaccggaatagtcgtcagagtaagtggttttcgcccttctgatgactnttttattttttatgaataaantaataaatattatcanaataaataattntcgcatttttttccatcatnaaaaactcattacca

SEQ ID NO: 2874 - DNA, 5534 bp, Heterodera glycines
  unsure (1)..(5534): unsure at all n locations
gaaacatataaatttgatggaaatacaataaatgctgtggatacaattagggatttaggagtaaacattgataacaaattacaattttccgatcatattaaccaaataacaaggaatgcgtatttacatatgcgttccttgtttagaataattaaatccaaatcgtctaagatttggattacgttatataaaacttatattaggcctttattggaatacgctccagaggtttggaatccgtctcttcaaaaaaatatttaaaaaatcgaaaagtgtcaaaaatatttcaccaaaagagtattttctaaatgtagccttccgccaattccataccaaaatcgattagaatacctgcaactgccaacacttgagaaaaggcgaaagctgtttgatctgttcatggcgcataaaattgtttatggccgaacagatctgaaactattttctatttttaatccatcagcacgctttaacatccccttttttatagatttaacacaaaatacaaactgggcaaaaaattcattccctttgctgggagggtaacaaaattgtggaatcaactcgataaagaactaataaaaacaaattctttaaatcaatttaaaataaaacttaaagttcactagggtaatatgtaagaccgggaaagctagaatgtaacaaatttctaagtgatttggtatttcgacctcatttgactttgacctcaatttattattatttattttcacatatttttgtctttttttaattcctgtgatcatccatatattttgtcacttactctacgacacatttaccggaatagtcgtcagagtaagtggttttcgcccttctgatgacttttttattttttatgaataaataaataaatattatcaaaataaaataattttcgcatttttttctcatcataaaaaactcattaccaattcattcattttctgttcgtcaattggcaccaaccgccaccaccgaccatcaccaaaaatgaatcatccactggggggcttttatcgttaaaagcgatcggtttacccccggctaatttgtgaatggaattttctgttttgctgggcttttctccccccccccccccgggggggggggcggggaattggacaattttacgtgacgtgtcccatcccatccctgtgggctgtgtgcggtacggcggtgcgctgcccgcccattggccgcgccgcttctgtccgcagggaccgcccatttttggcacggcccaccagcgcatttaagcgctgctgggccagcgaaaacagtcactttcaaaaattttttccagctcacaattaaataaaattcaattaaaatagtgatagggaataggaaaagacaaaaagaaaaaacattttttaatgggacagcgattagaaaaagttaaatgattttttttttggaaattatttcaattttggactgaaaaatttttatgaaatttcatttttggttaattcctttcatttaatattattttttgttttaggaatcatttatttttgctcaatttctaatcccgacaaaatcaccaaagcactcatctcaatttaacatgaacaagtggattgcccttgggtaagtgttaattgggggaacaaattcataattaaatgaggcaatttaaatcccaaataaattttgatcagtgatcacaaaaatgatttcaaatgttttcaattggtccaataaaccaaaataaactaattaattaaacgtttttaaacgggaaaccctgatataatttgactatctgctctcattttagtgtgttgatcgccataatcagcgcgctggacagcgctgttctgcgacaacggcgcattgttaaggcgggaaatgcaccgaaatcggagcaaaaggaaaagccgggtaaatggaataaaataaaataaattaataaattaacaatttttttcattttccaattttaatttaaggagaagccaacttgcgcaagaaacggcaaagtggaggacagggagatgaagcggaaaaaatgccgtacaaattcgacctgacttgccgattttattcttccaacccctttagaatggaaaatgacgaagtgccgccgagggacacatttgcaagcgaagctgaatatgaggaggcgcggaggctggccgtgttgcgcgttcgggcggatgaagaaaaggcacgcatcaagaagccaagcgaggagtcaagcttgtttcaaaatgatgtgaaatattttcattgtctcgacgatgaaacttattacacaaaggaactcgatccacaggttttaaatgcaaaggaataaattaagactccaaaaattatttttttaagaaaattatggcccttcatcacgcaatattggtcattaaaaaggaccgggcttccgcagcaggcgtttaccgaatgaccgatgtattcgttggagacgacccgattggcgtgcccgcatgggaaattccggcagccatggcgcatttctgccggtggctcaaagtcgcagaagaagagctgaataggggaggcgaactggcaagatttgttgcaacagcgcatctccgtctggtaggttgaattgtcaatcctttggagaaaaataggcttaggttcaaatccacccggcagaagacgcgaacggcagattagcaagattgctgatgaatcttttgctaaagagaagagggaagggcccaatcatcctgcgcgagtccatccatgacaagtacgatgagtgcatgaggaccggaaacatagaagctttcatcgtggagatcaacgttgaacttaacaacttggagaagccgggttgcagttgctaacgcggtcgaattgtgtttttatttaagagtccaaaagcttacttttagcatattttttgcgtttttcataactatgttccttaaacgaaattaaatcgaaatgcacccaataagattggcttttcaagttttgaaataagtaattttttattaactcaaatactcagccaaaaaaagtgctaaaaatttatgaaacaatttcgttctttttgatgaatttgatgcaaaagaggactaatattaattctggtcctattttttcacagcagttaaatttaagttttttcctattttggtggttttcggtgcttaaaaaaatcaacattatattagtagattccgattttttaataattaaaaaaaaattttccagtgatggtgggtgtgcttctgcaattcttgctcacaaaggaaggtccccaggtgtccgtgggatttccaaatgaaatttggtgggtggatagagcacccatgggttcttaagaaaagtgtttttattttctgcgaaatgagtctgagtgccgagttatgacgtgccaaacttttttttattgcaataaattaaataaacatttgcactgttttgtgttgttcggtggtgcggaggttgtgctcctgccttccctttttgccctcgcaggttcgaatccctcatatgttaatttattttccccgttttatttttgattttatgcaaattaatggccattgaaatcaattccatcgggtcaaaaatttttattcctcctccaagtcattcctaaatatgtccgtaaatccccaaaatattattgtccttttaaaaaaatatttttccaaatataatgatgaaactccaataaattctgtcgaaatcaatatttcgaaaaattttgccgcaactattgaaaaatgcattaaatttgatgaagaaatgcttttatcggaggatttggtgattgatgaggaagcaaattttgatgaattagatgacgaaagtgatgaattcgattatgattccgcagaagaatttgatggaaatcaaagtcccaacggttcaggtccattcgtgtattgtagatttgttttctgacttaatacataggtggatggcgtttacaattttaatcatgaacattactgaaaatttttcaaaaaaaaaatttttttttttgtttttttggacggtattaaaagaatttttttttttgtctccggtcggaaacccttttttttttgtcaggtgtgaatttatgaattaatttccttccaaaaaaaaacctttcgtcgtcgctcaatttgttccgggtcctcttccgccggcgtgggctcatcctcctcctcgtctttgtcaaagtccgaatccacctcgtcctctggcgcctcctcgtccgacgagtgtggtggagactcgaaatcctcatcatgctccaactataacggtgtttgtatattattcaattaaggatatcggtggtatttcataaaaatgggtgacagatccataccaacacccctgaaaaccccctgtatcaaacccatatttaggggtgcacatcattcccaacccccccccccccccgaaaaaatttttttcgggggggatgacgacgtgggggaaacgaatatgggtaatagtaccgatggtatcacaccttttttgaaatttttttaaaaaatttcaaaagtcataaaaatatttattataaggttttcggggtcgctgagcacgaatatggcatccatttcacccaattccgaacccctgatccgaattcgaacaaaaatcgaaaactcaaatttttcgaaattcgcatttatgtcttgcccatacccaaaatgttgaatccatgtggaaaaaattgaagaggaatttcaaacagcaatttgggaacaagactgaaacttacgacacctacttcccagaatttatttggcgtcagcgtttcggtgatcgtgaaaatgttttttataatttttggctgcatgtctctgagttttatccatgcgaacattgaatttttttttgtttttttttcttttttcgtgcgtttggagcgattttgttggataaatgtgaatttcgaaaaatttgagttttcgatttttgttcgaattcggatcaggggttcggaattgggtgaaatggatgccatattcgtgctcagcgaccccgaaaaccttataataaatatttttgacttttgaaattttttaaaaaaatttcaaaaaaggtgtgataccatcggtactattaccaattaaactttagattttttgttcgaattcgggtcctggtttcgaaatagttcgaaatgaatgccacattcgtgatcagcgaccccgaaaatcccagaaaaataaaaatatttttttatgtggcgtaaagtgaaaaagtaccctttttcttacatattttcattttttttaaatattttgaggatttttttctacatatttatgtacatatttgaccaatttttgtacatatttttgacatccctagtcatgttcaaagaataaaaaattggtttgaaaaaaagacacaaattaggtaagtttcaaaaaagcataaatttctcaatttcaacaacaacaaaatcataacttataagtctgtaacaaaaacaagaaaatattataaaatcaaaaacaacaacaaaaaaaatatttaatccaaatgaattgtcgtcnaatcagccgttcgcggtgtgtttcaaccattggcgaactgcc

SEQ ID NO: 2875 - DNA, 1298 bp, Heterodera glycines
tgtatttttcgtttttattacttttttcttaaggatattttccaaaaaatgtcaagatagtgaaaaaatagtgacaaaactccaaaatagtgatttttaactattttagtgacgaagatgccaaaatagtgatttctagtgaccgatagttacatcagaatcgaaaaattttaatacagaaatgcgttttttgagctcctttcttcaaaacaattgagcaaaaaaaagttttttcactaaaagttgcttccctaatgattacagaattgtggggttgactgtggccattttggcgctggtcgtcctcctcctcatccttttggcgagttattaatttaatatactgatccctaatgaatttgaatagtatttgttcgcgaaattgcgcagttttgtccgcctctaatttaaatcggtagctgagccaatgtaaataaatttataatagcggaaaaacaaaatggattaaactaatattaggcgaaggagtttctaaaacatttatcttatgtttaaaggattgtattttgggtatagtactaggaataaaaacattgaaatctactatgtatcagtagagtcaggccttttcagcttttcatggacgctaatatacatttaaaaactccacaattgtatgggaatctgctagatgtattgcttttttgagccgtaaatataattaaataaaaattgagtgaattttttaaatgtctcacaatgatcaaaaagcaatttttcgaaaaatattattgttaaatcttcatacatttgttgcatgcatacttttttaatggcaagaatgaaggcccttaattaaacattcataatttaaatcggtagctgagccaatgtaaataaatttataatagcggaaaaacaaaatggattaaactaatattaggcgaaggagtttctaaaacatttatcttatgtttaaaggattgtattttgggtatagtactaggaataaaaacattgaaatctaccatgtatcagtagagtcaggccttttcagcttttcatggacgctaatatacatttaaaaactccacaattgtatgggaatctgctagatgtattgcttttttgagccgtaaatataattaaataaaaattgagtgaattttttaaatgtctcacaatgatcaaaaagcaatttttcgaaaaatattattgttaaatcttcatacatttgttgcgtgcgatacttttttaatggcaagaatgaaggcccttaattaaacattcataatttaaatcggtaggtgagcccaatgtaaataaatttataatag

SEQ ID NO: 2876 - DNA, 5435 bp, Heterodera glycines
ctttctctatccatcccacgcaatttcgctgtgtgatactttttccatcccataattgtgtactgtataattgatgttcttgtatgtacaaccattgaggtttgtattaactttgcgagtgatatgataaacaaattgagacggagaattggttggtgatttttttgagtgaagggggtgtgggaattttagtagaacaaaaattttatcacacaaaaaattaattaatttgggcgagatacactggcccaatcgaaaattttcaaagattattgtacattgtttctgttttacagttacctaagacaaaaatggatgggagaggacaaatggggtgaaaaaagcactcccacaaatcaaacccccccattagttttggttcgactttttattcgagtccggggttcggattggacaaaatagaagtgagaattatttcagacttcgaaatcacaaaaaatatattttctgattttaagtgttgagttaatcatttttgaaaaatcagattttcccaggaaaaaattttggtgcattttaggaacagtacgattcaataccaatacaataatgaaagttgtttatattattgtagtttgaaatatacaagtgaatgaaatgacaacagcgagatgaatacatgacaatacatacaaatacagatcacaaatacgatcacgaatacacagaagatcagcttcgcgtcattctctcgtccatctcccgcaggaatgtcgtcagtgcgcgttcgtcaatgttgagcttcgccgccttgttttgagcatagctaagcgggggagggggatgattatttagacacacaaactcaaacaaaaaacccaccgcaaaatcacgtagtatatgtagaggtattggtccagggtctgcacactttgggcccgatgctgacggaggttgcgcgccaacgtgaggatgttgagccgatgtccacgctgcagagtattgtaggcaatgtgcagcgccaccagtgttccagtccgtccgattcctgaaaatgggaaattttttgcatttttattttccaacttggcacaaactctcccgctgaacagtggatcaccgagcgccgaaactgctgcacttggaacagcaaacgaagaggcgccaagtcgttctggggcacaccgcggtcggcccaccggcgccagtggaagtgatggacgcgcatggagccgttgggaaagagcaccgccagctttgtcctgtagaggtccggctccagcgcagtctcttcgatgaagtgcacggtgatcgtcttgttggcgaagtgcaattgctgcaaggggaaaagaggggggagggaatgattagaaaattaagggcaaaaaatggaaaaacccacctttttgtccggtgtcggccagtactggtggcacttggtcttgttttgttcgacggtgtcgcagagcatcacaatgctttcgatgttctcctgcacgatcattgtccagaagtcggcgcaggtcgtctcgagcgggccttgtgtgcagatgaagcgctgttcgccaagggccgtgatccagttggcgtggatgtatcgtccgttgtcgagtcgcacgcggccctgctcggcgcagatgacgtcccggtagcggttgcagtccatgtggctgtaaagaaattacctattttatttgtgtttgaaaatcgaaacagccaaactgaccgtgtgaattccggcgaagtctccggccgtggcatggcgttcagctccgtgtattcgttgaccagctccttcacgttgcgtcgcgttgtctcgttgacgaagattttcagggctgagcagaagtcgcgcgtgtcctcccagcctcggactgttggttgctccggcggctctcgtggaccttgatatgcagactgaacgccgcgctgggtgtgctgctgctgacgtgaacgtgaggggcggcccggtccgtcctgtcggcgtttcccactgcggccacttctcccggacatcgtgatgactgctgtaagaaaaacggagattaaaaaattatgaatggagtgaaaacacctcaaattgaggttgacggcgacgacgatatagagagaattataatagttaattaattagggcaaggcaatgaaagtttttgcaaaattcaacgccttttatagaggtgaattcacttaaagaaattcattccaaaaaaggcaatataaaagcaacaaatctccgcaaagtcctcactaatttcaaccttctgcctatttggttgagttcatcactttcaccactgttctccaatacctattctatttcaacgtcaacacccaccgcatcttcgcccgctgcttctgtgcgacgacgacccaattttgtgaggcgccccccccaccctttcaaattttctgtttttcatttttaattgttttttttcagattgtgccagacgacaacagcagcacatcaccgcacttcagcagaggaggaggcagctcatcatcatcaacaacaacaccaaacaatgagcgacaagaagaaggaggagccgaagaaggaggagccgaagaaggaggagccgaagaaggaggaggagaagaaagaagagccgaagaaagaggagaagaaggacgagaagggcggcaaggacaaggaggagaagcggcgcagcaagaagagcgggaaatcatcgaagaagaaggacaagaagaagaaggacgggaagaaaagccgaaaggatcgcaaaaaggaggagaagccgagcacgggagacgccgctgtcgcgacgacgcctgccgctgccgcgacgacgcctgccactgccgaagcggcgccgaccaaggagcaaccgccagcagccgtcgtggaagccgcaacgccaccagccgcagccgagccagcagctgacgcagccaaggaggagccgaagagcgcggagacgacgaccgaccaaccgcccggcgacgctcctgctgctgatggtgccgcggagcccaaagaagaacagccgagcgcggagacgaagactgaccaaccgcccgtcgacgctcctgctgctgatggtgccgcggagcccaaagaagaacaaccgagcgcggagacgactacggacccaccgaccggagacgctgctgctgctgatggcgccgcggagcccaaagaagaacagccggagacggacaaacccgctgcggacgagtgatcgatgatggtattggactgaccgcgccttcggcctcaattcgctccctcttttccccttccttcacttgtggccatgcccaatttcattgttgtacaaatgtgtccccctttctctatccatcccacgcaatttcgctgtgtgataattattccatcccataattgtgtactgtataattgatgttcttgtatgtacaaccattgaggtttgtattaactttgcgagtgatatgataaacaaattgagacggagaattggttggtgatttttttgagtgaaggggtgtgggaatttttgtagaacaaaaattttatcacaaaaaattaattaatttgggcgagatacactggcccaatcgaaaattttcaaagattattgtacattgtttctgttttacagttacctaagacaaaaatggatgggagaggacaaatggggtgaaaaagcactcccacaaatcaaacccccccattagttttggttcgactttttattcgagtccggggttcggattggacaaaatagaagtgagaattgtttcagacttcgaaatcacaaaaaatatattttctgattttaaatgttgagttaatcatttttgaaaaatcagattttcccaggaaaaaattttggtgcattttaggaacagtacgattcaataccaatacaataatgaagttgtttatattagtttgaaatatacaagtgaatgaaatgacaacagcgagatgaatacatgacaatacatacaaatacagatcacaaatacgatcacgaatacacagaagatcagcttcgcgtcattctctcgtccatctcccgcaggaatgtcgtcagtgcgcgttcgtcaatgttgagcttcgccgccttgttttgagcatagctaaacgggggaggggatgattatttagacacacaaactcaaacaaaaaacccaccgcaaaatcacgtagtatatgtagaggtattggtccagggtctgcacactttgggcccgatgctgacggaggttgcgcgccaacgcgaggatgttgagccgatgtccacgctgcagagtatcgtaggcaatgtgcagcgccaccagtgttccagtccgtccgattcctgaaaatgggaaatttttgcatttttattttccaacttggcacaaactcacccgctgaacagtggaccaccgagcgccgaaactgctgcacgtggaacagcaaacgaagaggcgccaagtcgttctggggcacaccgcggtcgggccaccggcgccagtggaagtgatggacgcgcatggagccgttgggaaagagcaccgccagctttgtcctgtagaggtccggctccagcgcagtctcttcgatgaagtgcacggtgatcgtcttgttggcgaagtgcaattgctgcaaggggaaaagaggggggagggaatgattagaaaattaagggcaaaaaatggaaaaacccacctttttgtccggtgtcggccagtactggtggcacttggtcttgttttgttcgatggtgtcgcagagcatcacaatgctttcgatgttctcctgcacgatcattgtccagaagtcgtcgcaggtcgtctcgagcggtccttgagtgcagatgaagcggttctcgccgaacgttgtgatccagttggcgtggatgtatcgtccggtgtggagtcgcacacgattgatttccgtgcagatcacatccctgtagcggttgcactccacgttcctgaaaaattgaaactgggaagattagacatgtatacaaaatgaaaacgacgccaaaacccaccgtgtaaactcaggcgatggcaccggctgcggcgctgcgttgagttcggtgaattcgctgaccaggtcctgcacggtgcgcggcgatgtgatccgcgtttgctgtgtgcgttgtggttgaaatgcgctgcagagcgttgaattctggaaaacggaaaaaaaatttaatgatgtgtatggaagggacgaaaagcgagaaaatgacgaatatgacgaaggcgaacctcggcaattacgcgcgcgagttgatctagtcgagatgataggagaaaatataaaattattaacccctcccgcccttttatattcaaatttgactctcgaaatggctaatgaagctatattttaaaattttaaagctgaaaaatgtactatttaacagtgaatttcgtctttttttttcatttttaaaattttgcttacgccaagaaatcgatatttttaaccaaactccccttatcgcaccaacaaatacaaa

SEQ ID NO: 2877 - DNA, 969 bp, Heterodera glycines
ccaactcatccatgcccaactcatccatagacccaactcatccatagatccaactcatccatacccaactcatccatagacccaactcatccatacccaactcatccatacccaactcatccatacccaactcatccatagacccaactcatccatgcccaactcatccatagacccaactcatccatagacccaactcatccatacccaactcatccatagacccaactcatccatagatccaactcatccatacccaactcatccatagacccaactcatccatacccaactcatccatagacccaactcatccatacccaactcatccatacccaactcatccatgcccaactcatccatagacccaactcatccatacccaactcatccatgcccaactcatccatagacccaactcatccatacccaactcatccatgcccaactcatccatagacccaactcatccatacccaactcatccatagatccaactcatccatacccaactcatccatagacccaactcatccatacccaactcatccatagacccaactcatccatgcccaactcatccatagacccaactcatccatacccaactcatccatgcccaactcatccatagacccaactcatccatacccaactcatccatgcccaactcatccatagacccaactcatccatacccaactcatccatagatccaactcatccatacccaactcatccatagacccaactcatccatagacccaactcatccatacccaactcatccatacccaactcatccatagatccaactcatccatacccaactcatccatagacccaactcatccatgcccaactcatccatagacccaactcatccatacccaactcatccatacccaactcatccatagatccaactcatccatacacaactcatccatagatccaactcatccatgt

SEQ ID NO: 2878 - DNA, 5983 bp, Heterodera glycines
  unsure (1)..(5983): unsure at all n locations
atttttgagatatttcgcgaggagggagacgaagatgacgaacagccgaagaagacgacaaaaaccaaattgaagcttcggaaggagctgatcaaaacaatgtccattgaagaaggatttgcacaaagaatttccaatgacgaagcaaattaaattttgcggaaaatgggaaatccgaaataaattcaatcaaaatgacaatgattttcatatgtaaatattttttgaattttagcattgattgcatattttagaatctccttttttgtatttgaggaaggcccatcagttttgctttatttttttataactaaaggtgaataaaatatcgaaaattttgtaagaaccaagcaaaagaaattgagtttatcctttaggacaaaagaaggaatgaacgaacgacaaaattcgaattagacaatgagatatattagaaggaggattacaatgtaacgggacatatcttaaatttagtaaaaaataggggagtgggagcggaattacactccgaaaatggcaattcttgcgcttgagaattcctccatttcacctgccctgtcctttcattattagggcatccaaaaatatggatataaaatcgcgaaatatggccataaaatatggaccaaaaatcgcaaaatatggacataaaatggcaaaattttcaaaatatggacataaatttttcaaaattgagtttaaaatttcttcaaatttactagttgaccttgcatttatgttttcaaaattccttcaaattcgctaaattaaagtaaaactttcaaaaatggctaaatatggtattaaaaatcattttagaagcaaaaaggtaatactgccgatcaatttcgaatccctgacccgaactcgaacaaaaagtcgaaacttcaattttagaatttcgtgtttttcgcctacaaatggtttaaatagtcttttattgcagtattttccgtatttaaaccattttaggcaaaaaatgtgaaattcgaaaatttgaggtttcgattttttgtttgaattcttgtctgggaatcggaaaaggtcgaaatggatgtcatattcgtgatcagcgaccccgaaaaccttagaataaatgttttacgactgtataaaatttgaaaaaaaaatttcaaaaaggtgtggtaccatcggcagtattaccgaaaaaatatgataaatctaaaacttactcatttttagcagaaaatcaactagaaagcgaaactttactttttttttaccttatttttgacctaaatttaagatttttaaggaaattaaaatttattcatattttcgaaattttattaaaaaatgattttttcggaaattttccggtttttcggtgtcaaaaagccaatttaacggttggaggccgttctaatagagggtttttggaaaaatgccaaaatatggaaatattgacataaatcgcgaaatatggaaaaatatggatatagaaatccgtcctagaagcttcaaaccaagccaaaaacatgtttttcgtacgtttcaggccccccacagtccaggaaaaaatatggatttccatataattggacgccctattcattatttacttaacacaccgagtcaaaaaacgagacatgtgtcaataaagagagagtgctagagaaaaacattatctttttttctctaattttttgtcttcttttggcgtactatctaatatttttgttattaggaaaaacaacattcacttcgaacagcataacttttttttccccaggcagaatttcttttaattttgcatatcgatagagaaaaatataatacattcagtaatacagccattttttggcttatacattatttcatgagttataaggaaaacaatttttcgaaggcccatatcttttttctaattcatcaaatcgcttagcttttgcttagaaaaagcttctccccatcaagagctttcgaatgataccaagatttaccaatttggttggcaaaaagcttcaaaaataattcccaaaaatcgttgttttttaattttttggacaaaaataaataaaaatattcatgttgcacaacggactcgaacctccgccctttgttcctttactatcttacaaaaaccactttgccacacacacatttactctttgaactgggagcccaaaattgactcggtgtgttaaggtatgtaagaataaatggcaaacaaaaccccgccttttcaatgcacacgttttacagaacaaaatggaaatgtacaaaagaatggttaaaaaggcactttggttgagtttaaagtaatacaggcaaaataaatagaatactatattaacactttcatcggcacgtgcccatcggaattaaatttcaggaataaacccatcaaatcaccgaaacaaattcaaaaatctatagcccattcgttttcctgaacaaaatggtcaacaacctccttcatggaaaaatttgggattagttggtcggcagtgagacttaaataaattggttcttaggacaagtaattaaatgattgcgaaacttacggaacccgggtgacggggtcgaaatgtccgactcggtgcaaatgggtgagaatgtcctgtcggtcgtaagtgatcccggaaggagtgattacagggtctttgagcagctcgaaactgattttgccacacaaatagtccgggaggtcgcgcttccgtctacgatcgtcaacctaaaattagcgtcacaaacggttttggagtcataaaaaatgtttcctagggttttgattgtcgctgaatatgaaaactgacatccactttgatcaattcgtacccaggacccgaattcaaacaaaagttgaaaatacaagttttttgaaattagtatttgttcgaacttttcgaatacggaaacaaagaaaaccagcaaccctacaataaaagatcaattaaaccatttttaaacgaaaaattcgaaattcgggaattgaatttttgttcgaattcgggtcctgggtatggaatcagtcgaaatggatgtcagattcgctttgactcgaaaagagaggagggacaccaccgaaattattaccaaaatttggggaggcatcaatggacgaaagacaatttttttgtgcttaaaatgtaattttcatggaaaatgcttcgggagaaaaacctattttaacaggtttcttgtaaaaattttaaatagttataggaattagtcgtccgcggtgccgccgccgacagtgacgtcgggtgaagtgaactttttcaaatttgaatgaaacctgctaaaattggtgtattgtaaaatttaaaaaatgcatttattttgcaaaataccggcaagaataacctttctttttacccaaccccaaataaaaggtaccgattttcaattctccctttttttacctgagcaaagagattgttcagctgttttttgaaggtgtccccttgtgtcttcagttcttccgccttttcttcaacgtcattttcctttttgtcctccaattggttcacttttttggcgatgtcgtcgtcaattaattggtttaagtaactttgaagttcaatctcctgagttatgcgtttgtcttcttcttgacggaacctaaaaacaaagttcaaatgaattactttaaaataatgaaaaaactcaattttctctgcgcgctaaccgtaacaattgggttatttcgtcgccatatgtttgcttaagattgagaacgccttcatgagcccgcgacaacactttgatagcctaaaaatgaatggaacgtaagcattgaatttccatacaatttgactatttataaaattatgtaacaatttgttcccaattttcacacctcatcaaactgtccctggtgtacgtacaccttccccaggtagtaattcgccttcacattctttctgtccatgtaaagcgcttttctgcagtcgtccgctgcggagtcccattttttaagatttaaattgcaaagtgctctatttgtaaagtaagtcggatcattcgggttctttataatagcgcgggtgtagtgagaaagggcctccttaacaaacaaacaaaaacaattcgcttttattttccaaaaaataactatttacctaacccgtatttatttaagagctgggaatacctcatattttcctgcttggtaataacgatttcctcgttctttgtgttcggaagcagataattgcggtactgaagacatacagatttaaaaaataaattgccgagatcaaaattcatcaataaattattgcaattgttgagaatattgtttcgtatttttttaggtaattatttttaggggtaatctgagtcgcttattgtgagctctagggatttattttcaagctctaaaaacccctcaaaaacactaaaaatggaaaataggttttagaaaatgacaataagctattcaaaacaaaaaaaatttagcccaaattagtattgagataaataattttaaatcaaaaattcttatcgaaacaataaaaaattggagatgaattgttatgttcaatggtgaacacaacgaagaataaaaatagtttatttgtcggaggcaaaagaataaataataaaattggtgtgtcggtggatgaagaataaatgaataataaaatgatgtgttgaatgagtggaagaagaagcaattgagtgacaaagtgatgggtatttatggacgatgctgagagatgagtattgacacgaaattgagtacagtaaatggcgtacatttgaatattgagtgatatacacaacacctccccctttaagttggaatgtaatgagaaaaaaaaaatgggttggtgagtgaatcaatcaatttgtgtaatcatatcgtgcttttgatgtgtccatgttgagcagttttggtggacggcggttgcgattcgaccgtctgacttcgttctgattgtgctcggctgggaccggttgctcttcaggttgttcgtccgcgaaacgcacgcgacgttgacgctgaggactgttcggttctgtcgcgggttcttggtgaacaatttgaagatgttgctgctgatgatgtgaatcttgagactgttggggaattgggaaaaagtgacgcatttgattggtatgtctacgcacaacggcgtttaagattggaacatgaactttccaaaccacacctgcgccttcaacaactttaccctgcaaccacatgcttttgttgtaccgatagttgagtatcagcacgttgtctccaatcgcgaaagttcgacggtgaacgtcgttttggcgattgcactgctttggcatgttgttgttgtgtttggtgttgtttgctgggtgtgaaaagctgttgagagtggtggcaatgggacgttgaagtgccgcttcgaacgccttgatccatggaagaccaaacaaattcattgccccttttggtgcgacatgacattctaattgaagtgtgactccttgataagtgactgagcaaatgaaatacccggagatttcgaaaaagtgccccgaatatgatttggcttttgaaatgccctttttgagtttggggctgcctaactgttcccataatgcttgctgaataacggccaaacgtgatccagaatcggccatcagtgatgctttgttgccattgagttgacaatcgaccatgatccaatccgaaatgtcgtcttcgatgttgaaaatggacattgttgcatggttgcggtgtgaattggacttggatgatggcgctggcaggcggcattttgattgatggtggccacgacgattgcagtttgagcagatcggtgcctttggacagtcgctgatccagtgcatttggttgcagtaacggcatggcgacggaggctgctgcggtttgcgctgaaatgngatgatcgttgattgttgctggtggtggtcgtcgtcttgnacgagctttgcgacaccctccgcttttgttgttgatgatcccttaattttttggggttttagagtgattgaatttggcacatgagtt

SEQ ID NO: 2879 - DNA, 5263 bp, Heterodera glycines
cttaatttgggaacacagaaatttgcatttgttcaaatgaacacgcaggccccagtcttggagacgggaaaagaatttattaagaagcgaatggtgttcctccagtgttggtgtggccacaatgaagtcgtccaagtagcaaaaaactccgctgagtccggcggtgagctcatccataagcttttaaaaaatgctgggagcacttttgacaccaaatggcaagcgttggtactgaaaaaggccccggtgtgtgtttattcccactaactctttcgactcctcgtccaacgcaatttgcaaataggcgtctcggaagtcgatttggctgaatactgttgagtcttccaacgcagcgaaaatgtcatcgatgcgcgggagtgggtggcgattcagttccaaacaatcgttgaggccagttgcaaagtcaatgcacacacgcacatcgccgttcttctttcgaactgcaacgatcggcgctgcccacttgctgtaatcgacttgtttgatggcaccgcaagcgacgagccgatcaagttcggcgtcaactgctgatttggccgcatgtgggaccggtcgaggacggcagaagacgggttgcactccggacttgaggtggaggtgcgcacacattttgttgcaaaggcctaagcttggggagaaaactttggaaaagaaatacccagagatttcgaaaaagtgccccgaatatgatttggcttttgaaattccctttttagtttggggctgcctaactgttcccataatgattgctgaatgacggccaaacgtgatccagagttggccatcagtgatgctttgctgccattgagttgacaatccaccatgatccaatccgaaatgtcgtctccgatgttgaagacagacattgtggcatggttgcggtgtgaattggacttggatgagggcgatggcagacggcattttgaatgatggtggccacgacgattgcagtttgagcagatcggtgcctttggacagtcgctgacccagtgcatttgattgcagaaacggcatggcgacggtggttgttgcggtttgcgctgaaattgggatgatcgttcattgttgctgatggtggtcgtcgcctttgacgagctttgcgacaaattccgctttcgcggttgttgatcccttaattttggggttttattgtgattgaattggccacatgagttgaatgtgccaatgagttggaagtgttgcgaagagagagaaacgcgcggcactcttctgtgagcttctcgaatgagattgcttccggcggtgtcttctttttcgcttcctccaaaagtcgcaaacaacgctcacggagttctcgatcagtgtccgaaagtcccgtgaggaagatcagtgctttgatttcgtctttggtcagatccatttgtgatcgctcgcacattgcgttgacctggcttgcgaaatctaatggggattgtgaaattgattttgtgagctgaaaacattcaaatcgacgggtgaaaatggattttgtttcaccaaacatagccttgagcttgttgatcgtctgcgccagtgtgaaatcagtgggcttgcttggaagcacactttcggcatagcggttgtactcctccgatccgagcttgccgagcaggagccgaacttgcatctgatcggggaggtccttcccgtcaacttggatgaaaggcccataacggtcgagccaattttgaaatgttgaatccatttctggattgtatgaaaattcaccaagttgggaattaatggtggaataaattgtcgattgattgggaacattggaatttggttgggtattttgaagcaaattttgaaatgcttgagtttgttggtcgactaattgctttaggatttgagcaaagtcaacggccatttttgtcagaaattgaattcaattggagcaatgatttgatgagtagtgaatttgaatggtggtaagagattgaaatgactttgcttggtgtcggccagcaagtgctgcagtggtggtcaggcacagaaaaatgagtgggaaatcaataaacgacctttggtgatgggaagatgcacaaatgcgctgagtgtagcggtcgcaatgacttacactttcacaaatgtgtctttccttaaaacagtgcactcagaggctttttacggcgtaagtgttgcaaaaaggcttctcggcttgcttggcgttcagcgggctatgattttgccttgacgtttcaagccgatgtgttacggggtgggcaaaggtcgaaattgatggaaaatgagtgaaataggtgaagtgccgaccgatgcgagctgctgacaaccaacttcgcaaaaaccaaaatgaatgatgagagaataaaataaataaagaatttgagatgctccaatcgaattgttgacaatttagccaaagttgatttgcgccaaatgctaggcgcaaaaagatgatgaaacaaaaataaatcacttcgctgactgcgccaaaaatgttatgttcaatggtgaacacaacgaagaataaaaatagtttatttgtcggaggcaaaagaataaataataaaattggtgtgtcggtggatgaagaataaatgaataataaaatgatgtgttgaatgagtggaagaagaaacaaatgagtgacaaagtgatgggtatttatggacgatgctgagagatgagtattgacacgaaattgagtacagtaaatggcgtacatttgaatattgagtgatatacacaacattaatcattgatataaatacaattttttattaaacagatggaaaaattttttaatcagaaacgataaattaaataaaagcagaaaaaagatcaaaccaagatgcaagtgccgagggcagaaagaaatatgccacaccacgaaacacgattttaaagtccacaaatttttataaacaaatgaaaatcataaataattttaaaaaatcataaccatattttaaatttaacagaataattaaatataaatttagcgttttaaattgaataaatacaaattctaatattttaagagcaaaatattttcttagtatgtttatttatataattaacaaattagaaacccttcccttagtccttcattcattctgtttttttccttcctatttgtgcttccccaatttgctccgtccctccgacaaatatttgttaatttattttccatttgtgtttaataaatttatttggtgttcgacattccacaaaactaatgaaaatatatcgaattaaaaatgaagataaatttaaattaagcatcaaagcttattgaaagtcaataaatttttaaattttacgcctccaacactaaaatttggaaaaaattaatttgagtgcaaaatttgttaacagattttcaccaaaaatgtccttttttacgataaaataaattttaaaattaaattaacatttttaggtttagcataaggtaattaacgaaaacccccctaaataaaattttattaaaaaattattattatcccagcagccaaaatacacatttaaaacaacaaaaattaatttaaaaatttttttttgttttacaacaaaaactttttctaatggttatttggcagttgtgggaaaagtattttaaatttttaatatcgattcttacccaaatgcattgggcaatatcaaagtaagaaaaaaaattaaatatgttaatcatgaaaaaattattatgtttaaaatcatcaaatcaaaaagaaagaaattatgtttgcattttatcacagaattataatggatttcaatgcttaatagctttattatgcatatttaacgatgtcaattttcaacaaatttaaccaattctaaaagtttgacaaagttaaaaaaaatacctttttttacaaagaagaattaaataaaataatgtaatgaaataagttaaaaaatcctaattataaaatctttgggaagaatatatttttgaaactattaatcaccacattttcgcttcttttgattgagtagaaatcatttaaatatttaaaaaaattaagatatattatactatttgccatttcataaattaaataaaataaaatgataaaatacatagtatctaaatatttataacaaattaaaattaaaaaagaataaagtttttgaaattctagcatttaagaaaaattaaataaccttaacataatggatgtgtatacagaatctttaaaaaataattttataattaatttaagtttatggattataaattaaattttgcctcaagagtataattaaaaatgcttaaaatacttgaaaatttttcgtatttataaagtaaaacaaaaattcaaaaataatagcaaaatgatcaaaatcaaaacttttttttttaatttataagcttataaatttacaaataattgctctttttcagaaatgagctttaatttctcattaaacaagagttttaaagaataatctacacatcttataacaaaaaattaatttaagtaaaaataaaaaacaaaaataatataatttatttggaaaactgcataaatttaagaagaaaagtttatttagaaaaataaagaaaatttaattataaaacactatacttctattctattataaaaattatttttaccaaaaacatgtagaaataatttatttatttttcatcaaataaatttttaaaaatagaaaacatatggattttaattattccatttaaaatttaaaaaatgccaaattgaatcactttatcataatatataaatgtatcatataaataattgcctaaaaatttttcactttttctaatttttggcactaattagaaatttttaggaaaattaaaatcgtgaagcattaagttatcaattcataaataaattttagatgcaaagaattttttttaatttaatttttaaatacatttgtttttgacatttaaaatcaaacaatatctgaaataatagcccttttcgaaataaaaatcttcaaaaatttataatgttgattattttatttaaaaaatgctctaaatgtcatcataatatttgtcactatgtgatattttttatttatgctaatagccaattatgaagaatagttatttaaattctattttgaaattgcatagaaatttattttatatttaatttcttttaaatcttctaaacaatttttatcttaaaattttctgctcctttagctacaaaaacaatttcttggatcttgacagcttaaatcagaaaaaaatatccaattttctgcgatgaaagctttaaatata

SEQ ID NO: 2880 - DNA, 8320 bp, Heterodera glycines
tcgggcagccaaatgcgatggtgtggtgcataaatccctctgaggccctaatggatttttattaaaaataaaattttcctattattttttaaatctttgataatacagtaacaaaagtgatcacgctaccgtaccccccactcagtggcattccatgccagccgatgatcaatccaatttgcattgatccaacagcgggtggtcaaaatttgatttcgctcatccatttccacaatttggttcaacagaacgccaaacgtcacattggtggccaaccaatggtgcaacgacggacgcaccttttgttgaaaaataggaaaaatttaaattatatttttgaaaattcaatttaattactatacatttttctcataattttccggactcaaaagcgtttggtaaagatgttcctccgtccgtgaagccatttgtccttaaaaagtaaaagaaggaatttaatttgactaaaaatattttgaaaaattaccaaaatcagtaaaaaaaaaataaaataaatttgttcccattaattcaagcttaaaatttcaattcatcattctaatctagctttttttttcaagaaatttgattctctgcgcatttccggccatggtctaatttattaaaaagcataaattttttgtcgtcttcaacaggctgctctctgaaattgaagaagcaccgcgtttcaaatttcaagtgcatgaatcatttttttatacttttgtatgcttttgcacttgaaaaggacaattcattaaaaactttacatcccgaaaatttgatcaaaatttatcatgcttttaattattggtttctattttttaaaagtattttaaattggtttttcttttttaaaccattaaattgtgcccaaattttcccatacgagcctcaacagctcctaggcgtaaaaaaaaaattttgaatttaattaattgttttgttactgattcgaagtgccctctgcaaattcgcttccatcagtgccgtctcagcgccgctcatccgctttgcggcgctcgtcgctgccaattcagtccgcacagctttcggcttcgtcacagccattgcaaaattgttgtgacgatggtgcgtttcggcgccaccacgtcggcccggaatcagcagggcatcgtcatcatctgctgtcaaaatatttatgcttttttttgtattacaaaaagacgaatacggtgctgtgcaaaatatactgtatttaccaaaaaaaatgagtgaaaatcattagtaattgcttaggaagtctaaaagcaccaaattgactatattaatatattttaaaatttttaatcatttttttttgataacttgaaataaaaaaaggtcatacgaaataacaaattctaaatttatccagaaaacccaggttttttgtgccttacttggattgttttcatatttgacctggacctggatccaggcaaaatccagcctggatccaggtctagtttgaattctaaaaattatttttagcttaaaaaagaattttgtttatacacatatgtaggtataattagtaaagtgcagtcatattcacctctttgaaatgaaactaggttgttgttgtgatcatcgccagaaaaatcggctaactgaaaattaaaattttaaaattttttctttttttccaattcttcacaacctcaactctgacatccttcaatttaagcaatgtttccaaaaattgaagtgccggcacccgtctgttgctgatgtttttgttgttgctgctgaagttggcactacagccccgaggcatggtaaatataaaaaatgagatgaataagaagaaaattgaaaattttaaagattcaatttgattctccagcatctaaaatttttaaaaatttcttgacaaaatttttaaaaatcttttttttttgagttctctgggaatgccacaaattaatactatgaattataaagttcgacctgggcatggatccacaggcttgacaaaacctggggttttcctggacctgaattttcctgggtttttgtccaggacatccaggtccaggtccaacatggaaccaaagcccaggtccaggctttttcaaaatgtcttactactaagaaatatgtaaatatttaaattaaaaatatttttattaatgaggtcatacaccaattttttggtacggttttggccaagtgttttaaatgaatgggcccaaatgcactttaagtgagtgccgttttcccatgggcattttcccccgcccccattctttcttcatcaaaatggaacgcatggatttgatagacagattcactttgattttaactcgtgggaaaattcgatttttttttagagagaagttccatttttcaataaaataaaggaaagaaaaaaaatgggtgaattttttagtggaatttttttttcattttttgtgaggaaatttcacatgctggatcgtttcataaaactgccaattttacagatttttcgagaaaaatcagtcataacttctcttaaatacaacctaaaaaaataatcttggtataatacgatagctcttggcttgctctattatcatgaaaattttccgaatattttattaagtttttagaaagttatgtctatttttttaaacatttttggttagaactttgtaaaaactcaatgaaattttctgaaattttgcaagccaagagctacagtatgattcttattctttatgttataattaagaaaagttataagtgatttttctcgaaaaatcggtaaaattggcaatttttacgaaacgacctagcaccgaaattccatcctttgataaatatattttttagctttgtgaattaataatattattatttttttctagtttttaattcaaaaaaaaatacattttaaaggaaaatgtatttttatttaattaaacaaatgagaaaatcgaaatttttttcttgaagaaagaaaattgttaaaaattttttgttttaaatgaacgagacaaaagatgctgatgatgatgaagaaccacagcacagaagaagcaaaactaagagctttaattaggccgacaaaaaagaagaattgattttccataccctcaaaaagtatgtaattgagggatttaaaaattttatacccgttattatcaaaatcgaatgtgaatgcaaataattttcaaaccccgcgagggcaatttattcaccccccttttgtgttgctgctgccgccactgctgtcaaacttcctgtcaacatcggcagcagttgaggatggcattaaaattggcggcacaaattgtgttatttcttgttgccctcctatgacaaaattttcagtttttttttaaatgtccaaacggcattaggtttaagtttgtcttaatggaaaaaaaattgttggacatttatttaagtaagccataaattttcaaatttcgcatttaaaatgtgtgtttttaaaatttcagcagattttctgataattagaggtgtctattgtattatattttgacatgacataaaaatgtaaaatcaatgcctagcgaaaaaaaatttatagcgatttttaaaatttttcaaaaaaaattgcttttctttatttcccattaaaaatgcctttcgcttgctcattttatgtgtttgttactgctccattgaataagcagcagctaatggacaagtgcagtgaatttttttatcaaagcattgaacacaaaaaaaaaagaaaagaagcaaaattgtcactataaaatggacagacactttgacaaggaataaagagaaaaatttttaaatgctaatttaaatatgaaaaaataataattgattcatttaaaatgaaaacatttaattaatatttaatttcagtctctataatttatgaaataattgattaataaaaaaaaatttgtaagaaaaattgttactacttattaaaatgggcacaaacacttcgacaatgaatacagaaaaaaggtttaaaatgatataatttaaatatgaaaaaaatgtttgaattatttaaaaagaaaaacatcagccataatttaattttggtctccataatttatgaaattattatatttaaaaatattttgtaaaaaaattgtttaaaatgaaaacaccaatcaaaatacctagattttgatttacataatttatgaaattattttatttaataaaacttaaaagtcttttaaaagtgcgaaaagaacattggtctcacaattgcatgttttcaacacatttgtgcttcttctccatttttgcttcatgaataaaatattacaataccttttaaacttttaaaaaatattttggcatggaaaacaaaaaactatttatattattgacccccattcttcgagggaatctaagggcgtacttggaaattgtagtacttttgttggtaattaaggtccttatttccaagaactaaccaagaacagaacaaaaaaatggtatttgacactacaattcgtcctttgtgcacctccaaacgttgtgtaactactcgtccttttggtagaaaatgacaaatgtaaaaaacaaaataataattttaatatttatacataatttaatttattgtagtgtagtacttcatctgctaattgcatgcgaatttgcataattcacggaaactaatgaatgaataataaataaaataatttacgacaaaaaatgactactgaattttattaaaagaattctttgattctaattcaataattttttgtttttatttgaatccaaattctaagcaattcatatttataatttcaacattttttcagccaataattcgaattatgtttattaaatcatgaagtataatttactaagatatttacaatgtcattaaaattaaaatattatatgtatccatttttgattaaattatctaactaaatttattgaaggtaaattgatttttccaaatccataatcttgttaaatcttcgattgtcatatcaacaaaaataatctggcgatcattttatgccttttgattggcttaacgacaatgctttttgaatgactttgaacagctgccactctctctccctctccctcttctctctctcttaactctctctctctctctctctttctctcctctctctctctctctctgtgtctctccctctccctcttctctctctcgttctttctctctctctctctctctcgttttctcttctatctctgtttttctctctgcttatatcttttgctctctccatttcactaggacattgttcatttctcttttttctacactattttcatagattacttttctttttttcttttccattaactatctctgtctttcactttttctttcattcatggtctctcttcattgcatagatttgaaaagagtaaaatgtgaattggcgattgactgtgtctatccatatgggataaaccaactgcattcatccgacggggattagtgagccacaaatcgcttccctctcttccctcttatactgttggcccatcaagaaacggggcaagggctgctgatgggacaatgaaattttttgatagattgattgacatggtgtggagaagcattgccatcatcatcatcatatatcctccaccttccattcgtctcgagacaaaaaaatgatgtccggacaggaaacttttgacatgatgatgtcaactagtctcacatttttcataatcgagtcaaactttaaaatccgtgaaaatgcggtaaaattaaaatttaagtttaaaattttggagttttcgggtaattttttgattttggttttcatttatcttactaatttattgtttgtttttttaacagtacaagacaaaccttctcctaataattagcccttaaattgttcatttatatatcgcctcttagtacaataactctttgttaaaaaaacgagtgaaatttaaaatttatcattcatccatttttcattaaatttcgggtgaatttttctttgttgcaaatctcattgttttttagccattaattgatccatttctcgccctcttattgtcttcttccaccacttttttcccaagcttcagtgcaaataaataaataaatcagattaggaaaagtactgctggaattggaccaatttgtttcccctgaaggctcattttgccctgcggataaataaatttattgggttttaatggacaaattgtctttgcccatccatccaaagtccaaacttaccatcaactcagcagggatattttaggttttttttcgaatttctatgaaatgttgctgtttcatttttaagaatcaaagtgtttcacagtttgtccaattttgtttgccctctaaacatgaaacatttgcataatttggccaattcttgggaaatcctcgccgttgatttaattatatcattttataaaaattcataatttattatttcagtagacggaaaattgatcgtttattttccaataaagttttccatttttgtatttaattcatttttctttaattttaatatatttaaaattagtcacttttttcattgtgttagcccgaacccattgagaaattttgtgaggggcaaatacgaaacaatttgtccaccgagaagaaagaatgggggagggggtggggcggggtgcctcgcgccacacaaagcgctgatttttaccgcaaaagcgtcgcgccgccaccgatttcccccggggaatggttggccgagagagctgaaaattgtgaattcaaaccggaaataccgccagttttttttgttacgggtggctaagaggggctaatttattccgtttaagttgaccggaaaaaatcctgcagtgccatccatacataaacatttttactcactcacataaatgtcgtataaattagggcagtgtattttttaatatataaaaaggattaaaatatttgttttacggagagtgttctgaaaacttcttttaattcctgaaaaacgaattctgaattcatgcaatcagaacaattattaaaatagtaataccttccagaaagaattcaaaattctggattaagagagaatttctcattttccggaagacttctgaatgtagcttttcaaaacaatattaaattaatatcctttccggaaagcattcagaatttgtaaattttctcatttctctaaagtaaataattcagaattatcttcagccggaacgattttgaatgcaggtttccaaaaaagttatttattcttttttccggaaaacattccagaattctggagagagagagagtttctcattttccacaataactctgcagctttccacaacagttatttattcatttctggcaacaatccaaaaatgtggagagagagagagaacttctcattttccggaaaagatctgaatttagtttccagaacagttctttacttagtatcctttccggagcattcagaattctggagaagagaacttctcactttccggaatcttctgaatttagctttccataacgagctttccagaacaattatttattactttccggaaagcattccagaattttggatatcatttgttttccggcagaattctgaaatatgattccatccggaacgaagcttgaattatgaagttcttattccttcccggaaagattccagaattctggaaaatgacacgcagcttttcagaacagttattattcttttccggaaacattccaataaatctataaagaacgaattctcaatttctgtataaattctgaaatgtctttctgtccgggaccaattctgagttgaggaaccatccctttccggataatccagaactctggagagtgagacagacgcagctcaccagaacgttatttattcctttccgggaagcatttcagaattatggagtgagggagagacgcagctttctgttcctttccggaaaacattccagaattatcgagagagagacgcagctttccagaacgttatttattcctttccggagagcattccagaattttggagagagggagagacgcagctttctgttcctttccggaaaacattccagaattatcgagagagagacgcagcttaccagaacgttatttattcctttccgggaagcattccagaattatggagtgagggagagacgcagctttctgttcctttccggaaaacattccagaattatcgagagagagacgcagctttccagaacgttatttattcctttccggagagcattccagaattatggagagagcgaacttggcattgtttttcgggagaattctgtaaatggttccatccgaaatagaattcagaaatttaaatttcct

SEQ ID NO: 2881 - DNA, 4687 bp, Heterodera glycines
  unsure (1)..(4687): unsure at all n locations
ggaacttgtaaaattatgggcaccaaaaattttaacttcaacagaattgccagaaagggttaaaccgtaccccgtgccggaaaaatacgaaagcgaattgaaaaagcaaatcgataaaatgttgagagctggcgtaataaaggaaagccatacgccgtgggtgcataatatggtgcttgtaaaaaaggcaaatgggcagttaagaccatgtgtggattttaggccattgaacaaagtcactattcccgacccttaccctttaccgagaatggaaaaggtcatttttcgggtcgcaggaaaaaagttttattcgagtcttgatctcgcctcgggcttttggcagataccattggatcccgagagttcatataaatgcggaataattaccccatggggtgtttatcaaatgctaaaattgccttttggcctgtgcaacgcaccaagcatttttcaaagaacgatggataaagttttggatgacataaaaaatgtaaatgtttacattgatgacatattgatacattcgaacacattagaagagcatttggaaagtttggatttagtttttaatcgcctacaaaagtacggtctaaaattaaagggagataaatgcaattttcttcaaaataaatgccattacttggggcatattttgtcggaagcaggctatcaaccgtcgttgggcaataaagaggttattgataagttcccggaacctacaaatgtgaaagaggttaaacgatttttgggaatggcatcgttttttcgaaaatttattccgggttttgcctcaatcgctcaccccctcaataaattgacaagaggaaatggcacggaattcgtatggggaggagcagaaaaagccgtgatggatgaattaaaacagcatttgttgaaagcaccttgcctacgcccgccaaactacgacttggccttttacttattcaccgacgcatcagcaatcgcttatggcggggctttaatgcagactaaggataataatgagatgcatgccgttagcttttggtcccgtacactcactccaacagagagtaaattaccacccactcatggggaattagcggcaattgttcatgcgatacagaattttcgagcaattctgtatggggcagaattaatcgtactcactgaccatcgaccattaacattcctcttccaaaaagccagtacaaatccaaaattaaaccggtggctcatggctctgcaggaatttgagccgaaagtaatatacattgagggtaaagcaaataaagtggcggatgctttatcacgagtccctatcccatggaaaatgtggaaacaaaattaaaagaggatgtcccttatgtgttggcaatagaaagtagtttgaatagacaaacatttgtaaaagaaacaaaagatgatcaaattatgtcaaaagtaattgccaaaataaatgaaaactgggcagagccaatagagaaggaactggaaatatattttaaaaaccgagataaattgtatgtcgaaggcggaataattcgaaaacatccccagggccaatttgtggtaccaaagaaattaaaagttgccattttggaacaaattcacaaggctcattttggaatcgtacggggaaagtcaaaggccagaaggtatgtatggtggccaggaatgtcggaggacatcgaaaattttttgaaagaatgtgaggtgtgtcaaagaaatggcccaagcccgccccgattggatccggaacaccgttggcccgcagcaaaataccccttcgagaggctccatgccgatttggcaggtccggtttggggaacaaattttttaataatggttgactcgtattcacgctatccatttgtctttcagacaaatcaaccggtagcgcaactttgatcgcatttttccgggacatttttgccttatttgggtccccaaaaaccttaattaccgataacggcccacagtttatttcggtagaattcgaaaattttttgtgtgaggaaggggttacccatttaacctcgccaacatatcatcccgccagcaacggagaggcggagcggttcgtgcgaacctttaaagaaggaattaaaaaattgttggatgaggggagaaacctccgtattgcacaattcatccttttacaggaataccgatcctcaccatgcccaattttgaaaggaaatagtccggcacaaatgtttttgaaaagagaaatgcgcacgagtttggataaaataagaatttcccaagtggaaagagacaaaggcactcctacgggcgaccccgtgagagataaaggggctcaaaatcagcaaaggcagttgccgaaatatgagccaggagattcggtatggatgcgcgaccaacaggacaaaaagtggacgccggccatactgcttgagccaataggagagaggatgtggcgtttggagatggaagggggcggagaaagaactgcgcatgtggagcaaataaaagcgcgtcgaatggtcgccggacgagcctagcccgcatcattctccggcaaaactgttttttatataaataattttccttttttttgcttttgtaagtctaaaatttttgatttccattccaaatttcgtatttttttgtaattcatttttgtttctgcaagattttcttttgtcgctttgtccctcttctcgaacctttccgacccaaatcatgtcaaccaccgaaagagaagtcggcacttcggtcgagaatcttgaaaatgtgccaccacagcagagcaacgtcgccgagctcgaccaggacgggatgaccaagcaacgcaaaaagcgcccggccattgcaccagtgactgttgagatcggacatttgctggaggccttcaaatcatcattgtcggccgagatccgttcatcagtcgaacaacttcacaaggagttgacgggagaggtgcaccacgcactgaacgcactttggaccaaaatggagccggtgctcagcgatcagtcgcgctgcattgcggcgctgactgatgcgattgacgagttgtcactcaagggaaccaagcaatcggtaaacccatccacggatggaggtccagctgagttggccaaagaagcaccgatgaacccgcagggcggaggtccagcccctgagctggctaatgaggccccgttaaacccgcagggcggaggtccagcttctgagctggctaaagggcgtaccagcccagctcgttcgaccggaagagcatggcacggaaagcaacatcgacaacccgcacgcaaagccggccgtctaaactacctgatgcgccaattggagcgcgaggtcggcggcagccaaatggtccgatccccgcatccgtactgggaaaaccgccgagggaatggttatggaggaccgcgcggtgggggacgcggaggctacaatgcatatcgcggagaccgttctgagcgcgtcggcccgtcaaacaatggacgttgaatctgtggtgtggtttggactccggaaggggggagagatgttgaatccccttttgacaaaatcatttatttaatttaatgatcaattttcacttatttattttgtacaacttttcttctctctcttcaccaatttcctctcccatcctaaccaatcgttacactttactgtaaacccaagccaagccaatttgtgtccatcccagctcactctcgactccaccccctttctcttttgatatttaaactgaattcattccttgcattattaccctttttttctactcactttgactcattcccattttacttacctttctcacttttgctaaataaactttcattaacaaacttaaagtcttgcttttgattgggaaataagtcgggaacacaacactttaattttctgtagtcatttgatatgcatctgctatttttctagtcacaaacaccaatatttttcggcccgaattttataggcgtgaaaagtactgatttcaaacttctttctattcggagacacccaaaatttgaaaaacgtctgtaatttagcctcttttaaatcttaattttttgaaacccgaattgagaaaatatgaatgtatttctgcgacgccttctatacttaattcggccataatgggccaaaaattcataagttaagaccaaaagagggattttagtttcagccggaatttctataaaaatgttcgtgtgtaacctatctttgtctattcggataagtaagaaattgaaatattcgtattactttgcctcccttaaagctttataatgaaagcgtcgttgtctattttggatttgccgttgcaattctgtaattccactttggaatccaaaggaatttgattcgcttttacaaaatagacagtgccgaaatttgtagatcggctaaaccttaactgaaacataccatatcagcgagacgccatgctgatttgttgtaatcataataaaaaggcccctattgtttaattcggcctttcctataagcacaatgtgtttgatgggctctacaaaatattgctggcgcaaagcaattattttcttggaggctttaattttctgtagtcatttgatatgcatctgctatttttctagtcacaaacaccaatatttttcggccgcgaattttataggcgtgaaaagtactgatttccaacggcggggtattcggatacacccanaaatttgaaaanaggtctgta

SEQ ID NO: 2882 - DNA, 3664 bp, Heterodera glycines
  unsure (1)..(3664): unsure at all n locations
aaatggagccggtgctcagcgatcagtcgcgctgcattgcggcgctgactgatgcgattgacgagttgtcactcaagggaaccgagcaatcggtaaacccatccacggatggaggtccagctgagttggccaaagaagcaccgatgaacccgcagggcggaggtccagcccctgagctggctaatgaggccccgttaaacccgcagggcggaggtccagcttctgagctggctaaagggcgtaccagcccagctcgttcgaccggaagagcatggcacggaaagcaacatcgacaacccgcacgcaaagccggccgtctaaactacctgatgcgccaattggagcgcgaggtcggcggcagccaaatggtccgatccccgcatccgtactgggaaaaccgccgagggaatggttatggaggaccgcgcggtgggggacgcggaggctacaatgcgtatcgcggagaccgttctgagcgcgtcggcccgtcaaacaatggacgttgaatctgtggtgtggtttggactccggaaggggggagagatgttgaatccccttttgacaaaatcatttatttaatttaatgatcaattttcacttatttattttgtacaacttttcctctctctcttcaccgatttcctctcccatcctaaccaatcgttacactttactgtaaacccaagccaagccaatttgtgtccatcccagctcactctcgactccaccccttttctcttttgctatttaaactgaattcattccttgcattattacccttttttctactcgctttgactcattcccattttactcacctttctcacttttgctaaataaactttcattaacaaacttaaagtcttgcttttgattgggaaataagtcgggaacacaacagattggtctccaaatagtcaattcgcttttgccattgaaatgtttgtccaccaacgcattgaaacgtggcgaaagaagtgccaatttgaggccgagttgaggacggtcaaaactggggaaaatgtccatccaaacgtcgttgcaaatccaactgaaataatgaaagtaaattagggcaaataagaatttttgacttttgaaattcttttaccgtcggttcattttttggtaattactaattagcacaatttggccgagttccgaatgaggtcaaacaaatagcagaataattaattaattgcgttggataaaacctggtttttagggttttcctatttttttacggattgtatttgatgaagaagcaccaaaatcacatttaacgaatttttccaaaaaatggaaaatttttgacagaaaattattcataacttcacccaaaatgaaaccaaattttaaaatattgatatcattcaataggcccaactgttttctattagcctataaagtttcaaaaaagttataacttgagaagctcaaaaaatcaagttttttacaacatttttggtcataactttcttgaaacttaacgaaacctttttgaaggcacgatgacatttcgcctactaagccaagatctgacatttcgcctactagacatctcgcctactgacacttcgcctactggacatttcgtctactaagccaaaggcttcacatccatggaaaacaaagagagtgattaagaagctaatggagatgcacactttctgtgttctttgaaaaatttatttgctttttttggctaaatttgattagcattataaatatagcgaattatatgtcaaattagaatatatatttggtgaaatttgctgtcgaaagagctaggtattttaggttagcaggcgagatattcaataggcgaaatgtccagtaggcaaaatgtcagattttaggtgagtaggcggaacgtccgatttggcttagtaggcaaaatgtcagattttaggtgataggcggaacgtccgattttggcttagtaggcgaaatgtcagtaggcgaagtgtcagtaggcgagatgtccagtaggcgaaacgtacgcacaccctttttgaaattttgcatgctaatagaaaacaactagagctattgaatgatataaagaattaaaaatttggttgattttaagtaaagatattgaaaaaaattgctacaattgatggttttttgaccaacatcatagcaccgaccgaagaaacggcgagcagaaaaagggaatggcacagtgaattggaatggaacgcaacagaggagaggaggaccaccaaagagaatattttgcaaaattatgaccatttgccgggcgttttaccttatccccccacccacaaatcaatcaatcaaataatcaattggacggatagagagagggaaaggatgaaaatagcattggggaaggaggagagacggaagagaaagagaggaaaaggaaaaattcgaagcaagaaggaggggagaaagaggaggaaaaggatgaaaatagcattggggaaggaggagaaagagagagagagagaaaaaggaaaaattcgaagcaagatttttgccatttttatacgtccgatttatttaccaatttagacattattcatcaaaaaaggcatttgatcactgatttaattatgatcggtcggtcattacttaattaattcatttcttcttctactgaccactgtttttgttcgttctaaaaagccaaaagaacacatttgtgtgatgatggaaacgtggcgaaagcaatgccactttgagtcaaatttttttaagaaaaaaataagttttgggggcccggcgccggaggaaaaatttgaaattttgactatttttacagattttcactgaaaattgttcattttaaaaatgccttatcgttttaattaattctatacaaaaatagttataataaaaagaaataaaaaagtacataaaattattattatgattattaaaaaattttaagctaaaataatataattttttttgactatatggcataaggaaaaaaattgaaaaaccccgaacgatttggtcaaccccgaaccccgacttttccaaccccgacggtcggggtcgcaaccctagttcacatcattggtcccataattttcgactttttgttcaggtccggtgtttggagttggtcaaaatggatgccagattcatgatcagcgacaccgaaaagcccctaacaaatttttcatgactttcgaaaaccaaaaatcttcaaaaaggtggcactagccctactattaccggcatttgattttgtacatatacaaatttgaattttgcgcttaattaaggccattgtctccgccaccggaagaagtggaagaagaagcgggacaaagcatcacaaaagggccgtcttctgctgacaatgagtgacggacaaacgaacaaaaacaatgattcagcagcagacgaaatgaattaattgagaatgaacggccgatcataatttatcagtagggttataaattatatggactaaaaaacgcaaaatatggacataaaatatggactanaaagctcaaaaatggccatatatggaccaaaatatggattagaaactgccaaaatatatcttttanagcctaaaaaattcagaaaaatgtatttaatattccatatttgctaaaacagactccaaaataaagcgaaaaactggcccaaaaaatggattttaacatttaaaaaa

SEQ ID NO: 2883 - DNA, 4390 bp, Heterodera glycines
ttgagtcccagagattggaatgccggagaattgagtcccatagattgaaatgctggtgggtttagtttcagtgattggaatgtcattgaaagttggtgggttgagtcccaatgtttagaatgccgcagatttgagtcccagagattggaatgccggagatttgagtcccagtgtttggaatgccggagaattgagtcccagagattgaattgctggtgggttgagtcccagagattggagaaaagccaagaaaatgatgcgagggcgcgaagcggccgagccagtcgattttatcattcataattctataacacaatcgtactgcctagcgggggatgcgccgaaggcgctgaccccgctatgtctgaataaaattatcgctcgattttaattttaacttcaaatatttagaaagaaaatattttgcattctgtttgtatttttcaaaaataaggaattaggcgggatcccgcgcaaaatttgcggatcccgttgcgggattggaactcaaaattatttgcgggacgggatctcgcggaattaatctcgcaaatcccgcaatttcttaaaaatgcgggataaaatatagcaatatgcggtggctttttttttgtacttaaacttggctaattgtgagatggaaggcggaattgaccccttcgcttaacggcactgccgtcccattcgtttatttgcttttcatgtttcaaaatttcaaaaccatcaacaaataatcgagtacgtgactaacttaaccttctttatttagcagtgctatcaaaaaatgcattctccaagatcagagacaaactcttattcattgcgtgttcgtaaggcgattgcatttgatagagactattcaccagacccaccgggtccggcacgtaagaaagcgaaggtgcagggaaacaatgcaatgccaaagagggggccgaggaagcaaggagcagcgaaccaacagcagaatttggccggaagagaagcggcgccgaaatttacggtgccgacagtgcaggattcttatttcctcgcgctgaaggcagggacaagggcaacggtaagtattaagaaccgaggaatcagtcaatgcttaatccattctaatgcttaaattcagaacttggtcgacaaatgggttcgcgagtatgaggagtcccctgaccaggcaattgtccaacttctgcagctaattgttgcttcctgtgggtgttctgggaaattggatgccaacatgattcacaacatgcagtggaagtttggtttggttttgatatttggtttattttaaccataatatgtgtaaattagggacatagtcgaacggctcagcgagtattttgacgaagactccggcgactatcccctgaccacacaacaatatcgtaaattccgcaacaattttgcggaatttctccaggccttcgttttgcgaagcaaaaacaacattctattcgatgtcactctcatggacaatctcatccaaatgttgacacttttgtcggacaattcaattcgtgcatttagacacaccgcaactttcgcatgtgttactttttaaatttattaaaaagtttcttttgtcattttttaattccttttagccatgaaactctcttcttcaattgttgatgttgtcgttgaacttgtcgaattaaaagacaaaaatgccattcaaattgatactgaaaaagcgaggattgtccacggaaccacaaatgaacgtttagaacgccttttgcaagcaaaaaatgaggtaaatgccgttggtcgaattcggaattcgaaataattttgtctcattttcagttggacaataaaattgacgaactttcttcgatgctccaatacattttcaaatgtgtttttgttcatcgatacaggtcaagctttcgatatgcaaccattctttccttttttcagggaccaggttgccgatttcaggattatttgcatctctgaacttggagtatggatccgaatctacccggctttgtttttggacgattcttacttaaaatacatcggttggagtctttttgacaaggtagtttttgccggtttacgagtttctgaatgagcaaattaaggttcccgaagtgcgccaaaagtgcatttatgctttgcttcctctttacgaaaataatgatttgattgcaaaattggagttgttcacgcacaaattcaaagatcgtttggtgagtatggtgttggacacggacgtggaagtggcaacgaaaacatgccaactgatgacgcacatttacaggtgccaatgattgggacttattgccctctccgattttaaaatgacggtccttttcattttcagggcgttccccgctcttctcgacccgggtgcttgcgtgccgctttatgagttggtctattgcaacaatcgccagttggccacggctgctggagaatttgtcaatgcaaaattattttcgacggcggccgatgtttgcttgactaaattcattccgcttctgaattattgccttttcttcagaattccctgctcacttcctccacttctctgctcactccgccagctgaaaatcgccagctgattaaggatttggtcacatttttcatagacggcgctgtccatcgtcacccggcctatttggttgattcgctgatcgacatttgccccatgctcaaggattggtccacaatggtcgacattttactttcggatgaatgtaataattctttattttcaaaaggattatgtacctataaaaatttagtcgaccaatttgacactcagctgatttcgattatgtgtgctgctgtcaagcatgctgcgacgggcgaacacccgccaaatcgcattgtcgtctcaattcggcgaggcccgggcgcggggacggaaaaagtccgtgaatagggggcaaccttttcggaacactttaaatggggtacttagtttttggtgaggtgttaccattttcagttatgtaaataaacgacattcaaggctcctagatgtgtattttccatatgtgtaaaaggtgttggggtcaaccaaaactttgctgggtattgggggtaggagcggccaaattttctaacaaacgttcaaattggttcaaggtttcaataaattttctttcctccgccagtgaccaccctcaccccgcaaatttttttaccattcccttcataaaaatgccattaatagaggtgtaaaacctaaattatgttttgttcagaaggaccttcgaatgctgcatgacggacgagtacatctttcggaagtgttcattcccaaattgccaagattgctacaaaaggttcaaaggattcctttcgtctttaaattcatttttcagtttatcgcagaccaagaaaaagtgcgtgatcttatcggactctttttgtacttcgaacttgaaatttactctgtttcccgtcatgatcaagttgttctttcgggttcaaaaaagcatttgaattgtttggtttcagcctctttatgatctgatgatgcttctcgagcgcattgttgaacaatactccaatgatgagattgcctcaaacattgcctccgtttttcaatttatttcgactaatatgacattggcacgatccaccgaaacaaacagatgccgaattgtggacggagttgtgcaaaatttgcggcaacaattgcaagtgtttctggccaatgaagaggacgaggaccaacagcttgacgaggaggacgaagccgcacttttgtccgccttcagaaaaatggttgcgttcgccaggtgcagcaaaatacatttctacagagctcaatttaaataaatattgtactattgcaattttcagcacaatcgacgtgcctgtaaatgtcgaattttgggacatgtgcatggctttgtttcaaaattcgcatcgatttcggtcggctgatttggttgaaaaggcgatgcttttgtgctttcttcttctcagctgggaaatgaaacgatttgtggcggcacaagaacatggagaggtaaactctgcacggttttattcatttctctttattctcactgataaggagactatcgaaacattgaagaaaaaacgcgaccaatttttgaggacgacaaagtccattctgcgcgacttcgctattggtgttgagactgtgagtttcctgtaattttttgtcattaatccaagtttaggcgttcatgtgcatttgtgacattttgattttatttaattggaaacttgctgctgacaatggccctgaccatcccatccattctttggcaattaaattggacagggaaatggcctttcggctcggtgactttgtcatggacaatgtcttcgtgttggaagagaacgattctggtcggtttctggaatttatattcaatagcttatagtttcaattccttta

SEQ ID NO: 2884 - DNA, 3448 bp, Heterodera glycines
tattccaatactgtcataatataagttttatataacgtaatccaaatcttagacgatttggatttaattattctaaacaaggaacgcatacgtaaatacgcattccttgttatttggttaatatgatcggaaaattgtaatttgttatcaatgtttactcctaaatccctaattgtatccacagcatttattgtatttccatcaaatttatatgtttcttttgggttttttgaacccaaatataatacaaaagttttttgcattgaaacttttatttgccatttatttgcccattcgaataaattatgcaatgctttatgcataatttctgtgtcggctcttgctttataacaaatatataatttaacatcatcagcatataattttattttcactcctgatggcaaagcatcaggaagatcgttaatataaatcaaaaataataaagggcccaggacagagccctgggggacgccagaggtaacttttttacttgaggataaagaatccccaattttaactcgaaaagtcctattactcaaaaagccctttatccacattaaaagtttgccctttataccaattttttccaatttgtataaaagtaaattatggggcactgagtcaaatgctttttgaaaatcaatataaatacagtcaacattttttccatttataattgcctcgtaccaatcttccacaactgttattagttgacttgtcgtagacctatttctaacaaaaccaaattggtattccgaaattttattgttttttaggagaaagttgtaaatattttggctaagaattctttccataaccctgcaaagtgagcaggttatagaaataggcctataattttcaggattaaatttgtccccttttttgaaaagaggaaaaactattgattccttccagatatctggaagagaaccagagtctaacgaaatcctgaataggtcagtaataacagttgctaatgaagaatggcagtttttcaatattttatagctaatattatccggggaggtcccgtttttattcggaagttttttcaaaagtttttgtgtctcgatgatgttaaagtctatatctgatataaaacattgattaacaaaagtattgcccaagtttaggtagcctgggtcaacatcagaattgttaaacgaatttgcaaataagttggctaataattcacatttttcatcaccatcatgatagcatttgttttcaaagactaaattcggtatttcaaaggggttaacatcgtatttttgtaggtatttaaaaatggaatttcttccctttgaaatagcctttttctcaatttgcgagtgaaatttatttgtttgtatttttatgtgtaaactaatgctatcataaagtgctttttttgttgggtcagttttacattgcctatacagtctggctttctctttgatggaggccaataaatgcgttggatatttaggggtcaaatcttttttggtaatttttttcattggaatacactcgtttaaggtttctagcaatgtattattaaatgcgttgtatttttcgttcacactaaaatgctcgttagataaagcgctaattctagaagaaaccataatattaaaaagagaaacattcgacggaaaaaaccgtcgattgtaaaagaagtttgttttttgtagtgtttttggaatagtcaatgtgaaaatttgcgctaaatgatccgatgaaaaaacaccaccttcaatagtacattgctttacaatttgatcatttgccggcaaaactaagtctaaccacgaatttcccctggtgggtccactcgtggcattgaaaaaagaaagcttactaaaaaagtggcaaaaaatttcaccaaatttactcatagaaatgggctgcccttccttccataccaggtctttattcggaaaattaaaatcacccaacacaacacaattatggctatagaatgtttctaaaaatttaaaaggttccttggtttgtctatatgttgtcttgggtggtcgataaacaagcacaaatctaattgattttagtttttgtaattgaaaaaccaagatttcgcaattatattttgtttcagaaaatttaacaaaaaactcaatttctttcttaattaaaacaccgcaaccacccccacgtgttaatttttgagattttctatgacaaaaaacaaagttataattttcgattatccatggactaaagaagattgggtttccctcctttgtccatgtttcagttaacagaaaaatgtctatgtttttatttaccaaatttaaagctatttcatcaattttgttgtaaagtgatctaatattaactaagcaggctttaacttcccctattttcggtattgggttattgagtctaacatgcttaagaccggaaaagtgcgaatttataaatgttttatgagtgtgatttggtaaaacagcaagtcaattggtgttatttttaaatgccgcaatgtctgacctcagcatcactttgtccgcgtacaccacccactcgccgccatcttcctttcttttcctgctacactcttcttgcagcacacgtcgggccttgagttcctcttggctgagtgaagggcgaattcggatgttgctcatccccaatttttgattgatttgcgcgcgccctttgttccactgtgccaaggtttgtttctgatgtttggagcacccgaaaattactttcatcaacctcgggcggttttgacctgtctttgcttggtctggggaacccattctgtacacagtgattgggctctcgatgccaagctcatcgagaacgcctgagatggcagttcggtcctcagcgactcgctcggacggcttttgtttctgcgattcagggagacccattacgacgacgcttcgccgacgctcatggtcttgaatggcttcttccatcattttctgttgtttgaaatgttggagttgaaggtcttgttcggagatgacggtctgttgttgctgaacctgctgtaaaagttcgacacaaattttcaaaagttgtttagtgatggggtcgacactgttgttgtccatttgttgggaaattgccgcaagttggtcactaagagcggtgtatgggtagtcagaggtggacttttttgatgcgttgtctgagagaggagaaagatgggaagaaggacgctttccaaacatgacaaatttgaaagaatgacaaatttgaaagaatgacaaatttgaaagaatgacaaatttgaaagaatgacaaatttgaaagaatgacaaatttgaaagaatgacaaatttgaaagaatgacaaatttgaaagaatgacaaatttgaaagaatgacaaattgaaagaatgacaaatttgaaatttaacatcatcagcatataatttaatttctactcctgatggcaagcatcaggaagaatcgtatataaatcaaaa

SEQ ID NO: 2885 - DNA, 2654 bp, Heterodera glycines
tctgtaaaaggggatgttaaagcgtgtcgatggattaaatattgaaaatagtttcagatctgttcggccataaacaattttatgcgccatgaacagatcaaatagctttcgcctattctcaagtgtcggcagttgcaggtattctaatcgattttggtatggaattggtggaaggctgcatttaaaaaatacccgtttggtgaaatatttttgacacttttctatttttttaatatttttttgaagagacggattccaaacctccggagcgtattccaataaaggcctaatataagttttatataacgtaatccaaatcttagatgatttggatttaattattcgaaacaaggaacgcatacgtaaatacgcattccttgttatttggttaatatgatcggaaaattgtaatttattatcaatgtttactcctaaatccctaattgtatccacagcatttattgtatttccatcaaatttatatgtttcttttgggttttttgaacccaaatataatacaaaagttttttgaattgaaacttttatttgccatttatttgcccattcgaataaattatgcaatgctttatgcataatttccgtgtcggctcttgctttataacaaatatataatttaacatcatcagcatataattttattttcactcctgatggcaaagcatcaggaagatcgttaatatagaccaaaaataataaagggcccaggacagagccctgggggacaccagagccaacttttttatttgaggataaagcatccccaattttaacatgaaaagtcctattactcaaaaagctttttatccacattaaaagtttgccccgtataccaattttttccaatttgtataaaagtaagttatggggcactgagtcaaaagctttctgaaaatcaatataaatgcgcgagttttgtgcacatctacaaactcttggctttcgaatgataccagggttgtttgggtccgggtccgggaagtgccctaaaaagggagctcaagcacttttggtcggtatttttcccaaaaagaaggaaaaagaaaaggaaattaaaagggtggaggcaagccagccgatggtcaagtggttactgtgcttgcttttggtggcgtggtctctgtggttcgagtcccattgtgatgtttgtttaaaggaaattaaaagggtggaggcaaggtcgagctttttgcaataaaagaaaggaaggaaaatgggcattgaaaggtgaagtggcaagcggccagatggtcaggcggttagtgtgcctgccttttatagtgggttcgggtcccactgcttcagagtaatttgaaaaaatattatatataattctactttttgttttgtttttttatttaattaactttatggaaataaaatattagttattttaaattaatgaaataagatttatttaaaaacaaatttaaaactgaatttaaaatcaaataaaataggtaaataataataaaaaaaataatataataaataaatctaaataatatttaagataaataagtatttacaagtacaagacaagcaatccggtgaacaagtggttagtatgcctttctttgttggtgtagtgtatagggttcgattcccattaattctgattatcaaactttttaattttttttttgataagtacgtttaggaaattaaaaaaaatttacataaagagtgaaataatatgttttttatgcataccgaatgaactcaaaagtaaaaatttgatccttttttggacaaaacttgtaacaaattgaaaattaatttaaactatccttggagcgcctatcatcagccagaccggactcgctcagttcagccctcacgattcggccccagcatgcttttccattataccttttttctttatcatccaaatccaacattgttggtatcatacgaaagctcttcacatgctctattagctttacaaaaaacgaaaagattttcaagcctcgaaaaaattttattaagaaaaacttcaaaatttcatttttttcgcaattttcatgtataacttctttagcaattgtctaatcataaagcaatagcttagacaaagcttttaaacatgttaagatttcaaataataccaacaatgtaacattgttggctttggatgaccaagaattaacagtataaaaattgacaaaaaaaatgtttctgatccaatttaacagaataaattttgatttatggcttacggaaaattaaaaatcgataaaaatttaaataaaacaaacaaaatttagaacaaaaaaatatgaaagaggaacagaaagtggaagaggaagaggaagagaaacaaaaagaggaacagaaaaagaaatagaagaggaacagaaagtggaagagaaacagaaagtggaagaggaagtggaagacgaacagaaagaggaagacaaagtggaagagaaacagaaagtggaagaggaagtgtaagacgaacagaaagagaaacagaaagtggaagagaaagtggaagagaaagtggaagaggaacagaaaggggaagaggaagagaaagagaaacaaaaagaggaacagaaaaagaaatagaagaggaacagaaagtggaagaggacagaaaggggaacagaaaatggaagaggaacagaaag

SEQ ID NO: 2886 - DNA, 1618 bp, Heterodera glycines
tggtgggttagagatagtatagatataagagaatgaattacgagagagagagagagagagagagagagagagagaaagagatagaaaagaaagagattcaagaataaaggaataaagtggaaagaaggaagttagagttggagagtgaagtgggaagggcaagaatcaaagagggtgggggagagagagagggagagagaaaaggaagagaagatagagaaaaatgaggttaagggtcgagagagagagaggcaaagaagagagacatgaaataaaagaaagacaatgacataaaaaataggaaaaattgaaaatagagaaaaatacaaaaaaaaaacagtaaaaggaaaaggaagcaaaacgacggaaaataaattaaaatgggggccaattgacactgacaaggcatgacagatattcattcacaatggaatttcaattcttgacaattgggaaaatgatagaaaagagaggggtggcggggatacaattacgttttttggccctccctgccattttttcacaggtttttaggagacggaaataacgcagcgaaatttcggaaaaaataattttagaaatataggtaattactccgttatgtgtacgatttattactttcaatattaaaccatagtaaaaactaaagcccagcgcgggattccgatttttttctggaaacaacgggatttgcgggattaatcccgccggattccctcccaaaacaattttgattgactccgacaaaagtaattagatttttttgtcgacaaacagtaaaagccgaggcagtacgaattgggtttcgtctcaattttatatggatttgtaaatattccaaaaaaatgtttcattacagaattttcggaaaagcaagccaccagcagagattacgtgtaatagaaaagtggagtgtatggcaaaaaaaaaattattttggcactttccgctcgaaatgcccttgattgcccccggcgggcatttggcatttttttcgctttgttccttcccttcccccttcccgtcgccgtgggggtgaggacgtggaaaggtacaaacgtttaaatggtcccatggccacccccaaccttcattataaggaatatgtaggccaaaggcggcgaccctgccgctgccagtcctcctcccctatgtggagtccaattccattccattccgtctcctcagtcgctccgctccgtccctatcccccgttgcgcccccccccccctccctccaccggggggggggggggactcaaccaatctcgagactctcgaaacgccgccgcagtcacggcggcggcggtgatgatagatgatgatacagcgcagagcagtagagagaatataaacaaacaccgcctccgcctccaccgccgtcttcccctcccttttgcgcgcctccggggtccggggatgagttggatggggctgtggtggctggcggtggttgtggtctttcatcttttggtgctttgcttaggtgtgtggtggtggtggaggtgcttctttcgttgctcactctcttccatcatcatcatttataaatcgtcgtcttcaccgtcatcatcatcatcagcatcatcatcaccggcagcagcatgtagcacttcctc

SEQ ID NO: 2887 - DNA, 4460 bp, Heterodera glycines
ccacaaaatgtccagcccacgaaatgtccaagtctcgaatttgagtttttttattattcagatgggcctaaggttaggcaaggggtaatataaagggtatattcgtattcagcgaccccgaaaaccctaaaaatcctaaattatactcattttgtttttataaattttgaaaaattttggacatttcgtgggtttttactcttttggacatttcgtggcttggacactttgtgggggtgccgttggattttgtggataatggatggtattaaagaaggtgatgatgcgcgtgttatcccatccattaacggtcgggatgggattgcccgtgtggtcaccgcccgccaattctaaaatgaaaccaaaaaaggcgacaggcgagggggagggtggccaaaccgccaaaccccgaaaaaaggaaagtgctaaatatggaaatagagaggaggaaagtggcggagagtaataatctgtttgtggtgatatggcccgagaatgtggtcgatctatggaccaaagtctcggccccaaaacggagcaggacaaaatgtcgccgagaaaaaaggcgcccgcaataaaatagtaaagttttcctaagaatttcaaataaaaaaaattctcaattttctaatagcaaagcatttttcatttatgtatgtatgtacatctaagtttttcaaaaaaaattgaaaataaacttttttttaattttaaatgttttaaagcgacgttttggggggaaccgcccacttcggcgccggccttttcggcgccgttgctaacaacttttttcctgatcaaccaaattaaaaatttttgttatcattcgatagctcttcagattctctattagcctgtaaaatttcaaaaaatttcgtcagtttacaaaaaagttatggccaaaaaacctcaaaaattaactttttcttggctttttcggcgccgcgtggcataacttttttatttttgaatcattcatttctatttttacatgtaaatatagagcacacatagagctttcaaatgatgccagattggctaaagctaactgacaaataaaaaagttatagcatttcaaaatttgcggcgccgaaatggtccgcgccgaagtgaccccgacccgttttgggctgcattttgccccaaatatgtgggtgatatggaaataaaaaattgcgaaaaatttcgacgcctgtctcacaaccttccatatttcgcgatttatgtccatatttccatatttgtccatatttggcatttttatccatattttggcatttttcaaaaaacctctattagaacggcccccagcagctaaattagcctttttgagcccaaaaaccgaaaaatttttcaaaaaatcattttttcgccaaaatttctcgagaatattgaataaatttaaattttcttaaaaattaataaatttatgtcaaaaataagcaaaaaagcgaaaatttcgcttttgtggttgattttgcgctaaaaattagtaaattttagttttatcatgttttttcttctaaaatgatttttaatacaatatgtagccatttttgaaagctttacttcgcgtatagcgaatttgaagaaattttgagaaattataccctaaagttggaaaaaattatgtccatatttttggcattttatgtccatatttcgcgacttttggtccatattttagccatatttctcgattttatgtccatataaatccccgccctaatcataggaaatgagagaatcagagagcactctctgaattaatagatgagaatgatgtcatcaccgggaaaaagaaaaaaataaaataaaatttttcatcaaaaaatagtaaattaaaaaatttcccaccaacctatccaagaatttgatgggtcaatggcaaactcgtacaaaggcaactcgtacaaaaaaaatttctaaaaatttcaactaaaactttataatttttagataaataatctaactggattttttagcctagaaaaactttttaaaacacttaaattttcaaaaaatttaagaaattaaaaaaagcagctgaaaaactagtaaaaaactttaaagaatcttttttaaagtttttctaggctaaaaaatccatttagattttttttaatctaaaaattctagtttttagttgaaaattcttagaaattttttttgtacgagttgccatgacaccaatttgatgacttaacagggaagagcacacaaaaaaaaaggaaaaacgaaaacagagggggcgaaaagggggaggaattttgtttatgttcactgaagaaattagcaaaatttatgaatggaatggaaagatgaagccgagaagaaacaccaaagctcaagcaagaacagggatggaaaaaatgtgacaaatcaccgggaaaataaatttaaaatgaaatttaaaaattcccaagggggagggggggggtaacttgggtaaatttgactacttctattcatcaaactcaaattttatttatttggtatcattcgatggctttaaaaatttcaaaaaatttggcacttataaaaaaaatttatggccgaaaaattgagaattgttttcaggctattacttgtttttttgtacttgtgtaaccactttttttttttgaaattgtgaacgctaatagagaaatttaggactatcgaataaaatctaaaatacacaatatttgattgcccctgaataaagatagatatttatgtcgaaaattttcggttaaaacagtacaaatcgtccttctttagtccatttggatgatgaataaacaggaaaagagcgctaaaaatggaaaaaagtggtgcggggagtaatttgttgatttagaggtgtcgatggatgaatgtggtccatgaaatcagaaaaaaaacatcaagaaaatgaagaaccaaagaccataataggaccggaaatgacaatcaccccttggggaaaagaaattcgttttttttgaatggaataaaaattaaggcatcccgccacacgaacttgacattaattttgaccaatttcgagtcccagcccgaactcggacaacaagtagaaatttaaaattgatttttatgtgtgagaatattcaaaaatacgcattcaaaaaacaacaattttttactctgaaatgtccgtcaaaacaacaacaacaacaacaacatcgggagaatatattttgtttggtattgtatatgtatgtgtatatatgcgaaaaaatggtcggtgtgggggatgggggggggggtaaggtaaataaagcatcaaaatttaaaaaaaagaagcaacaacattacccattagggcgaatgaatgaatgaatagtcaatttggtcgcgaaaaaatgatcgctttttagaaaaaaaaaacaaaaaaaaagtctccaaaagttgtaaccaatttaattaatttttgatcctatatgaatgtggtgtatctatcatacaatacgatgatgcacgcaccataatgaaaaaaagagatgaatccccaaacgatgcgctctaaaattttacaaccaagaaaaatggcgaaaaaaaaaattttttttttttttgaaatttgtaatttggctaaattagaaaaattggttttcttttctttatgcttgtgttaagcacatatcaaataaatttgatgttttgtaaaaaaaaaacaaacatcaacaaaaaagcgatcatttttatgatgacacacataggtaaatgatacgacgacgaacccaacaattattggtcaaataaatagtcacaaaaatgaccaattttcaatttttggcggcggcgccatttttgttttgtttctgccgctgctgtttcggctgtttgttgctgctgttggtcggctgtttctgtcccttctccaatttcgcgtcctgtccacgtccgccttcggctgccgctgccccctcttctccctcctccacgtcgtcaagcaaattgtgtccctccggcgctggacgcattgcgggaaagaacagcacctggacaacggggggaaaaatattgtaatttgaaaacaaatattggttattataggtaaaaacgaaagagaagggatccatctctcctaccaacaatcataaaccggtaaaaaccggtcaaaaatgccggtttccgggccgggctgacattttcaaaacgaccagtttccgggcccggcctctcaaaaaccggtcaaaccggattttttccaaaaatcaccggttccggtttccgggcccggtaaaaaccggtaccgggcccggctcggtctctaatatatatacatctatattttttgtgttgaataataataataaaaaaaaaattctacaaccttttttcccaaaaaatacaaatttttcaaaatttcctgaagggaacggtggaagaaatcttttttttggtaatccttcagaattgcggtcccgacgaaaaattaatttaaaaattttattttagttttttttagggtg

SEQ ID NO: 2888 - DNA, 4485 bp, Heterodera glycines
agtcaagagcatcagctcggccatgtgcttgtccgtcttctctattccccccatcgtttgtctgtctctgttctgtgcgtctgcggttttcacggcgcctcaggcaattaatgagtttcacaacaaatgaaacttttcatttcgaatgcttttcctttgttagccctttctctgctcgtttggctgctccgtgccgaccagggaaagcttgaaaagcgaaacacggcggaagtgacaatgagaaatggcaacgcaatggcactgaatgagcagtgggagtttaaagcacagccgcaagaattggacagaatggcagtggcgataatggcaagaaaaacattggcatttgtcacaaaaaacattcattggcatttgctgtttttttttgatggccaatatacaaaaatgcgtctttgggcctactaaataaaggccatctctgctgaaggtgcaattgaaaattggtcaattgctaccacccaaaatcctcacttttttttcctattttgggacactccaaaccccaaaaaggcgtgccgcctttttaaacactaattgtcatgcatttaaatgtttaggtgatggactcttttggtgaagtgggccattgcattttgggcgatttgtcgggcgccgatgcgacgggggcgcagcaatggcacgaagcgatcgaccgacctggccaaggcgtgacggaatggcacccactgagtgccaattggtgaaagctgtcgcaaatgatgccctttttgctcttttcaaatttatttggttaaataagaattttaaagaagaataacaattagttttgtgtttgatttttctggtcccaatttcgaccaaagaaaaaacaaaacaaatatttgtccatttcagtttgtatgtaaaaatatgtaaataaaagtcccgatttttgttcgcaaacacaaaaaagaaagtgtttttcctactatttagatcatggagaagccaggaaaaaatatgtatttacataaaattgacagccatagttataagttgtatgcactaaaaaatgccaaatatgcgcataaaatatgcactaaaaacccccaaatatgccctaaaaactcgaaaaatgcccaaatatgcactaaaatatgccttaaaaattacccaaaatggcttctaattctcaaaaaatgccaaaattgtgtaaaaatacaaaattgaatttaaacatcaaaacaatggctaaggagcgttttttggataattgcaaaaaagtttgatttttaaatttatatatgcaatttcgaattttaaaatttttatcatacatatgctaaaacaaaattatatttttctaatatcaacaattttttttcaaaagttcttacaaaaaattcaaaatttttcgcttttcaaaggtatattttttaaattccaaaaaggtcgatccttaggggatgtatttttcatttttattgcatttttttatgaatatttgccaaaaatgaccgaaatatgttctaaaaacgcaaaaatggcaaaatatgcatttattctcgaaaaccccaaaatatgcttttatatgcactaaaaaccttcaccaaatcaaaaaattttaacgcagaaatgctatttttgagcccctttcttcattgcatatgcgcagaaaaaatatgcaaaatcatacaacttataaccctaataataacaaacaaaagaggttgcttacgagaagataaatctttcaaaagaaaaattatgttttttggaatttttaaatatttctacaactttaaaaaaatcataattttgacattttaaatcccgaacgaaacggtggaggaggcaataaattgtacaaaaaattaaaattcaaagcctacataattttttttttttttttgcaaaatttctataaaattttttttgacaaatttttcattttcaaaaataatttttgcctctttgatgttgtgactgtcggtgagcatcatggtcagccggtcaatgcccatgccccagccggcggttggtggcaacccgtactccaacgcggtgcagaaattctcatccaccgcctgggcctcgtcatcgccagcctcacgagcctaaaaaaaaaaaattacaaacttacaattggtgggaagaatgaaaaagtttacaaataagccaattaattttgctataaaaatggaaaatagatttgtaaaaaaaaattttgtacgcaacagtaggaaaaggaaagattaatatgtaacacggaaaatatgaaaaaaaattgttttttttgatacaactctaatttttaggacccattagaacccatctatcgtcaataaagaagcggaaagcaaatttccgcttactatctctactcgagaatcgtgagactcttgaaaaacggcaagaaaatactaaaagagcgacgggggaaatttttcagtaaaaaaaattctgtgcccactttcgcctgctgttcaaacagttcacgctgacgcagcgggtcattcagttcggtgtaagcgttgcacaattctttggtgcatgcgaacagctcaaagcgctcggtgaggccgggccgagagcgatgccatttggccaacggagacataatttgaggatgcccagtcaaaaaggtggggttgatcagtttgggctaaaaaagttacaaaatttaaataattttttttaaaattaccaactactcacctcgatgaactcgccgatcagcttgtccaacaggcgagcacagctgcgcggctgtgtacagtccacgccgtgttcagtggcgatacggtcaaaaaagtcgcgtgcctctgtgcaaaaaaaaaatggaaattcaaattgggaaaacaaaatgttacattaataaataagcggcaaaaaaaacatgacattcgagtaccaagggtcattattggagcacaaaggcccttaaaatgaaaaacaggacccgccaataaatctctttgaattttttttttttcataattcaacaatcaactcttttttatctttaccttttcatccaaattttaataaattaaaatattataaaagagagtaattatatatttaaagataaaatttggattaatttaatttattaattattttatggattgaatattgttatttgtgtaattaatgttaatgacgtatttgtcctgtataattaaattgtactttttcttcaactcatgccgctctcatagttctcaatcattagctgtaagatgatgctttaaaattttgagcgaagaaattgccaaatatcctaagaaaatatttattcattgttaaatccatttataatattgaaataattcactcactttcttaatgtccaaattaatgtccgatcacagaaaatataacattatttgaaattcccttgttctaaagaattaatgcgttttaaaagttttaatttatctttatattcattttctgataaattatcaattgctttttcaatttttagtccgcttgaaatttattccctccattttatttgtttatttgttaaataatttaaaaatttaaacttttactgggaaattatgaaatgattagcattcatttaacaatgaaagaagatgatttttttaaaaaaataaatgagtttttttgctataaatattttaaaaataatttcactttaatcaatccattaattatattttattgtttttattttaattattttcttttatgctatcatcatattttctgttcgaccaaatttatctgtatattttaaaacattgttaattttttctaaaaatttttgatattgtgaaaataagatcaaaattttcagaatttatttaactattttatttcctgtttaaaaaatatttttattaaaacttatgttaataatccttgaaataatattattttttatttatgttaatataatatttttaatacatttagctgttttcatttcaacttcctattaggttgatattcttccaattatttctttaatgtcaaattatttcatttttaataaaatttgatctttaaatatgttatgttcgttgatagagttatttgtatatttaaatttaagattttaaattcgcgttaaaaattaaattttctaatcatactattgtcctttatttacagaatatttaattttgaaatagttcttgtgattttgattgcttgataatttatttcgtttaatttatttatttatctttttaataaacttattatattttaattatcttatgttgttccgtcatctccattttagttgtcctttttgttactttagaattgttaattaatttcttgttttttaataatattaacgtgatttggaggtgttttcctacaaattcataaaatcagtaaatcatacacaaaatacacaacaactttaatttataaaagcagagtttttctaataaattctcgtgctgtttttgaattttatcatgtcctttcgatcggaacttgtttattttctaagctatgctctatttgtatattaat

SEQ ID NO: 2889 - DNA, 1785 bp, Heterodera glycines
  unsure (1)..(1785): unsure at all n locations
aaagcaaaagcatttctaccaaaattataagctttttatgcattattaaatcattagcaataatttaattataaaattttcaaaaattggcacagaatttgattaattaggctaagagcccttaagtgtgcttgaggcgcccaaatgagtccgacccgggcactaacattcagcgaccaaacgaaggggccaactgcacaacaacagactggccgaccagtacaccgacgggcacatccaccagggaagcgcgagttgtggcgacgatgctgcgctgccatcctcggcaaaatcagtgccggaatcgcaacaattttgtgatggcacattattactgttagttgattttggcagaggctgttttcgttctgggaacaccaacagacgctcaacaaacggcaaattggccaagtcaaggccttcgcgcacctaaattttacactaataaattttaatatggaagcatttaaaagtgaatttttatagtcaagcaatcattcccggtaaaaccctggcaaaatgatgctcctgattctacattcctaccgtaatccatcctcttgtagtagaatgtattatggcactcagaaatgcttatgcgactattttataatctactataaagtagtgaccacaaattcgattttccggcaaatgtaacggtaaagacttctaattaccattaccggttgtttaactgtggaaaatgttaaacgtgtcgatcacaaatatcaacatctttgatcaatggcactcttctctatgcttaatgttagcacctccatgtaatcgtcgcgcatttcgttctcggcaaagaagcgtgtccgctgctcctcaaattcgttggccgcctgcacacaggcgaacacgaagcccttggaaaagcgcattcggacagccgcaaatttgtgcaaatcaacaatatgcttggataggtcctaaaaagtgccaagaacaattttttaaacaaattatccaatttttcaaaaatttcattaatccttaccttatatccgcattcgtcatacaaaaatctaaaatttggttagtttacagcaaaagcatttagcagtgttacacattgccggaactgttggagttgactcgttcgtagtacacttgggtggtgctgaccgcgtccccattacggtacctatgaaattaaaaaatgaaaattaatttaaaaacattcatttccaatcgctttttcttcaaatatttttgttagtttaaaataattttggcttattaaattaaatcattttaaatgaactttatttaccctttttaataatataggttattcttaagttataaactattgtctatttgaccctaattttatttttgcctattcaactcaatgaaccctttaaaaatggcataaattcgtaattttacatttcaatatttttccttatttctttttctttaatattttaaattcaatattggccattaattttaatgttttcccaattttatcatttttcttgcctcagcactcgccgtgttcgtcgcatgtaatgatagctcaaacttttccaccaaaccactggaatcgcgttgcgcatcttctcaaccaactccaacacttggccaacactataacgcggcgccatgccaacccgcacaaagtgatgcctatgtttatttcatacaatattaaaaatctctttttaaaacataaatttttaatgttttaaaaaaaattaaagatttttttgaatattttaagtgtaaattattattttattttaccagccattcactgnagataaagca

SEQ ID NO: 2890 - DNA, 7479 bp, Heterodera glycines
aaaaaagtgcaaaataggtgcgaaaataggtgttaaaaattggaaaaatccaatgtatttatgcataaaagttccaaaagtgactaatttttttataaatttcgcccgcacaattcaattggtcaagaaaataaataacaaattttattttttattttttttcatttcttaattgtgtatttgaaaatttttgggtcgattcatacgggtgtatttttctgaaatttttgtgatcgttttataggggatgtatttttcgtttttattgcacttttgctatgaaatttctggaaaatgccaaaataggtgctaccccccccccattttaggtgtttttaggtgctaaaaagttgctccaaatcaaaaattgttcggagaaaatgtgtttttcgtgcttctctcatcaagtaatacccgcaaaaaaataggtaaaaccctaaaaatccggtctctagtcattagtgcgtccataattgacttgcacccggacaatcggacaatttaaaatttgacactaaatgagaaaaaaaagattataaaaaatggaaaaacaaaaacaaagaacataagggcaaaacagcagatgcttttggaaatgtcaacgatttgggtgacttttgttgatagaaacacttgccaatgcttaattaaaagcctttcccatttccttgcgcaaataatttgcccgttttctcgcaaaacaattcctttccattaatttgaggaatgacaaatccatggacattacctaaccatccaacaaaatcccaattcaagcgcaaatccgcaatgataaattttcatttttataaattatccaatggaagaactattcttttcggttgatggcattgagtacaataccgtgaaacggatctcaaattgcgaaggtcaaccccaatttcgcggtaatttttttctcctttccattattataaatttaagttttaaaaaattgattcaaaaaataaaatttaaattttcaaaaataaaatgtatttttgcacgaaaaatgtatgaaaaaaactcttgaaattcttcgaagtggagaccccaaacgttatctctcagcaatatttagttaatttaattgaacataatattattattattattttgtttaattttaatcaattaccacttttttgttagttgcagcggtttctattgtatgcatatggaaccttttgcttttttctatttattttattaaataacgaaataagctaattctgtaaaggcggtattaatctgaataaattctgatatatcgaagaaactttaaaaaaaaaattaaaagttcattttattaaatttccaaattaactgagaagagttttgggcgtccgtcacttttgccaaagcgatgccttccattcatttttggattgcccccaaggcttttcgacgcccggcagggcggcacaacaacacaaacattttttagaagtgtctttgtgccggggacgtttaagatggattgattatttgccctttggttggcgagagttagtatgggccaataaatttggacttttttgacagttttggcacttttttagggccacagacggaggagggcgtgccaatgccaatgttttggttggcatcctcaaaagcagggaaagaagaaaggcaaaaaatgaaaaagaagtgccaaaagaaaaagaaaaaatattcactgacattttattaatgaaaatgaaagaaataaattgcaaaatttttgttttaagattaaatttacaaaaccttttaaataattaattgaattaaaatacatattttgaaatgactaatttttacatgggaagataaaaccttttatgtctctttcatttattatttaaataaacaaattgtaacagaagacaaaatattgggaaatttgcaatacttaacagtttaaaataatttccatgtcattttttcaaaaaaaattttcaattggtcgcttccgcgggctaaaagcaaaaaaaaaaaccattctttgaattcggcttttcaattaaactgcaaaataattgttaatgaattattgcagaaaagacaaaagacagacatattattaatggtacttagtaaatagattaacaggaaaatggttgcaggtgaaaagacgagaaataattttaattaaattaattccccacctaacaatgcaaattaacagataaagggaatgaggtagcttaaatgtctcacttcatttttgtaaaggcactttttacgaagaaaataaatctatgatcactgttcaggcactgttctgcaaattgccatattatgttgatcatccctgcctaatttagcttaattgccctgaatggactcggcatatttttccgccatggccgtgttggccaatgccgattttgccccattggtcgtcgcattggcaatcggtgtgccgtccgcgctgctgtactgtgttgagttgggagtgatcatcgcaaatttcggccattttcgctcatcgttttttgtgcttgtcattgtccgcggaatttgcgtaaaacaaatattttgaaaaagacaatttctattttgaattatatttttaaaacattttcagagcctcgtcaattatgtgttcaccttttttgctcctcgcttcggcaaaattggccttttcttgccgctttatctgcgcttgcctcgtcttgtgttggcacttttgctttttgttggctattactccttccatgtggagaattttttgaccgcatttttactgctcaaccgcttcacctccattctgatgccgatgaattatgaaaaggtggaagactttccatggtcgacaattaatatccataaaaccgaataatcaccaaaatacaaaagccaatcaaatacaaaattcaaaagaaggggtcaacaacattaatccaataccacacacactgcatccggcttttggacttatccccccgccccctccgtttttcccaaaattttcagtccctacctacaccagtattattttaaaaataattaattaggaaacgttcccggcttttctcgtcccgacaaatcccgaccctcattttcccctttttttcctaaaattcgaagtcccggtctattctagtattattctaaatccagttttttatcgaaaaactattcttattttagttttggaatcgttcgcttctttttttcttggccctttctttcattttgccgttgccattcactgctccaattttcggctttgacatgttcatccatgttcaatctgacaatgtcactttcacacttgacgaccataagacagcaaatgttcgatttttggcactaataaaattagaaaataaaataaaattgcacttacaattaggagattaacagcagtgagttcgccgcttggtccgccattctctttggagtcatttgtctgctgctaaatttggcaacactttttgcctacaaattgtgccgttgtcaaaatgccggtcttcaaaatgatgccagttcaaaaattgagcgcaaaatgaccatttacacggtgttcaccttttttggccaactgatttttgccattttcatggtcagcaaaagcaattttaatttcttaattgcaataataaataatttcaaattattatttttttgaaggttttcgtttatgtgaccgccacaaattttgttgacgaacagaacaatcgctattcatacgcacagaaatggtttaacattagcttggagatggatgacttgctttttattgcaaatttcaatcaatacccgtgggtgaacgatttggccacggtggccataccggcatggtaattaaaagaaccaaattgttaatttcatcgtaatagtttattcgggttcgcaatttaattagtcaaaaagaataagttcgcaattttaatggccgatttaggcttttgctgtgggtgtcgtccaaaatgcgcgaaattcttgccgaaaaattcaacaaatttactagccacttaaagaagcaaaagttgggaagcattcaactgacggctcagtccaaaacaaacaaagttcaacccaaaacaatcaaagttcaaccagcggcaaagaatgttatgggataaatggaaaaggaaaaggaatggaagcataattaaagttttaacgtttattttgataattatcttaaaattaaaaattagtcatcgtaaaatatgaattttaaatttttttttcttaaattggttttgaagttttaacaaaaaatattaaagaaagccatggaagcataattaattggctacgcgataggcgcagcggtagaaaaaatcggtaattctgaccatttttaacagattttcaccgaaaaatggcaatttttaggtcaaatttaaactcttagggaaattctgtggacggaacggcgccgatagatgccgccgtgaaaatttttgggatttttaataaattttgttaagaatgttttttcaaaatttcaataatttttccccttcgccagcgacccccccccaatggtcatccttaacagtgtaaaaatttctctgtttccgagactaaaaaccagagaccgagatgcgaaaaacccgataagtttctcgagtcaagaaccgagactctcgcacatccctaatagtaatgcgcgtgtagctgaatagccaattcccttttttcgaaatttaaggaatgctaatgttaattagccttttgtgtggtgtataccgatactgaaaactaataaaattaacttcataacattgctcaaaacattcttgattgcatttgataaccctaaatgttttatataaggctctcatccgtccttgggtgccaggacgtccttggattagggcctcgccgattggaaaattgaaaaagtccttgtttacagagcatcttaaattccaaaaagcgaaaaaggggattgctattccgtcgccacgacgcattgccatgttcaagtcgttgatcagggcagttttaatttttcaaatagtaaattatgaaatcactttatgcctatttttaccttttaatccctaatttaacccacaaaaagaaaaataatgagttttattagttaattagccgttttagttcgatattctccggtagtaagtaattcattaatgtctgctggttgtgattttttctaatttttattttaaattgcaatcttcaaaagatgctttcacaaatatttatctctattattcttttgccgttcttttcaattccatgcatccattgctgagataatgttaaaaatagagaatataggctaattaaaataaaagaaaataataaattccaaaaaataaaactgatactatcttaaattttagttaatagttaaaaaataataataaaattataaatttttaaaaaatcagtttcagaaatgatcacttcaaacaaaagcgaaacccaacggaagaagaaaagcatggacaaattctagcaatttatttcaaaaattggacagtaatggacagtatagaaaacactcgaaggacaaaaggaaattgtgaaaaatgcaggcgtaactatagtaacatttcttcagttaattgtttcattcactattaatgtataatgacaaataatatcttgtcgtagatgaaccaccaaaaacttgaacatgctggtcatctttatgtctttgataaacttagtgcgtatggttttaacaaattttggaggtgtgggaacaaaaataacaaggacatatgttgaaacaagtcaatgagaatgtctgtagagcaaaccctgcgcgattggaagcaaacgcgtcattataggttaggcaatagcaaatgcaaaatattttgtatgtatattcgacaattttaggaataaaaggtagagccattgaagccgccgagccgccatctgcacttcactcaatttcactccaaaaggtgggaacccctgtgttgtctgaattccgaacaaaaaaaatgcaacaaagcaagttgtgttaatttctctgcgctcattgaaataccttagctaatcaaaagagccaatgaaggaattactaccgcaatttcgcttcatctgagccagtacaaatcccgccacaatagcaaatctatgcacggaacgaaaatgaatttggtgaatgaaaatggaccccccgtaacggttgggtaatgtattttcttcgattcattttattttttgttaatattttgatttttgggcagatgtcttagaataaaacctagcgccacatatttaaatttaaattcgtcgaaaagtttaaagccaaacccgaaagtgaattcattccgaacagtaaatcgtagccaaaagatatttgggccacatgaagacgaactgacacgatcctttcctttattcgtacaggcaaagagacaatgccgtaacacttgacctcttatccatatatgtcaattacatgctttgtctgacggcttggcttcaaaaattcttggtccaatgttgtaacggccaaaattttgttgaaaatgcagcaaaatcagctgtgctcctccattgagcattgcatttgcgtgtagacgaagtgcccccccggccgcaattgtagcatttgaaagtttcaggctgttcggtgtttgagaaatttaattgtcgacgctggtcaaaattttggggaaaattcaaatgttgtaagtccggttgattgattcgattttgccggttctcagtacaaaaactactttcaaaaacccctttgtcttaagcttgtcgggtgagatttagtttccattttgcgaacacagacgcgataatccacccaggagcgccacgtcgtatcaggagagaagcgatgttgctcacacaattaggaaacggggaattgtatcccaaaattcaaacacaattcaaacaaaaatccttttataattaaaagtccaaacagcgaagaaattgaacaaacataaaattaaccaaaaacgagcgaatatccaatctgaataaaaagtgaccaggggaagaaaagtcggcagcggaaaacaatcaataaatgaaaaaggcgggagattcaaaattgagaacgaaaggacaaaattaaatgagagagaatacaattaaataattattaattaagtcaaaaattgggaataaaacaaattaacaatctatcacatttccatgaatctctcattttagctggtcaatttctttaagtaaagactttttaaaccatttttcttgttttcttcggcgttaaaataatataaaaattaaagaaatactacgtttgttataagaggactgggtaatattgccgatggtattttttgaaattttcaaaaaccgttaaaatatgtttcttgaagttttcgggatgctagtcacgaatatgaaatccatttagctaattccaaaccactgacccgaaaaaagtcaagaattctttttttcatcaaaattctgctttaaattctaaaaattttggttggaaggtacaaaatcattttagttttataatgaaaaaaaaatatttgtttttct

SEQ ID NO: 2891 - DNA, 4014 bp, Heterodera glycines
  unsure (1)..(4014): unsure at all n locations
atatttaaatgtaataaaaaaaagcgaaaaaactaacgctttgtacggaattgtacgcaaatcaacagcgttgctcacttttgttccaatcggcgcaattaacgttaccttaataacaaaaaaaatagcgaaaaataatagtagaatccaagctaatgaattcaatttgctcttggattcaaggacgccaacaaaatatgtttttgcaaaataaaatttcccttttcaaggacttacagaaaactcaagcaaaatgttattctattgctgacacatgggccaacttaaaggacatatcttttaatcctcttctcacccgaattgtcctttgggccgaattatcccatgctgagtgatgagtgagtgatcatcattaagctttaaagcggattcataaaggcctattaaaggaaaggatgaatgggaatggccagttacatcagaccatggatgtgtccgaatgccgatttccaatggcacaattctcgatatttgtgagctcggaatcccgatttcttatagcctaattttttaatccgttgaaattccgatttccgaattttttgaaggcgtcgccaaaacagccctggctcagatggtaagagcaccactggcttagagagaagcggatcaacgcaccggcggaggccgagggttcgattccctcctaggtattttcttttttcccaatctttcaagtacgtcataatacaaggacaatttctatttacaccagaatagtgttaaccttgttgccacgttgtgccaattgttcggtcaaaaagtagaccattcgttccgtgccgccaccttttgttgggggcaatgcgtccaaaattggcggagtgacaatggcaatgcgcaaaggttttgatttgtttaaaatatcataaacattttcgcactaaattaaaaagatatattaaaaataaaaattatcaatcgattttaacgagttaaatctgataagcagaaaaaaaattcataagtaaaattaacatccatttataaaaataaaaaaattcattttcgcttaaaaatccaaaaaggtaaatttttcttaaaacaaaattttttgttaaaaaggtatgcttttaaaatctcaaaatcacttttctcctgggacgttggctgataatttgtaatttttaattttcaacactgttgaatgtttgagaatttgagttaaattttttattttaaatttttacttttgtgattttggttttacaactcattaactcactaacattaatttttgttcttgattttttgcttctgctaatgacccattagcaattgatgacgaaccaacagcaggcaaaagtgatgctttgacatttttcaactcattaagtcggctaattgtgcggtaaattttcacatattcattagcaatttgttgccattgatttgatgtgccgttgtacgatttgacaatgtgcaattgacaaaatcgaagcgcttttttcgctttcaaactcttagccgcttgatcactgctgaccgcaacattggcaccatcaaacagttgctgatgtgccgttaattgggacagtaactcgttgtctaccgtactgccaccgggctgtgcatgcagtgttgtcaatgctttgtgaatgtacggcttcatatgaacaagatgttcaatggtgttgaaatggatctgaaaatctttgatcatttgggtcaatgattgtcaattcgtgattaaataatattaatttatttatttttaatttcatttactttggaattttcaaattttcccgcattttttgctctttagtcaataagaaataaaacaggaattttggcattaattaacagaatttatttagtgaattttctcaatttatttacaatgtcgaactcattggcacgttgtcgaatttgttcaaacatccaaatgtaaggaaaattccataagccgggaagtgctctgttctcgcgcattgcggggcttaaagcattttacaaaagattattaaatatattttattatattgaattattacagtaaaaatattttaataatttgaaaaagaaaccagcataaattaatatttgaaattgtcttaattactttgaaaaataactgcattattaaatatatttttcccctgttttatacatttgaatttgcttttataaaaaccatttttttagtcaaataaattatggttttagaaatattttttctagcacatttgtctattctaagcttttaaaagaaaccaattagaaaaaactgattactatgcgctgattaatttggctgaagtttttgagtcagctgaggcgaacaaagtgacctatattttagcaattaaatattcaattagacccagttcaactcaacacgacccaagtcagcgtagttatagttgttttttctgagaaaagttactgcgcttggcgctgagttgggctcgtgccgaattggcccttttttattggcacttacgtcgtgcccatttttgaccaacatttcaaccaaattgtacacatattcggccgacaattcttccactggcctttcttttgatggcataatgccatttaagcgtcgattttttggcggaatgctctcaaacataggcgccacaacagcaatgcacaactgtttgctgttcgtgtccagtgctattggtggaaaccttccatcaaacagcttaaaatagggttattaattttttatttcattaaaaaatattcgtttttatattccaactcaacgatacgccaaaaatgaaaatttaaactcaaggttttatagaccaagtctccgtatttcaaatttttcgcaataattcaccagataaattataattaattcttttgtgctaaaatagtattattaattaatttattaaaataaattgctttttatttaccatccgaaacattatgccaacaatgcaaatcagcaaaggtgccacaacagccatgcgcaactgtttattcgtgtccaatttgttgattgcgttcattatattgggcaccgaagttttatgggccatcgttaatgtgctaaaatcagaacgaattcccataatgtatcctaatttttgtattaaattagacgaaaaaatatgtcgaaaaattgtcgaaaaatatgttttggtcgaaaaaattcttttttttctatttataccttttaaattttaatgggtttttaaagcgaatttttggataaagcaaaaaatatttgtaaaattcgctcaaattcaaaaattgctcgctctgaaatttttttgttatattctaatatactaagaaatttttgtttaaatttaattatttaaatgttaatttattttaaaaatttaacaattaaatacaaaaatattaatttaaatgcttttgaatatttttcaattacattcaatcatcattttaactaaactgatgcggtgagcataaccgttacgcaataattcattaattaaaataataataaaaaaaattagtttattaattggtgaaaaattaattagtcttttttgcatattaatgaaagggaggacaataaattattattgttcttttcattagttttattactaataatttagtcatatgaactggggtaagcctcaattaaaatgaatttgaaaatttaaaaaaaatccgaatttttgtcttgactgaattacttctcaatttcaataaattgtaatttgttttattttttttaatttaaaaatttaattaatttgttatttttttaataaaagaacagacattaagataaaaattatcttaaattaatttaataaattagcaaaattttgaactaatccttttaaacaaatttgcttgaaaacttatattttactaactcgaaatttaaaataaagccaaatacaaatattttacacaaatcaacattagtaataaactatttatttaatctncatttatacaaaataaaacaatacaggtggttagttataacaaaaaacaatatagccagaattactaatttaatattgcatatctgatatacac

SEQ ID NO: 2892 - DNA, 2257 bp, Heterodera glycines
tattaaattagacaaaaaatatgtcaaaaattgtcaacttacctatgttttggtcaaaaaattcttttttttctatttataccttttaaattttaatgggtttttaaagcaaatttttggataaagcaaaaaatatttgtaaaattcgctcaaattcaaaaattgctcgctctgaaatttttttgttatattctaatatactaagaaatttttgtttaaatttaattatttaacataaattaaaatgaaaagaaatgttaatttattttaaaaatttaacaattaaatacaaaaatattaatttaaatgcttttgaatatttttcaattacattcaatcatcattttaactaaactgatgcggtgagcataaccgttacgcaataattcattaattaaaataataataaaaaaaattagtttattaattggtgaaaaattaattagtcttttttgcatattaatgaaagggaggacaataaattattattgttcttttcattagttttattactaataatttagtcatatgaactggggtaagcctcaattaaaatgaatttgaaaattaaaaaaaaatccgaatttttgtcttgactgaattacttctcaatttcaataaattgtaatttgttttatttttttttaatttaaaaatttaattaatttgttatttttttaataaaagaacagacattaagataaaaattatcttaaattaatttaataaattagcaaaattttgaactaatccttttaaacaaatttgcttgaaaacttatattttactaactcgaaatttaaaataaagccaaatacaaatattttacacaaatcaacattagtaataaactatttatttaatctcaatttatacaaaataaaacaatacaggtggttagttataacaaaaaacaatatagacagaattaactaattaaataattgcatatctgatatacacaaattcaaagtttaggcatatacgaatgttcactagacatattatgctaattatatgcaacagggatgatgaccgtttacataataagtttaataataaatttaatttaaatagaaaatagcaaaaaatttagcattagcctgaaaaaatattcgaaattttcaactgtctaaaattaatttcataaattccaagtcaattaattgtgttcatcatcctgtaatatatataattcatataatatttactaaactactaatgatcatgacagtttgctatgaaatttttgttcaacatgcggcgatagactttttcataattttcggccattttgtccaatgaccatttttcttcgacagtttgtcggaccgtggcacggtacaatttggccgcttggttgatcaaatgcacaaacttggccacctgttcaacaccaagccgatctttgtagtcaaaagtataaccgttgcggccaatttgcacaatctgtgattgtgataaatttaacggtcgctaaataccagtaattacagtggcattattaattacctagtaatggaactttttaaatattagtatatctcttgggttttgcttaatcttacggtaatttcaaagaataaattattttatgaataatataaaaaccgacttccggcacggcaccgcgccgatttgcaatcgccggcgttccggtggccatggcctcaatcatggacaatccgaacggctcgtcccattttggcgtgaacaaaaatgccaaagcattgcccaaaaaactgctaaaaatatatttgtttatgtaattattatttcttttttaattaaaaatcataaattaaaatgtattgaaaataatggcaaacgcactctctttcgtcaccgccaatttcgccaacatattcaaccaaatgttgattagcattgatcaacggctcaatttgcttgtgccaatatgaatgcttgtgctcgtccaccaattgtgccgcaattttcaatttgatgccggaccgaagcgcaaattcaatggcaatgtccacgcccttttccggtgccattcggcccatccatgccaaataggggcactcggatgtgccgggattaggtcgaaatgtcagctggtcaagcggaatgccgttgtgcaccgtgccaatccaattcagatcgaaaatgcctaaaaatttgtgggttacattctccatgttttttttggcattttcggagaatttcccaccccgaaaggtatgaaaagattaaaatttattgaaattgacatattgtattgggctatcgt

SEQ ID NO: 2893 - DNA, 1731 bp, Heterodera glycines
ttgttgggggaatgcgtccaaattggcggagtgacaatggcaatgcgcaaaggttttgatttgtttaaaatatcataaacatttttgcactaaattaaaaagatatattaaaaataaaaattatcaatcgattttaacgatttaaatctgataagcagaaaaaaattcataagtaaaattaacatccaatttataaaaataaaaaaattcattttcgcttaaaaaatccaaaaaaggtaaatttttcttaaaacaaaattttttgttaaaaaggtatgcttttaaaatctcaaaatcacttttctcctgggacgttggctgataatttgtaatttttaattttcaactttgttgaatgtttgagaatttgagttaaattttttattttaaatttttacttttgtgattttggttttacaactcattaactcactaactttaattttctgttcttgattttttgcttctgctaatgacccattagcaattgatgacgaaccaacagcaggcaaaagtgatgctttgacatttttcaactcattaagtcggctaattgtgcggtaaattttcacatattcattagcaatttgttgccattgagttgatgtgccgttgtacgatttgacaatgtgcaattgacaaaatcgaagcgcttttttcgctttcaaactcttagccgcttgatcactgctgactgcaacattggcaccatcaaacagttgctgatgtgccgttaattgggacagtaactcgttgtctaccgtactgccaccgggctgtgcatgcagtgttgtcaatgctttgtgaatgtacggcttcatgtgttcaaggtgttcaatggtgttgaaatggatctaaaatttagtgattttttcggttgaaaagatcacgaccgattaatttgatgatttcaggaatgtaaataagaattggatcaacggattagtgatatttctaggactattattaagacgcgagcattaattagcacttctgattaattagcctatcaatatttgttccaactaattaggcactaattgaccgaatttatttatattgtttacaatgtcgaattcattggcacgttgtcgaatttgttcaaacatccaaatgtacgggtgattccatatgccgggaagtgctctgttctcacgcattgccgggcttaaatcattttaataatatttaatttaaaaatccatttaatttaaaagtggcattgttaaaattaataatttaaatgaatttaataaaaattatttactatgcgcttattagtttagctgacgtcattgaatcagatgaagcaaacaaagtaacctaaattttaaattaatttttttaatattcaattaaagttaaagctattttagcttttatatattgtatatttttcggcacgaaaataaaactaaaatttatttaaagcgcagctattgggctcgtaccgaattagcccttttttattggcacttacgtcgtgcccattgttgaccaacatttcaaccaaattgtacacatattcggccgacaattcttccactggcctttcttttgatggcataatgccatttaagcgtcgattttttggcggaatgctctcaaacagaggcgccacaacagcaatgcgcaactgtttgctgttcgtgtccagtgctattggtggaaactttccatcaaacagcttaaaatagggttattaattttttatttattcaaaaaaatatt

SEQ ID NO: 2894 - DNA, 5037 bp, Heterodera glycines
agctgctggatttcatttcagtgtatgaagagggccttttaagaacgaaaaaaattgacaatttttgctgtcacgcccgcgcgccacgcgagcagggcagagccagcagcaacgtcattggccgcaaatgctgccacaatctgttgtaatatgtggtccatttaatttattggttaattttccgcgttgacattcaattggttccgggtgccctgctgagcatttggcagcgcgggcgacgtcgacgggtatggtgccggggaatgtctcggcgtgccaacgcgcttcctccctccctccgcccacccattcggcatggcatattcaaatgtggcacgccgaattacttccagataacaaatttttatatatgcacacacatgagtgagtgcaaaagatattataattttatgctgatgaattctgatgaaattattaaaaaaaaaaattacataaaattatattaaaaaaatttaatataaaaaaatatttattaccaataatttattgtgtttctgacgaatatagggattccctggttctggaatttgctttgcataaatagtggtagaaggtttagccgacatttgcggaccactattttggaattgaactatctaaaaacaaaatgaaataattttttttcaaaaattgtgtgacccaaaatagattttttttttaagcattaagacgaatgaaaatttagaaaaaatttttcaaaaatttcgtttttaagctcccttatggtgctaaatttttggtcacttaatttcatccttaaagaggatcaacttgatcaatccgtgctgagacgatgcgaaaaaaaactcagtgattgataaaataattaaatttaattatctattcattaaattcatgtaattattatacatataaattatattgaagtttttttttaaattataatattatttaaattttaaaaatgaataaaattttatttgctttgaggttatttttaatcaggaaaattataaaactgaataaattatggtttgtacgggtacggcttgcttaaggcctaacagcggattttacctgtataaatgaatcatagaaaatataattccttatacaatattgactgcaaaaaagacgtgtaagtgaaattttcgtatgggtatgatttttttttttgatcggagatagaatactgtaagcatacctttttttttgcattttccgcccatagatgaaaaaagatatttgtgcaaaaaatttttaaacaaaaattgctaatttttatataattcttttttcaatttatatcaatcagcatcaaagatagcctcgagcaagcactaattaagtatcagctttctgtcattaatttaattttttggaaatattgaaaattttaaaatggattcatatcataacattttttgacagttcagctgcaaatgtcggtccgcatatgtcggtcgcactacggataaaaggcaagctgccgtttattaaaattgttcaaaataggaaggataaacaaaataaccaacagaaaatagaaacaattcataaattcgatgcaattaaagaaaaattgaaacagaaaggaaaatatcaatgggaaaatagttcaaaaattgagacaaaaattggaaaattattaggcgcaaattgccaaaaatatacaaatggaaaaaagaattgatgccaaattataataaaagtaagtgaatttatttggaagttaatttaaattttattttgtaagcacaaaagaaatattccaatgaagagaaattaaaaatgttaaagaaatatttcctaatgaaagaagcaaatccaaaaattagcgacaaaataattgccatgaaattggcaatttcaagccgaactcttagaaagtggaagagggaatttgaataaatgttgatctagttatttttaagacccactattctcaaaaaatatttgctgattttttatgcctaaaatccctcaactattaattatgttgaattttttagattatctacagcatttttcttcaatttcaaattagaattcaattagcttaaaaattttattaatttttctgggatttatttatttttatttaattacaatttactggctttttcaggaattacctaatctatcggttaagattagggtagagcggtaatcggtaattgtaaaaaaaaaccggtaccggtaattttcgggttgaaaaactggtactttttggctgggaaaaccggtaaaaaaacaggcactagtaccggtaccggtcaaaaccggtactaggtactcagttgtaccgtttttttcagtaccagtaccggtaccgctctactctagtctctagcgtcactacagcacaaatgacttctaaattgatcgacatatttttggcattttgtcaaaacattcctttagctttttcgtttttgccttaatttaatgccaaatgaacaaaaaaaaaaaattgacaataatttttccacgaaaattcgacattatttttttcaaattcaattaaaattctgcataagatttccaattttgtaaaaaatatagttctcaataaataaaagtcaaaatctcaattttctggcaaagcatccgccttttctcttcacaaaaagggttctctttaaaacgtgaacctgaatgtttaaaaagtgcgcaataataaattaattatttccactaattaccctgtatacttggattggcataatggtgcttctgtaatatttgcttttggttacggtacattccacttttgccttcggtaaatcgcaaagtttgtacgagaggcacggtgaagggatagtgaagatgccatttgggtaattgttgatgaagcgggaacaatgccgaatggcgtcaaaataataatgccttttcggcatatggccaattatctaaagggcattttttcattttatttaacgaaatattaaattaatttcgtgtttttcattttgttaattttgtgcttctcaatgtttctgtaccttcattatcttcgtgtcgttcagaaaagcacttccgtttcccaattgtccatcaaaatttgttagcaatttgtcattgtaaccgtttgttgcgtttgctcggatctgtcacaaaaaagtccatcatttttaaaataatttcaaaacaattaaattattttttttaattacatcctttgaaaggtgcaaaattgccatatactcagtggacaattgcaccggtttgtctttccctttataatgacgcgttaaatgcacccaaaaggcatcaattagtggcggtctgagcacaagcttttcactgttgtacaattttttggtgaaaattaattcacgaaagttgttcacaaaatctgaaatatgaaactcatttaataataaattagaaattttaattcaataaatttcgaaagtttaaattttattggcataaaatcgtcaaaattaaagcggtattatgagaattaaacggagaatgtgaaaacttgaaaatatggtaatattaaagtataaccaaaaattattccacagaatggtattgaatttttacaaatgtttataacaaaattatcatcaaaatgcggattgccccttttacaggaatctcttataaatgccgtgtttcgtaaattcgagccccctcccctaaaatgaaaaataaagccctcagggctctattttagggaaatacggtatacagtatgatggtttttgttatttttccatttttctacaatatttgattttataaagaaaacaaacttcttgaagattcttttttgtgccgtggtaataaaatgccactttcgagtttatttatgtaaaagaatggtgccctcgggtgttggagaagggcggcatttaatgcgtcgccaaacgaagtaaattgtgtcgtgacaagcaaatcgtccaagtccaacaatgaaatgaatttggcactttctcgaaactcgtaaaagcattcgtgggccatggctaattgccccgaatattcaatttgcaattcgggatcaaaattcatcgctttcaaaattggtaatttgaatccctacaaaccggaaaggtaaataattgattaaaaacaaatttttattgatttttgtgcggaatataaaaaattaagaatttttttgcaaatgcatttaagatttgttgacaaattataaaaaagccctgaaaaagcctgctggtgtccgggtctggaccccggtcgggttcccgaaccccgtctaaccctagtttaacctctggaatcaaatttctttggatcttgctatatctgtgaacattaagttcttttgtttgcatatttattgtttacttaataaattcttgtatttcattttataattcctaaaattttttcaattttgatcagtttaaaccgaatggtgctataaaaatttttggaggcctgagaaaagcatcgtggagcctccaagtagaaaagtgttaaaacaaaatctttcagattttttgaaaacaatttaaaattggaatcattcgaaagccttgaaaaggagaagcttttaaaacatttttctctaccactgttgcaaaattgtgtattggatttaaaatctaggagaaaaaacgttaattcgaaaaaggaaatttctatttttttctattaactgagacaaagccgaaaaaatacgccaatgagatacgtatttttctctggcactatccctttttggttcatctctcgttttttgaaatcgatttttgttaattcagtcgaaaaaattaaatttcagaaatttcatttctgcccccaaaattgctcgtaccattctcactgcaagtcgcccttccgcctcgtacgctttgatcagtttgaacactgcactaagtgcggacacaatgtgcaacaccaccaaatcgacgccaagcgatttgtacacttccattgcggtgatcaaaagttgccatttttcaaacgcaaaaattcggctaacgcaaatgagaaagttgcgcggggtttggtcagattttcggataacaagctgaaaaaggagaaaataaaaaagaaagtgccaaaaat

SEQ ID NO: 2895 - DNA, 4196 bp, Heterodera glycines
cccggcactttgcgggacagcgacaatttcactttattggggaatcggtcactcatttgcattgtgtgattgactaattttgcagtttttgcttcagttggctgcgattgccgggacggacgcttcaaaaggtttatggatgtgtggagggacggggacacgatgaaaaggtgggccatggcaggacaaagctcaaaagaggcgccgcttggcctttgaggtgttcgtgggcatttaattcggacggaagcattgcacgcgcggacattagcacttacggtcaaaagacaaaatgccaaacatttttaatacaaaaaatgtcaacatttgtttagcttgcctcgacggttccgacgtttttccactgaacaaaataattcaacgggagggcggacaatatatgaaatgtgtgcaaatggacgcaccaatggcggacgatgggagtgccaaaggggcgacaaatggggaaacattggggtggcgcaatttgacggacagcgaactgatcgaaatgagcacaaaaaaggcaagcgaaggacggaagaaaagcgactgatttaaaaatgaaatggcattccaatacggcacagttagcaaaacaaaatttggtggaatatttcggagtcgggcggagggcggcgccgcttttggcacgcggcacaaaaacagtcgacggaaaggaaaaagggaaaggtgggtttttgccaccttccagtttattgaaaatcccctccagaaattcccttccaaagacaacccgcggactgtgccgactttctgcccttttgcccgcgtctctccggctattgccattttatgagcggccctttggagcgcggactcgtgttggatgcgttttcggagttgcgcgagttgcaaaagcgatttgatcagtttgggggcagtgaggacgagctgagtttgccgatgggatgcgaaagtaaaagtgatcggaattgtttcaaattgcggtcgtttttagaacagccgagcatcttccaaaagttgcaattgctcgtcgaattggcgtgccagcaaacgtgcaaaagatgtgccaacggtggggaaattggcacatacattttgaaatgaaaatgataaaacattttgaattggcagatgcccaaaaggaatcggcgttgacgagtctcgagagcacttcccattgcgggaaataaacgaatggacagagggggggggggggggggaatggcatcaaaagacatgttcaattaaaatcaatttatgccaatgttatcgtttattgcgcaccggtatcactctgatcagttttgatcacccggggcttcgatcattttcgttttgccctttttccgctgatcactctttccgtccgtcctttttccgctgatcactctttccgtccgtcctttttccgctgatcagtccgtccgccgtcctccctccctcagttttccctctcgatgtacaccgttttgtgccgtcgtcccccgtcccgttcgattttgaccacgcggtgccgtctccgttcgccgctctcttcgctgtcgtatttcctcagtttgtccagcaccttcagatggacccgcttcttcttcggatatccgtcttctcggtccacatccaccttcactttcggcactcgtacgtccacattcacttcccttcccctctctccgtccctttcgtattttacgacttttccctcattataatgccctcctcccacgtcgacgttcacatttttcctgtgcccctgcacattcacattgaccaatttgtcatttcggtctctttcttctccgccaacgtcgacgttcacattctttcgcgacggcgcgtgaatatttaccaggccgagcacgtccacgtccgtgttgcgtttctgcaaaatgccaaagagttttttgggcctttcattttgaggttggcatccatggcccatcatgcgtcccaattctctcgtaatggtctcctgtctttccctacttccccaattacttccctaattgcttccctaattcgtcccctaatcctcccctgattcatccatccctctcctctctcgcccccccacgcttttcacctttctcttcagttcatcgtcttctcttccttcgactgcgaaattgagcagaatcagctgaacagtgaagagacagaggaagaaggagcagttcattttatactcaaaaattgaattggatttccaattaatttttgagaatgtcgccaaaaagagggggccaacgctcttaaaaatggtcggccggggagggggcgttccgccaaattgcgcatccatcggcgagtgttcgccggatcgatcgctttgatcagtgattaattgttaaattggaacgcctctcgcaaatatttaccatttgattaattccaatggccccaattcacaaattcacatgagtgtcctccccccaatggttttgcagatgagtcattaattgttccaattccttccaaggcaaaataatttcactttaaactttttaaaaatttctcgcgtttctttttttatcgaaaacttcgcgaaaaatccgccgatggaattactcaccgaaatttacagcagcaccttttttggaacattcactttccaatcggtcggtcggttaatcaaaaagtgtcattttgcgaaaaatgcgaagggacggagagaaaaaaaggcaacgaaattaaataaattaaattaaaatgagcgatggtttggacagattttgcgcaaatagcgaagattggcgaacatttggcgccgcagacatttgcgccgcgacagttgcgccgcagacacttgcgccgcccagccaaaatgacacttgcgccgccgacatttgcgccgctgccatttgcgccgccgacacttgcgccgcgacagttgcgccgcagacacttgcgccgaccagccaaaatgacacttgcgccgccgacatttgcgccgctgccatttgcgccgccgacacttgcgccgcgacagttgcgccgcagacacttgcgccgaccagccaaaatgacacttgcgccgccgacatttgcgccgccccccccccaattttgattatttaaagcataattttctcaatcaattttaatgtttaaagttaatgtagcattcggaattaaaacttccattccaattacattttaaataaaattcaacattaggtaattatcaacaaattttactaaaactataaattaaacgcaaatgacaactaattaaaaaaacacaacaataaatcactaattacaaaggtaaacacttaattttttgtctttggtcaacgcatacagtaagagcaatgacaagttttttttcttcttcactgccgagagtagcaagaaataaaattatttttttaatgaactcaatttcaatttttccggcttttaaacacaattttgaatggtctgatcaattcggaataggttattaactagtgaattttatattaaacttaattagataaattttcggaaaatcccacttaaaattattatgtcagattcataaaggcaatgaaagatgaagaggaatatcaaaacaatcgtgttcggcttttcgaaattgatcagacaaggggcattgccgatcgaccacgtcttaaaaaatacatcgaaaatgactcagctattaggcaattggtaattgcttatgacgcgaaagaagaaaaaaatgacgatgatttgatccgacatattcatgcattgcaataccgtgtggggatgaagggattcgaaggatgggattagaatattgttgaaaatattaattttgttgcgttgttaaaaattagtatatgtttgtttcgcttatgtcaaaatagggggggggggcggcgcaaatgtcggcggcgcaagtgtcattttggctgggcggcgcaagtgtctgcggcgcaactgtcgcggcgcaagtgtcggcggcgcaaatggcagcggcgcaagtgtctgcggcgcaagtgtcgcggcgcaagtgtcggcggcgcaagtgtcactttggctgggcggcgcaagtgtctgcggcgcaactgtcgcggcgcaagtgtctgcggcgcaaatggcagcggcgcaagtgtctgcggcgcaagtgtcgcggcgcaagtgtcggcggcgcaagtgtcactttggctgggcggcgcaagtgtctgcggcgcaactgtcgcggcgcaagtgtctgcggcgcaaatgtcacatcacca

SEQ ID NO: 2896 - DNA, 4351 bp, Heterodera glycines
aaaaaagttataaggaaaaaacctccaaagtttttggtttttttgtaatttcatattataacttttttgaaaattgtctaagcgcgaagcaatagcttagaaatagcttctaaacatattaagctttcgaatgataccaagattgttagatttggttgacaatcaaaaaagttatagtcaaaaaactagtgctggcgccgaaacgccgcctactccgaattgatatgccaaaagatgaagtataatggatgaaaatgccaaaagatgatgtaggaaaaataccaaaaacggaaggaagaaagggcacaataaaaatttacaaaaaaaaataacaaaaatttctcaaaaattaaaattaaattttcgaaaaatttaagatttttattttttagactaattgtgaaaaatcattgtaattcataaagaaagaaaatttatgtataagaaaactgatatttggtatctcagttcatttgagattcgtgtaaaaattatttttaaataattatttttgaacatgaaaaaagtttttgacattttcgaatttatttaaatttttcgaaattgggaacgacaaattatttaaaataaaggattaataaaatttaaattggaggagatgaagcgcgcacacacacacaaagcatcaaaatggagctaattcatctgcggcgggcagaacaatggaagtgcgcgaaatttaggcaagaaacaaacaaaagttcaaattgatcgattcaatttttgtgctttcgtaaatcggcaaagcgatcggacagccggcgaaatgatcgatcagccgacgacgccgcgggcggagaaaattggcgaaggtcgtcgcgcgacaattacaacacacacagattttgtggagctgagaatgagaatggtaagcatgaatgacgacgacagagcacaaaatataaattaaaattatttaaaaatgggaaaattattacagtcgataaataaaaataataaaaataaataaataaatatttagcaaaaataaaattttatgaaaattggaataagtagtcgataaataaataaatattaattattgtaaaaaaaagaaatatttagcaaaacgttaaaatataattaaaaatgaatttaaaaatgggaataaatgacagacgataaataaataaacaattaaaaaaattaattatttaattaaataaataaataaaaattaataaacaataatataaataaaataaaaaaataaattattaaacaaataaatataaatgaataattataaataaaataaaataaaaaaagaaatgaatgaatagagttttcgtgattttagtcttttgaacttttttcagtattttttaaatttacatttttctcttttaagcacctaaaaatccgatcaccgcaaaattaatgtaagttcaatcaagtgagcctccggatgtttgccaacttatgctgctgatccgtcgcgccaacaattaattaattaattagaaaagaaatgtttgctcaaaatccataaataatgttttattgttggatttagccttttcgtagtattttttttggattatttaattctttttttcatgcttaatcttcttttgtcaataaatttgggtgctttatgagcttaaaagtctcttggattaggaaacccacggctttcaaatatcattatttgtaagaattttctttaatttcaactactcgaccaaatttttgaaattttattggcttccggcattgccggactcagaaattttactaaaccaaatttaccaaaatgtaaaactgatcccctccctgccctccaaaaattattttttgaataatgagctaaaaaatttagtgacaccgaaaggcagaaaaaaaaaattcgttccctcatttaggagaaatgtttatgaaaatcttattttttgagtcaaaataattagattttaagacttttaaaagaaaaataatccatttttgccaatttcggggtttttgttccgcacattttggcattttcttttccatacaaacaaacagttgcccttttaaaagaaaaccgtagaatcaattctaaatttaaaaacctaaatttttttttgcactttttgacattttttggtgaaatttgattcatttttttgtgcgtgcccttcggcgggagaccgaccgcggcaccttttgtgtgccatggtgagaaaaaatagggcgtatggcccggcaccgccgccggcgccgccaaaattggatttgaatttgcttttggcgcctatttgtggcgatgtgtcgtcaatatttgccatcaaattctaccaccatcattcgcacaaccatcaacagttaaatattgatgaattttgtgtgggaattttctcgcttttccattgtctgttaaggcgagacattataaatttatatttttcaaaatttgcattactgtagcgacactatgccaagaaaaaaaattcgccattttttatgtaacataaacatattttcttggtctgaatggagcaacaatttgaagttttcgagtggtcccctttactgtattctaattcatactgtagaaattttcggccattggaaatcaataaagcccggattttttgtggcaaaaattcccaaaatacataattaactaaatagtgacaaaaaatgccaaaatagtggcaaatagtggcgaaaagtccataatgacataatttccagcaaaaatttagcaaaaaaaatttttcgacgcctccgaggaattatgaaccataatgcgggaatctcgacgttcattcgatattgttggcttacatagcactcgccgggtgcccgtcaattttgcatttttttttttattttcaaatttaaacccatgccaaatgcaaacatataaaaaatgccgacgacagcgaccggcgcgggcgcggcacaaccgcaacaacaacaacatttccgatccctgccaaattctgtgacgtctgacgtcgtcgcctcccaagccgcccattccgacgaaagatgccatttttagagccatttcaattaaattaatttgaattgttaaaccgtcgcttcccccccccctggccccgaaaatgtggcactttgcccttcccctaataacataaattaatgcgccgacggtgcttctgcccttttgatgaagtgccaccgccgccgcttttcccgaccaaaataaatgacagccgcttcttctccttccagccggccgttccccgtcagatcccttcccgcgccgtaggggggcaggagtgaagcgtttgttggcttaatgaatgacttttttacttccgggaacggcacggcatacacacacacatttttcattttgccgccccgcccccctcctcccccccccattatttttgggtccgtgtgccatcccttttcttgctcaaggcaatgtgccgggacagggggggggggggggggtgcttcttatgaactttccgctcccacattattcattcattcatttgtttctttatgtcactcgccccggaccgggggtgccgggccacaataagccattcgttgtgccgcacaattaatccgccgccccatttttggagggtgcttctgccctccggcgacgacgcggggcggacggacttttaatttttttttgtgacggtcgaaatccccgagattagccatttttctatcctcggtacaaagtcacatttcgtgctcgagccatcttttgaattgaaaacaaaaggccaaatgctcaattggcacccattgtgtaaaatccgtaggtagtggggccattggcataatgttgcattcaaatttccttatttgtgccctctaaatggctcccggacaatgcgtcaatggacaatccgtaagtgaacaatccattagcaaattttattttaaaacccaaaattttatataaaattagaataggaatttaaattgaaaaaaacttaataaataataatttgattttattttataaaaggaatgaataagcatttcaaaaaaacgataattactaattactatagaatgatggattaaattgattaatactggaaatgttgtaaactcatccgatttttcaaaattaaattgaataatctcaatcgaaaaattttagccattaaaatgtaccgaaaagagtgccaacggggacgagaactgcagattattggtcaatcattgattgggtggcaggcattaaatggcactaatttggcttaattcgaatcctcaaaatcaatcaagcaatcctcgaaaaacaatcgtacttttgccgctagccccctccacgcggggcactccgttccgcccgcccataaaggacccctcgggggacgtcggcggaggcccgggcggg

SEQ ID NO: 2897 - DNA, 1874 bp, Heterodera glycines
cccccccctccgggcggcttttcccccggagggcagcgattgatgacgaacaaaagtcccccctccccccgggcggggaaagtgatggcttttcaagttttgtccagtgttgagctgctcagagccgtcatccgttggatttggcggttctgtgatgtgctcagcaaatgaaagcaaaaaaaagaagcaaatcaatgccgggccatccccaaaaatcccaccaaaatccgccgcccaatcaatcattgtcttatccaggccaaatgattcagactggggataaacacaaacgtgatctgcccaactgaaaaaatgagccattgtttagaaaaaaccgcaaaaaatgaaaaattaaaaaaaaactaaaaattatattttaggcatttgaaaatagaacggaacggaaaaaacgtaattttttcgaccagattccaaaaatcgaagctctcgactttggggctttccgaaaacccctaaatttccccaaaatcgaggcctaattatttttttaaataaaactaaatgtatcaaaaatttcccgaaattttccaaaaaaacagcctgaaattctgtccccaaaacgaaattgtcaccacctcacaacaaaaaatgacgcaaaaaaccgtcgtattaatagatgccaattagcatcaccccagccagcatgtgtcattttaatcatttctttaaacaaaaattttttttgtcattgtgccaattttgaattttctcgtgccaacattgcaattttgatgccatttcacttgagatgccaattacaaattacctcagcttccacccattgtgggtgggtgaagcatttgtgccaagtgcaacttctttacgggcacgcaatgcgaaattatattacaaaattaaaaattcaaatttaattaacgtgtcgtaccaaatgccatggcattctcattcattcattcctttgtctgacatctgtcacttaaaattcgttcaaattactgctgacagccgttcaattcaggcacaaaatgtgaaaagcatactgtacaaattgaaattggcaaaatgaggaacttttaagccgacaaaagacggctacggcgacaacaaaaagagcacacatctcattaatacaaattagaaatgaatttttaattgggcaaaattgaattttgttttcaaattattgccagccgttccaccgatataaaaagcttctgtgccaacagttttataaggcatttggggcatggcacttttggggattgggacgggaaaggtcaaagtgtgggtgattcgggtacaattttggcccagatttaaaccggggatcgcctgaaggtcgggggagggagttcggggatagtgattaaagaaatcttgacattaccccttttcctgcctcacattccccgttccccgctttccactctcggttcccccgcttttccattctcccgttttccttcccgcttttccattcccggttccccgcttttccattcccccggtttcccacttttccattcacttcccccgcctcccattccccgttcccccgcttttccattcccccgttcccccgcttttcattcacttcacccgcctcccattccccgttcccccgcttttccattcccccgttcccccgcttttcattcacttcccccgcctcccattccccgttcccccgcttttccattccccgttcccccgcttttctattcacttcccccgcctcccattccccgttcccccgcttttccattccccgttcccctcccccgtcttcgattccccgtccccccgctttccattctccgctctcccgctttccaatttattgcgctattgtatgtatatatatgtcaccccatccatcccatcgacctgca

SEQ ID NO: 2898 - DNA, 6613 bp, Heterodera glycines
  unsure (1)..(6613): unsure at all n locations
gtaaattatgccataaaaataataatttagcaaattatgccaaaattattaaaaataataattntggtaaattatgccataaaaataataatttatcaaatatggcaaaattattaaaaataataatttagtaaattataccataaaaataataatttatcaaatatggcaaaattattaaaaataataattttgtaaattatgccataaaaataataatttagcaaattatgccaaaattattaaaaataataatttagcaaattatgccaaaattattaaaaataataatttggtaaattatgccaaaattattaaaaataataatttggtaaattatgccaaaattattaaaaataataatttggtaaattatgccataaaaataataattttgcaaattatgccaaattattaaaaaaataatttggcaaattatgccaaaattttaaaaataatcattttgtattatgccaaaattattaaaaataataactttgtaaataaagcaaataaaaataataatttagcaaattatgccaaaattattattattattatttttggttttagaaccctcaagcgaaattgctggtggccggctcttttcagttgggcgtactcactgaacattcggacatcgatgccatttgtgtgggacccgcttttttggaatttcacttttttgggagtgaaaagtgtgaaattcaccggagcagaaggagttgcccggactggtcactttattgccggctttgtctggtcggcacttttactaatggcgacattaattatcattcttcgaagcaaaaattaaaatttagcatttatcaaaaatcttagagctcgacattttgaaaaaagcctagacctagactccatgttggacctggatttcctggacgaaaacccaggaaaacccaagtccatgaaaaatccaggctcctcgagacctggatccaggtctggacctgtattttttgaaactcattttaaaaatcaaaaaatatttcaaaaaaatcaataattgcttgggaacaaataaatatattatttacaataataatttgtttttaatatatttaatcattttttgaaaacttgaaaaaaagatcggtcatttgaaataataaattctaaaattttacccaggaaatccatgtatttttgtgttttgcctggacctggattttttttcacatttgacctggacctggatttcatgacaaaaacccaggaaatccaggtttcgaaaaatggcctggacctggatacaaaaaaatccaggcctggacccaggtccaggtcgagctctagctaattcttatttaaatttgccctttagctgcaaaatgtgaatgtgagcacaattcggagcatcgaagatgctttggtgccgttgatcaagttcactttccaatttgatcaaaacactccgatcgatttcgacattggtctcgtcacttttgatccgaatgagcaaatattcaaatcaaaaatgccattaaaatacgagcaaagcaacgcattgtcagcaaaaattgccaaagaaattggcgagttatctgaacagagaaaacatttcggaggaggagaagttggagagaaaaacattgatgagaagctgaagaagaagctcagatcactttcaagtgggcgacattttttaattaaaggaaaataagaaaattttattaaattaatattcttactaaatggtatataacagctatgcatttttcgacttacagttcgggtggtttccttgtataagacccaacctcctgagattttcatattcgctgttgacaataagctatatagagtttaatttttttctttttttaggtttcgaattcagctcaataattttaaagcgaattttggccactgaaaatacagaaaatggaaacggaaacattttacaaatctatcgcacttttttactgatgatcaaattttgggcaagaggtaataatttaattttcacagaaagtaataataaattaacaattcttttgccattggcactttcagagcatcacatttatgacaacaaattgggcttcttcaatggcattagtctctcccttttggtggctaaagtgatgcttctttacccaatggcatcacttccttttttcattgaaaagttcttcttcaccttctccacatggtcattttgttttaataatttatttttttaaaaatttttaataaaattaattgccaattattttttgaaattttaaatgtataaattattctatgcatttttttaggccttggccaaccccggtaaagctgacagatttgccaagcttgtccattcttcgctggaacgcatccgatgagagtgacaaacggggggtaatttactcgagacggggcctaatgcccggactgacaatgccaattgtcacgccgggacatattgaacaaaatgccactttcaatgtgaaccgatccaccgcaacaatcattcgcgggaattgcaaaacggtgaatggaaagtcgggacggaattagccgcgggagagaaatttgttatcggaaatccgggatatatgtaaaagccgagaccgggagcagcagtcaaacccatatccctcacaaatcagttttgtataaacaatgaaaaacaattatttatttttagctattaaaatcattcgaaattggccgatggatttgcaaaattttgccaaattcttctttattcggtacgccttctcaatggtcgcgtcaaattgatgaaaaagcattgagtttaatctctgaatccactcatctcccactgttgcgattttatcgtccaattcaagcccaattagccaaattttttgataatgttcactttaattaaatttaatattatccaaataattgaatttttacacgatttgctatttgtgaaattcggttttttggagagtgactttttggattagtccgacttagagaagggaccataaatgtacggtccccaaaatgtttggtaccctttgtgtgtagtgtatccccaaatgtgtgccgatttcgtgccgttcagtttttgtttctcagtaagcgaattctaacgattttcagataaaaaattggaacatcccagtaatatagttgaagccgttcacccaccaaccaccgcttaaaatagtgccaatttcaatttgtgccatcccaccgttacctttttgacactggaaatgcttcattttcatcgcccttttcattctctcccaaaatttgtcccttttcaacgatttgcttcgcatggcccaatcgaatgcgatcaaatcgttcgacatcgatcagcaattggagacgaattcgcgtctccacgtagcctcaaaagtcgtaaaagtcggccaaagcgaaggctttgcaattaatgcgaatgaaatgggaaaactgcgaaaaatatttgaaattttaatttgtagaaatattatttttttaaattactttttcttcgaactttttatcttttaacagattttcccatttttcttcttgcaaattttgcaaatccatcggccaatttcgaatgattttaatagctaaaaataaataattgttttttattgtttatacaaaactgatttgtgagggatatgggtttgactgctgctcccggtctcggcttttacatatatcccggatttccgataacaaatttctctcccgcggctaattccgtcccgactttccattcaccgttttgcaattcccgccgaatatccgcgccgagaaattcattcacttttcgcgccgcaggcgccgctttttcgccttttttaaattgctggtgtaatagcttatgtgcgtgctccttattagcgttcatttttttagctataaaaaatttgcaaattgagatatgaacaaaatcaatatactattttgtagacaacaattagcttaacaaaacggtatataaaacattttattatgttaacaacaaaattttttataagccattataaaaaagcgcccttttttatgcaacgacctagtaccccccgtttgtcactctcatcggatgcgttccagcgaagaatggacaagcttggcaaatctgtcagctttaccggggttggccaaggcctaaaaaaatgcatagaataatttatacatttaaaattcaaaaaataattggcaattaattttattaaaatttttaaaaaataaattattaaaacaaaatgaccatgtggagaaggtgaagaagaacttttcaatgaaaaaaggaagtgatgccattgggtaaagaagcatcactttagccaccaaaagggagagactaatgccattgaagaagcccaatttgttgtcataaatgtgatgctctgaaagtgccaatggcaaaagaattgttaatttattattactttctgtgaaaattaaattattacctcttgcccaaaatttgatcatcagtaaaaaagtgcgatagatttgtaaaatgtttccgtttccattttctgtattttcagtggccaaaattcgctttaaaattattgagctgacttcgaaacctaaaaaaagaaaaaaattaaactctatatagcttattgtcaacagcgaatatgaaaatctcaggaggttgggtcttatacaaggaaaccacccgaactgtaagtcgaaaagtgcatagctgttatataccatttagtaagaatattaatttaataaaattttcttattttcctttaattaaaaaatgtcgcccacttgaaagtgatctgagcttcttcttcagcttctcatcaatgtttttctctccaacttctcctcctccgaaatgttttctctgttcagataactcgccaatttctttggcaatttttgctgacaatgcgttgctttgctcgtattttaatggcatttttgatttgaatatttgctcattcggatcaaaagtgacgagaccaatgtcgaaatcgatcggagtgttttgatcaaattggaaagtgaacttgatcaacggcaccaaagcatcttcgatgctccgaattgtgctcacattcacattttgcagctaaagggcaaatttaaataagaattagctagagctcgacctggacctgggtccaggcctggatttttttgtatccaggtccaggccatttttcgaaacctggatttcctgggtttttgtcatgaaatccaggtccaggtcaaatgtgaaaaaaaatccaggtccaggcaaaacacaaaaatacatggatttcctgggtaaaattttagaatttattatttcaaatgaccgatctttttttcaagttttcaaaaaatgattaaatatattaaaaacaaattattattgtaaataatatatttatttgttcccaagcaattattgatttttttgaaatattttttgatttttaaaatgagtttcaaaaaatacaggtccagacctggatccaggtctcgaggagcctggatttttcctggacttgggttttcctgggttttcgtccaggaaatccaggtccaacatggagtctaggtctaggcttttttcaaaatgtcgagctctaagaattaccaaaaataaataaatatttttgataaatgctaaattttaatttttgcttcgaagaatgataattaatgtcgccattattaaaagtgccgaccagacaaagccggcaataaagtgaccagtccgggcaactccttctgctccggtgaatttcacacttttcactcccaaaaaagtgaaattccaaaaaagcgggtcccacacaaatggcatcgatgtctttggcataatttgctaaattattatttttatggcataatttacaaaattattatttttaataattttggcataatttaccaaattattatttttaatagttttgccatatttgataaattattatttttaatagttttgccatatttgataaattattattttttaatagttttgctatatttgataaattattatttttaatagttttgccatatttgataaattattattttttaattaatttacccattctttcaccactcgttcaattctttcaattgccaggtcaattttcaattttctttcattttcaaccattccaaaaccattttttgacaaaaattctgtcaactaaatttaaatttaattaaatttagaaacaaaaaactatttatcatcaaccatttttattgttgcgctatcattttcaaccaaatttgttcgcccagtaaataatttaatttcttgcaaatgcaaagatattccaaaatttcctaaaatttggtcttctgtttttgtaaactttgacatttcgttgtacaatttttgatctaaataggaagttcaattcatttttattttggcatttaccctgctcaatttgtttggtcattagcaaaaagtggccgaaaaactcattaaatttctccaattcaaattcgtttctaaaaaatgccgtcatcagcagtttttctcgctcttcgtcattcaatttaataagccatgctttgtcgcacaaaagctctaattgtctcaaactggtcctcctaaattgcaaatttttcaccattttgcctattttctctctctccgataaaagtgccaatgccatttttccga

SEQ ID NO: 2899 - DNA, 2180 bp, Heterodera glycines
ttaccaaaaataaataaatatttttgataaatgctaaattttaatttttgcttcgaagaatgataattaatgtcgccattattaaaagtgccgaccagacaaagccggcaataaagtgaccagtccgggcaactccttctgctccggtgaatttcacacttttcactcccaaaaaagtgaaattccaaaaaattcctaaattgattaaaacatgctaaatttggtcacaaaccattggaatatcaaagaatggtcattctgtacagctacgaacataaaagtgaattttcaaaattttgagttttcgactttttttcgaattcgggtccgggatcccgaattggttgaaatggatgccatattcgtaatcagcgaccctgaaaacccccataaacatgtttccaagacttttcagaacaaaaaaaaacccatagaaaagttagaaactacaaagaaatgttgggcaccttggcatttatgctttttcttttcttttttcttattttacctccaagaaagaacacaaagtcccaaaaagcgttggcgcccccgccgaaattgccctgctgctgttgcgaaagagcgtccgttttttcgccggcggaattcgacggaccaaccacaatttgcctcacatcttttggaaagtgaaaaggtcgaagaattaaaagcggaactgatcaaaacggacagatctgctgttcaactcattgtcagttaccagaaggattgaccggcggcggaagcggcggcgcactttcattggccattttttgctgcaattccaacagtttctggcactttcccttcgcttaccgccttttcggttggcatttcgtcgtgcgaatgcgcagcggtgccccgcttctcctcctcccctcccccgccgttgtgcttttcctcctcctccgcttcttccggtgccgtgttgcagtggtggctgtcgcaaaggttgcacccgccgtgtccgttcagcgactggcactgcgcattaaagcgctcgcaagtcgtactcgccgttgaacacgcagtggtgataggccaaataggcatggcgactgtctgtggacgaaaagcattgccaagcgccgcagaaatcgccggccgattttgttggactgaccgacacggcacgtcgcattcagacacatggaccacgcataggaaatgcagctgatgttccgcttctcctccgtggcccgcagagttccgctcacgtcgttgatcaaatcgtacagctcaatttcccatggacccgcgtggatgaacgaggaggagcacttgaggaaatggttgaagaacccttggaaaatgggggaaattgagcaaaaaacggggaaagacccaaaagtggtgggaaaagcgagaaggaaagggcgaaaagcattggaaaaagcattttactaaattattggaattttggaatgattaaaaatgggggaaaatgaagcaaatgaaataaagtgaaagcaaagcaaaggcaaatgattcaccaaatcatccgatggaatccatccaatcatattaatatgcacaaattggcaaaaaacaaatcagataacgaaccggacaaaccatcggtgaatcatttcaaagaatggagagaaaagtcaatcgcatcaaattgaattccccgggggcaaaaatagtcaaaaatgaagaattattgtacgagtctcacgggagacacaatttgtcactgtcaaatttgatggcattatcctttaattaagattaagcttccgatgtttttatctttaagagtcctctgccaacaatcgttattttaactgattatgcgaacaacaaaaaaaatgaagcaattaattggagaataatgggcaaagaagaaaaaggaaaagcattgcaaattaaacggtaattttcccgtcaatcagcgcatttccgctgggctcttccgtcccgcattttccgacacggatggcccctccggcaaatggacttcgccaattcgccccaacagccaaaatgtctccatcacacctttgccctaatgaattaatcaggcaatttattaacaaaaattccccccccccctaattacctttataatcacttcgccccttggctccgtcacatatcctccgattacgctggtcaagaagcgattggaactagaaaaaatgtgaattttgccggctaaaatgggaaatgaattt

SEQ ID NO: 2900 - DNA, 4932 bp, Heterodera glycines
  unsure (1)..(4932): unsure at all n locations
tagtgagtaaaaatcccaaaatagtgacaaaaagtccgaaatagtgacataattttcagccaaaattttgcaaaatccgtcgtacctcagcacaaaaaatgcaattaaattgcggctgacagcgattcggcactccgtccaattgcgccagctgaaattttaattaatacacaaaaagtgcaaaaaggaaaagcaattggacaaacaaagcacaaccaaggcgaaggaaaagcaaagaaaagggaaacattcgaaaatagaaaaaagaggtgaaaaagaacaaaagaatagaaagaaaaggaaggcattgcaaaaggaaccaatgccaaagcgaaaattgggacaaaattcatctaaaagggatccatccccccttttcgtcggttatttatccatcttcccctattctttttattattaattgctatgaaagttcgtttgtaatttcactttctttttagcctattccttagacttttaatggcaaaaataaattttaaaaaacatataaaaaagaaaatatttacagaaaaaaattattatcttttttcaccaaaatcaaaatttatccgaattgaaaaagcaaaaattatgagacgaataaaactaaaggaaaagcggcaaaagcaaaaattgaggaggaggagactaatgtaaatacaataatgctatttaatttgggcgattctaacgcttactggcgattccgatcatcacttcggccatcttcgcgccctgaaagttaaatataaaatgccatttgaaacggacaaattcaaatggccaagagtaataatgaaacactttctgcccctccccccaccataagtgccggcgagtcgaccacgtgaacgccggcggtgcgcagcgcctcaattttctctcgcgcgccgccctttccgcccgcaataattgcaccggcgtggcccatccgacgacctaacaaatattaaaaaacaacgaaaaagaaacggacgacctttcggcgccgttactcccgcgataaacgaaaccaccggcttcgcctcgctccctctgttgttctcctccaaaaatttggccgcattttcttccgcgtctccgccaatttcgccgatcataattatgcccttaaatccattttaaaacagaacaataaaaatgagttgccttcgtgtccgggtcatttataaacacctgaaaatcaaaattttaatggattatacggaaaaaggcaaaacacatcaagacagtcaatgaagttggtgccgttgaatgggtcgccaccaatgcccacgcacaaagtttggccaaggcccgtctcagtggtctgttgaacggcctgaggaaggaaaaatgagtgcctaacaaagccaattccaaggaaacatggaaattgaagccaaccaaatccatgaaaagggagggggtcaacacacaaatgtacctcataagtgagtgtgcccgatcgcgaaacgatgccaataacgccttttttgtggatgtgacccggcattatgccaattttgcattcgccaggcgcaatgattcccggacaattggggccgagcagccgagtccgattctgcttcagaagacggttcttgacacggaccatgtcctaaggttgggggaggaagggtaaatgccgaaagaaaaggcaaaactcgccaattgggggattccctcggtgatgcacacaaccaaagggatttcggcgtcgatcgcttcgtcgatggcagccgcggcaaagggcgctgaatttggacgcattcattaaaagcgaagcgatcaaacatttacccggcacataaatcactgaagcgtcggcaccagttttttcccgggcatcctattcaaagcaaattaaaaactgacaatgattgtcataggagaacggcaaacaaaatatccatttagaattcctttcttgacaaaagcgggttttgcggtaaatttcttaattcagtgcaaacaaactttgactgttgcaaatatcggctttcccaagtgctcagtgcccgcttttgagggcgacacaccggccacaacattcgtgccgtactcaatcatttgctggccgtggaaagtgccctgtttgccggtaaagccttggacgaccacctgaaattgcatttggtgagcgtggtaaaacccattgagatgtttaataaccttcgtgttttggttgatttttagattttgtcgcgtcgaagtataaaagcgaatcgaagtggcaaaagccaacagtggcgaacgaagagacgacattttgggaacagaaaaatgaacggacccacagacattaattaaccaatcacagaacaaatgaagataaataaaatatatgtattcccattataataaaatggaacatttttggtcataatgaataaatttcttatgaaaaatttgggaaaaagttagacgcattttgacgagtgtttataattctccgtcatcaatctcgtggtaagcgtcgttcccttccgctgccatttgcgtcgtgtcgccccgttcctccgcctcaaaatattcctccatcagtctgactttgtgctcaattattctttctgcttggtcgcgctcttcgcaccccttaaaaggataacattttgttaccatacataatatcataatttgggggtcacctccaatgcctcgttcaaatgattcacacattttttgagtgccgacatcactggacgcgcgtcgtacacattttccagccgatatcgaagttcgttcagcaaagaggccgtttcgttaaggaccacggcactcagctgagaagcgcacaggtggagactgaggcagcgaagaaacatctgaaaagtgaaggggaaaagcgacttgatgagtttgggtggtcacctgaatgatggagaaggaaggagtgcgctcgttgaggacagttgcgaaccatttcatttcattgtacaaaattcgatctgtcagggataacccccgctctgcttcatttacaccaatttcttcgccttgactgttgcgacgaggttgctgaatgataaataatgaaaaaaacagatattttaagcacaaaaaacaaaacgccaaattaaataaattaagaaagccgtgtttaatgctcactcacttcaattctcttagtgatcagtgccacgatgttgaacgtttcataggcacaaatcagtgttcggggatcaaattttgtttcccacccattgttcattaacagttcgccaaatttgcatcggatgacgcacagagactcaaaaaatccttccaaatgtatgccaaaattattcttgagacatgtgcatgattgtgggcaggccaacagaatttggatgagttctaatggacgaaaaaaatccacaagtccttctccaaaacgagcgcgctttgctcgtggtgagtcgatagaggacgtactgaggaaggacgaaggcaaagctgaaatataaaccaaaatgcatttatgtgtgaaaaaacagttaatttaattagaataatttgtatcgactttaatcatccatatttaccgacatactgtaggccgatcatatttgttataaactccacagaaataaaaatttttggaaaaacttacaggaatatgatatagaaaaatgccaggcaaaaaagcatcaggaaatgcagcgccctttcacaaaatttcggtttacccagcctttgtacaagaaacacacttttgttattcatcgtccctcgcctacgccgcggggtcgagcagttcgggtcgcacaccgccacaaccgcattccgcaatcgttgcaatgccagttcgataatgttgattagtttactcatgtcccaagcggccaaagcttcaacgaagtgggcaaagtagacattgtccgtcggttccgtctccaatttggcacgaattcgaccaaacatacgaccgattttgtccttgggcaaattgctggcaattgtcaatgcggaatccattagcaaagtttccttaaaaaaagtcaaaggtgaaaccacaaagaaaaccaccgaaaatttgtcgagttcccgcagaatgctggccataatcttagtaagcgcagcattttcagtggcatatttagtgcctaacatgtcgggatggatgatgacccacaaaaggatggccgagtcgagcacattcttcagaaccagcagcttttcttctgaagaactcacattatatgtaaacccaataacatgacctgtctcgccctctaattgttctgccagaaatgtggatgcccctgtgatgttcatcgtcatgttgtccgttgtttcgtccgcactactctccgccccgcggcattggcgcaatgctttccgcacgccaatcaccaaaatttgaatatgcagaactaaaggcattcaaatcaacaagtgcacgattcaaatgtttggcactcgcctgcctcgctgatgggcataagcccgagtgggtagaccaaccggtggaagtgcagcgaggcaagtcgcgaatgtttacacataaaataaatgcgtttgaatcgtccagagaaattgtcattgaaacggtcgatgtgatgtttcatcgcctccaccagccgaggacacaatgtggcgaagagacagcgaacaatttgagcctgaatctgcgcagacggctcataatcgaggcgcaagaaacaatccggcaaagtgataaggtcattgagctgaaggaaaacgagtcaaaagagggtactaagaaagtttctccaaaataaaaatcttctgttccgactttgatgtaacgatgcccgttcaatttgttaagcattttgaaggctgacaatcgaacacgctccgaacgatcgttggcaccccttttggcgagaattccagaggaacgtgggtggaattaanggcggncgggcatggcaacaaatggtcaaagccttcgtagacagccgcacgcacttcgggcaccgagtcgagcgacagctggtcgac

SEQ ID NO: 2901 - DNA, 2396 bp, Heterodera glycines
caaaagtaattttgtaagaaaattttaattttttttttctgtcgggccaacaattcggaaggattaccaataaaagaatttaataaattttaacctaatatattttttgcgaatcaaaaggctcaccccaatttggtttttcatcgtcccatttaaactgcaaaagtgccaaaccgccgctctgattggcattaagccattgacccatcccaccaactttctccagaagcaacttgatcagttcgcgcggaaacatgtcccaatgagcgctcaggtgctccggcacctttttggccgccatcacgcgaatcggcaaacagtcgtccatcagcataatttgtaatgcattctgttggcgagcgatgtactcttcacgaatctgccagaaagaactaataagcctaacaataagtaaaaaaagaacaaacgaattcttcgtcggaaataagtgggaagaatttcagcaaaattgccgaagctgcaagacggacatcctcatttggcaccttgggatgaggattgcagaagtaataattttcattaaacctccaaatttcgccaaagtactggcattgtgacgcgaaaaagcaccgcttttaagcgtttggtttgtttttctttgtctgataatgcatcggtgatctataaattgatttccacaatgctcatcaatctctgattgcgaactttatacccaagcaaatcgttgtgaaaaaggacgagccgtcattaccgcaacatagaaaaggtcttccaagatttcgttttcgatcagtgcccgcctcgcctctcctcggtcttctgcactcactttggccgcatttttccaggctcgcaaaatcgtgaggccccacttggaacagcttttgctaaaaccaagaaaatagaaaacctaaacatttcacacctgtccggcgcattgatcagcaccgctttcttcactgcctcccaaaattctgagcactcgactttgccagagagaaagcccaactcatcgacttcatttggagtgccgtctatgcttgctttttgttggtgaagtccttttttgagacgcatcggttacttttttgataatatataaatttgatttcaagtgaattaataaaagacaaacgactgaaattaaattaatttagatcgaactgccggtaatagggttccagagctttttgagttcaattcattctatgaatccacataaaattaatgagttcaatcaactaacaagcctttgcttcatggactatttttttccattttggtaattcgaaaactgtcaatctaaagaaataaaaatggattccgcgttttcgaaactgccaaaaaaagtcatgcttaattaattaattaacaacagaacaacactgattcactgataaaagccgtgtgaacaagaaaacatttgaatcatttttattaattacgcgaaagaatggcaaaatgtttatagtaaataaaaataaactgatcgatcaaaacagcaaaaaacagattcataattctttttcgataaattgttaaatttatttcattttttttcaatagccgggtggcgtccgcggcggtggacaatggaaacaatcgccggaagtgccctttaagcccggcgtgccattcgttcccttttaaaaatgccatttcttctctgataattaaatttcttgcttgtttcacctgttgccctcgtcgtccgtctttccccggtctaaacaaagcaaatgtttttcttgggaattcgctgagttttccttttcccacctccccgcgtcccccggcggtcctttgactccctggacggtaatgcccggcaccccttggcagccgggcaatcccttgggccctttggggcccggctttcccggtgagcctcgtggcccttccgtgatgaactgacgaccaggaattccaggtggaccttaaagaatgaaattctgacattacacaatgtcggaattaccttgcggccccactgggccaatgtttccgattggaccgggcgatccttccatcccaggctcaccgcgcttgcctgaaaatggttgccaaattttgaactcttttgatgcccaccatcaattccgctgtttccgttggcaccccttggcccgggcggtccccttgggccctgagggccagctgggccggccgaaccctgcggacagatcacgcaaggctctttaactggcacatcgtgtgcaattatcttaatatacaaatgaattaaaaagctaaacttctcattaaaaggtttaattttgaacctcccctgatcggccttcctgcccggaggctccgggcagtccatcgcttccgttttcgcctaaactgacaattattttgatattgcatgcctttcactaatatccgttttcatgcttctcttttcccttttt

SEQ ID NO: 2902 - DNA, 4191 bp, Heterodera glycines
aacgcagagaatggccaaacgacgggcatagcttaacccctccaccggcaaaagtggccgaagggaattggaaaagcaaagcattgacaaagcaatgaacaggtcgagagtctcggcccgagaaaagtctcgggaaatcgtcggttctcgaactatacattaaaagacactcgaaaagtgaagttttcaaaaattcccggttaaagaaaccaacgaaaaggggaagaaattccgaaacaaaagattactaattattaattaattaattaattaattaattttttctttgtcaaaaagggcaaaaaagaatgaagaatacaaaacattatgtaattaaaaggcccactcgatttccttctgcttttcctccctttcgctgttcgatcggtcggccaatttgaaagagtcttcgcttttggctgctgcttttggcaggaaatgcatttccttacgtaagtaatgagtttaaatgtaattcccatgggtttcgattcaatttatacgcaattttcgcctaaatttgcctctcgatgaaaagggcgcacagaaaaactggatttatctgctctatggaattcagcaaaattcccaaatttaaatattttcaaccgatccaatcgctcatcggcaaaaccttcgctttcgctgaaccggtctttgaattgggtgggaaggcagaagaaaattacattttcaaatcaaattcccgcctaaagaaagtgaaaagaaagggtcaaagaagcgaaaaacggcggaaggaatggcattttgagcagagaatggcattggcattgtttgccatctttcagttttgaattcattctcattgggcctttttggcttttccgtgccaatcctccccccacccaatttccgccaaatccctccaatggattcgcccgttcgatacctaaaatgggccaatggcggcacctcggcgtaaaactgtggcaaaatcgtcgcaactgaagaaaaaacaaaatgtggacacattttcgggcaaggatcaaacgaatgttgaaatgtgtcttctgtttttgactctttcgcacatatggcaaacatttaaaaaggcaaattacacattttccttctttctctcgttttatggcatcaaaaattaaaggatttcaaaaatttgagcgtaattggagttattctgctgcgagtccatgcattttgtgccttccatcaacataaggtgccgacgataaaatgttgttgtgtttggagaaagtgtacctctgctgagcggcgtcggcactctcaccgagagagacaaatgttagccccgggggaggcgggggcggttaagtgtgccgagggaaaagctcgggggtaggggaggggggcaagtcgaatgctgggggagggcttctccgagggtcagattgtgtttccagcagcagcagggagcagcaatggcaccgctggcaaaggaaaggcgacactgttttagcctttgggcttcacgccccccaggcaaaaacccacggcacggccgaccctcaaggcacacgaatattaaaaatgccttcctccaattgtcatgtttgcacacccatttgatggaccagcagcaaaagggttaaacggaaaagggcggggaaaaagtgccaaattattcgcgaatttggctacaaattgtgtttatttgggaaaagggtcatcttttctcactgatttgctctgcttctgatttattcctcacatctgttagtgaaatgctccaaattcccttgggcaattttcagtttatgacaaagtacgctttgggagagaaatctttgccccccccaaacgattgaccaaaataaacaaacaattaactaaaattgaccactaatggactgcattgacggctttgacattcgtctggagaaagtcaacacaattaaaatggtaaataatgcaaaaaatttgaattttaggacgttttttacccaagtgagacgataaatggcgtggtaatactcgaaacaaatgcaccacttcggctgagaggtgaggccaaactcagaagcaaaaaaggagtcaatttaaggcatcagagtgtttctgcgggggcgggcgcgtgtccaatggaaagtgctgaaatcgggcgaatcgaagtgagcgcacagagagagagagagagaagagggaaaaagattgattagctaacaaaaggcttaaaatgggaaagtgccaaaaagcaatttttttttggcatcgtttggctttttccaccccttttcatatgctcgagagtctcggttttttcgagtcggaaattaatctcggccatcagttgcggaaaattttgactctcgagcactcgttagcctttaaggacattgaaggacgaccaatatttgttggatgaaaagttgcttttgtggggccgcgaccgacgcgacggcggcgacgacgaagaaacggcgcagattctgccgcgggggacgcacgagttcagcttcggtttccgcttgcccgccacacaaatgccgagttcgctggaaacgaaggcaaatttagggattaattgggcaaaaatttgttaatttaggccggcacagttcgctattatgtgaaggtaaacaaaagaaaagttgttttgacttccgattgcattttcaaaggttatagtcgacgttccttacgccagttcgcctcagggcattaagtgaaaattaataatttaaaacgattatttcgaattgtttagatattttacactgatcggcccacacattgactgtatggaggagaaatatttggtaaaaatactcaaaaaataaaatatacgaattaaataaaattaataattttttggacccatctctgtgcccaggaccaccaaattcgttgttttggctgttgcaagagaggagtgattgccctcagagcggtgagtcattctccccatttcccaaatggtcattttctaccctcattgtctgccattttctcttttctccacttttgaggttcttgaacggagtgcctattgctgtggcgaggtccttcgccttcgtttgcaaatggaaaatcgccaacatttccccgccattgtttgcgtgcgtctaatccaggcaaaaatcacttattaatagagaccggatttttatgtttttacatattttttttgcggcttagttatggcgagagaagcccaaaaatagcattatctccgaacaatttttgatttagagcgacttataaaaacataaaaacacatattttggcgttttggcacataaaatatgttagcacatattttggggtttggcacatattttgcacatattttggcatttttgagaaaaattgcaataaaaatacaagaaaattgaaaaatacacccctaaaaatcgacttttttcctaattattaacataattttcaaattaaaaaattttttcttcgattgtagaaactaatgaaatctcgaattcattaattcgtcattggatttcgaagttctctgctggaactttcaatttatagaaatgatttatcaaaaaaagacaattttaccccaaacacttcgaaatgtatttgatttgcgttgtatgggctaaaaatgataaagaatgagatttttgggaatttttatgcaaaaacacacttattttttcaatttttaacacatattttagcacatattttggcattttttggggtttttagcacatatttcagcattttttagcacatattttattacatatttcaggatttttagcacataaaaatccggtctctacttattaaattcaaatttgttaaattacttaagcacctcgagtaccgtatcgaccgtggggtcattggtacggtagcggacgcaaaaaacagtgatttttcgtataatattttatttttcaaacatttctcaatttagttcaatcaacagcctttgaatggaggtagcatttcttagaattaaatttgaaaattttaaaagtaaaattaggtcatttccgatcggcgaacattcgcaatttcgactcgacgccggccaagaactttccctgaaaatccccgtccttcctccgacaatggttaaaaattaagaaaaagcatcttaaacatattttcttcaatcttttgctattttgcgtatttgtcccttttttttgtccttttctgttttttttgtcaaaagccatttggcccaattgtccacccctttctcttttcgcttag

SEQ ID NO: 2903 - DNA, 1111 bp, Heterodera glycines
aataaattttaaaaaatccaccaaaaaataacattaaaaattttcagcaaaaaaagcctagtaattttttcctttttttttatcagccaaagaaaaataatttgtatttttttgatgaactaatgaaaatgattaatgcttttttggcttcaaaagtttttttttcttcaaaacattttgatttgtttagataaaattttttatgcctttctgaaaattgcgtaaattatatctactaaaaatagtaaatttttcttttcttctttttctgtcaattctattatattattggaacgcaattattttgaattatttattgttaacataaaatgaaaaaaacactgcaaaaaacaaatatcccccccccccccccccctccctttggtaatcccttcctattgaatcggtcggtcgcattttcattttaccatgaatcatgcagaatcgctccactattagaagggggggggaatgtggactgaaccagttgggtttacaaaaaacgatttatttgcatgttttattggttttatttgtaaagttttgaatacatattagtatgactattgtcgggaaagggggatctgctgtcaatgccattagtaggtctccttttggcgacgacaaagactcgcgccgttcggtgtcgccgccgggcacaaagcgtgtacggaacggcggtggcggtggagacgatgacagcgcacgacgcaatgacagggacagcaagcggagcggtggacgaagggaacgtaagttggaagctgggtgcaattttcaccggaaacttattcaaaccaaaaaaaaatgtttgaatttttttttttgggtagggggaggggaacagcggcttcattaaatttttcatttttttaatcaaaaagaaaatccaggcaccgctcgtcatgacgaggaggagcgagaccggagtgacagggaccgggagcgggaccaccaagagcgggaacggcgacgcattggactgccgggcaagccgaagtcggaccatgtgctgagtgagtggaaatgccattcaggggggggggaggggtcaaccagccaaatcccgctataattggggtggaaaccccgacatttgcggcccaacttt

SEQ ID NO: 2904 - DNA, 2008 bp, Heterodera glycines
gcgggggccggaaacgcaacagagaatggtagggaagggatggagcaggtcattggagtttctcacagagtaaataaaaaaatccaccaaaaaataacattaaaaattttcaggaaaaaatcctagtaattttttcctttttttatcagccaaagaaaaataatttttatttttttgatgaactaatgaaaatgataatgcttttttggcttcaaaagttttttttcttcaaaacattttgatttgttgactcttattgttagataaaaatttttatgcctttctgaaaattgcgtaaattatatctacggtcggtcgcatcttcattttaccatgaatcatgcataatcgctccactattagagggggggggggggggggggaatgtggactgaaccagttgggtttacaaaaaagcgatttatttgcatgttttattggtttatttgtaaagttttgaatacatactagtatgactattgttgggaaaaggggatctgctgtcaatgccattagtaggtctccttttggcgacgacaaagactcgcgccgttcggtgtcgccgccgggcacaaagcgtgtacggaacggcggtggcggtggagacgatgacagcgcacgacgcaatgacagggacagcaagcggagcggtgggcgaagggaacgtaagttggaagctgggtgcaattttcaccggaaacttattcaaaccaaaaaaaaatgtttgaattttttttttgggtagggggaacagcgactccattaaatttttcatttttttaatcaaaaagaaaatccaggcaccgctcgtcatgacgaggaggagcgagaccggagcgacagggaccgggagcgggaccaccaagagcgggaacggcgacgcattggactgccgggcaagccgaagtcggaccatgtgctgagtgagtggaaatggaattcaggggggagggggtcaacagccaaatccgctataattgggtggaaccccgacatttgcggcccaacttttgtggcgccgagatttgcgccaatgtccaaaatcggattctaaattgaatttttttttaagccctgatagcataaacagcattaaaattaagaaaaaactctcttctaatttattaggaacattaattctgttgtttaaaaattgtgttatttttcaaaaattcattgaagatcacaaatgatcagatacaatcactttcaatcgcttatttaaatttccccgtattgaacccttttgtggtggacttaaaaatatgtttttgcagttggctcgcgcaccctttggttcggccgtattccctcgggcgccaccgagtcggacatcattgactcggtgaaggaaattggtcttcctgaaaaggtgtcgttggtgtttggccgtggttgtgcatgtgagtgatgaagcggttgctgatgcaaaaatttttgcttgaaaatttcagacgtaaccatgccagaccggaagttggccttcaaaattttggatcggctcgctaaaaacatccgtgtgcagagcaaaaatgttaaagtaagtctcatccattggaacagtttcattgtcagggacataccccacccaaaaatgcgtaaaattttaggtcgattgggccaccatcccgtatctgaaggacaatatgcaattgatggatgcttattgggacctgaagcagggctacgcgcaaattccgttctccaaattgccggacggcaccgtcgactcgctgatggacggcgcgtggttggagctggatacactgccggcacatttgaggggtgagaattttcaagtgtaaaactgtagatttcaatttctcctggtaattaaatttaattgggtctttctaatggattgtaattgatggggtttggcattttgatgataaaaccataagtgtttttcttggcgaaaaataagagagcatttccctgaatttttgatagaatttttttgtttcagaaagcgatacacaaacactgggctcaacatgcggaacaa

SEQ ID NO: 2905 - DNA, 1928 bp, Heterodera glycines
  unsure (1)..(1928): unsure at all n locations
atcagcacaatttgttgctttccacttcggctgccgtcactcatttagtgcaacaacaacaccagcaacaacaagccgcgctgggcacaacaacgccaatgccaacaaccgtcacgttgccgcaggcggcgatgccatcggtggccaccgctgccgctggactcatggtatgaacattttatgtgtttgtgattgcactttctttagggtttctcagaattttgactcgtttaaatttttttcgagttttttgataaaaaaaattttctaaatttttttttttgtaattttcttatatggaaaattttctaagattttttcttgaaaaattttctgtttaaaaattttaaaaaatcctgtcggggtccacctttctctctcccaatttgtaatattttccccccgtttagcccgcagcaatgttcacgcaagctgctgccgctgcagcggccgctcaaatggcatttgctggcaatttgttgccgttcagtttcccaccgccgaacatcccaccgccaagcgtaacacgtcagtcccagcagcaacaacaacaacaacagcaccaaacagacacagcaatagcgcagcagcatcaacaacagcaattgacgactccggtgagcagcgcaattgccgcgctgatgtcaacaccagcgtccgcgccaccaacatcgcgtatgaatgcggggagggcaaatgacggggacagggatggtctcgcggttgggcggggtgtggaaggcgtacgtggggtacgaaccccaagaagttaaaaaattttctccggcgatgccatcggcactgccggcaatctctccttcaaattttttttgtgacggactcaattattgtggatttttgggtccttttttctgctttattcatttttttcataaaaatttcatacccccggcccattctgtgtgggtgtgggggtacattcctgggaagatgtggatgtcgcgatttgcgaaataatttgtgttttcttctccctcctttccccctacaaataaaatccctttattttccaatgaaaaattatcccccccccctccttttttctcttcattttacacccttccgttcccgcccgccgactggccacaaaaggcttttgatttccttgcggccttgcttcttgctttcattcccttggatccctttgcggacacctttttcccttttcttcgccgttcgattagccatctctttacgtagcttttgcctttgggtgcacaacgttttccctcgagaaattaaaaaaaaaattagatttttcacaattttccaaaaaatcgttaagaattttcaaaatagttttcgctattaattcgggattatgggtcaacatccattggccaatttcgacatggataaaaaaggggagcaaaaatgtcatatgttgttggcactaattgtaaatgactttttagttggcggttttgccaatgtcggcttctccaatgcggtggcagcaggcggcggctacccaactggcggatttggcgaccccagcagaggcaattggcgaagtcgtggcggtccacgtggtggtggcggcggcttccagcaacgattcagtaggcgtttcataaaccatgtttatcaccatgttaaccggatgcatgcgacccaatttcaaagattcgcctggaggcggcggtagaggcggcggcgcttttcgtcccggcgctggtggcggttttcagccgttcactggtggtgagcgagggcgtggcggtggctttcgcggtggtggccgtggacgcggttgggacaatggtggcggtggtggcagtccgatgggcggcagaggcggacgcggtggtggtcgtggtggtggcggtggacgcgggggncggtggtgccttctacgccggcgggcgaatgccattcggcgacggaggtggcgctaaaaatctttg

SEQ ID NO: 2906 - DNA, 2164 bp, Heterodera glycines
  unsure (1)..(2164): unsure at all n locations
ccccccccccccccccccccccccccccccccccctcatcacgacaaatatttctaacaacaaaaaatttttcattcataggggttggtactggcgccaatcgcgagccgtttggaggatttggcgctacatttgcgccccagtccgagtcagagggcaatgtgccggcggcggctatggcatcatcaaccaacaacatcagaaattgtggtagtccgacaccaaaaaatgaggtggttagacatcgaggggggattaaaaaaatttaaaaaagtctaaaatttttggaaattggcgaccctttaccaaaatttaggacaaccctccctgaagaaaacttttgaatttatttttgtttaagcctggtgtgcaaccgcctggtgctgcgttgtccggcccattttcaaatgcttctgccggctttggcgatgtgtcggcaacaatcaaatttgagccgaatagggtaaatgagaaaattacggggaaaaacttggaattcatttttttaaaatttgtttcagtttaatggcccaccgccctctacggcttccttctcttccgaagccgcgtttggaagcgatttcacaaaaatggagccgaaaatggttggcatattatatatatatttcggcatttgaatttaaagcaattgaggcaatcaatttttaattaacaaaaatgaaataaaattaattgtttgccacgcgctatttattggcattttgttaaattttcattaaattagggtatatacttattatttattattgtaactgtttcctcccctccctgtacaggctggttttggtcaaactcagcagcagcactgctccgagacggagtcggacgccccgcccggcttggactgatgatggtcgccatggggccaacaatgactgactgaaaaatgctggccaaattcttcgtcgtacaccacacattttcgtcttgatgacttttccttttttgacacactttaccacatacacaaaaaaacacttaattggcaattcctttttttctgtttattttaccgttttgtgagcgaatgtttccacaaaaattgacttttctttgtttttttaattattattattttcagtcggactacacacacccaatttttttcacactcattatttgatgctttgatttttgtttgtttgaccatttttggccattttttcaaatacatattatacctaattaaatttgctttgctttgtttgtatgttgttatgttttgtctccgctaatgagcgcgtgtctcgggaaaataagctttttttgaatgcaaaaaagtggcaaaatgtggtgtcatgaacataataaagcattaaaataataaacaatttgttgagctggaagagaaacaaagcgaataattaattaagaaaagtaataacatttcaattagcaaaacataattagttgcgtaaaattgcctaattaattagctaattatgttgcggcccatgtttccattgttattgtcttgtcggtgatttttatgagccgaaaaatgctctaatgaaataattgacttcgccaaaacaaagaaacaatgccccgaggcaataaacaaaatgaccaaatcaattgcttataaaaaaaatttaaaaaaaatgaaaaatataaacagaaaaccttgtcaaaatatatcgaaaattcattaaaattcgaattgcgattttttccatagaaaaaaaacacaaattcaaaccgttataggtcattctcggccatttaggaaaacccaggtccaggaaaaaaatcccgagctctagtattatattatccccccatggcttaatgatgatgatgatgatgcctcatttggccataattagttgggacgggaccattggccaattgatcagcaaacattccgatcacacgcaccgattagtcaaccagcaatcattaattagcgaagcatttgctgcgtgctgtcacatcctccgctgccgcgctgatcaacagcagaaatcatcaaaagtaacaaaagttcacccatccatcatcttcatcccgttgcgcgacagaaagtgaaagtcagtcaatttgtgccttccattagccgcctaattaactnccccgcgcgacgactaatttgaccaagcactcctactgacgctgctaatgatgatgatgatgatgatga

SEQ ID NO: 2907 - DNA, 1496 bp, Heterodera glycines
  unsure (1)..(1496): unsure at all n locations
atgatgagggtgatgacgctgattgcggcgccggtgcctgcctttttcggtgcagttgcgcaacagtttgtcacagcgggcgctttgttgcctttgtcctcccctgaggggtcggtgagaccgtggccaatcgctgccctcctccccccataaagcgttccagctttttctgtatgctttagcttcccgttttggccaaaggggaggaccgccccccgccccgttgtgcagcgtttttggccaagggcccaccccccgtgcccccggggggtgaaaaatttgatggtataataaaagggggcccccgttccacccctcagggaagtgtcagtcggccacaatttttgagccttcaaacaatgttttgtaaacggactgacaacactctttgcccccctccccttgtcattggcgtttttggataaaaaatttaaaattaattattttaggaatttaaatttattttttaagttatgatgaaaatccagtggataactctgtttgtggtgcgttaagtcttaattgggcttttgttaatacatttaaaaatgctttttaattataaaaaaaagtattaaattaaatttttccaataatttaaatattaaattttatttatttaattaaaatatataaaattttgtttaaaataatcaaattaaaaaaatgaataaacaattaatttatttatttaataaacaaatatgtatattattttagttgtccaccaccatttcggcaattttttgtgcttcttccgtcaaattgccaagggcaattgccgggccaccgaattcgtacgtaaaaaagccgaactatgcgcaacagcaagcagttcaaaagcagcagcagaacggtatgccaagctcggcaggacgtgttcaaacatcggttggcattttttaaatgaatttattaattattttaaatttgaaaatattatttaaatttacttcaaaaataacaatggcattttgatcaaatttgtttaatttatctttttagtttggccctaaaatcacatttgctaatggaactgtgttcacatcagtttccgaccaaggggtccaattaaaatggaaaatttttttaattttatgaaatttttatttttacaggttgaagcttcagtccaaactagtgaaaggtgactaaacaaattattaatttgatttaaataacagtcataggttgattgatttaaaataacaaaaataaatattaaaaactggaaactattaaaattttaatgcattttttcttcaaatcgcacataaaactagagcatattttcctgcaaactattgtttaaaagctgagatttttcctgcaaaaatggaatctttcactattaaattagttgtttaaaaatattanaataattataatatatttaaattgatttatttttttagtggaattgcttcagcttcaacaaatgatgctgctccttcttcatcatcatctngtgctgcggatgctggcactagtgaaag

SEQ ID NO: 2908 - DNA, 2002 bp, Heterodera glycines
taaaattgttcaataaataaataaatttatagaattatttaattttttttaattaattcatataaatcatattttcctgcaaatttttgttcaaaatgcgagtttttcatgcccaaaatcccggttaataataaaatacttcaataaataaataagttatttaatttaatttagtggtactgtttcgtcttcaacaaatattgttgctcctgctccttcttcatctgctgctgatggtactgacactgcttcaaatacgacctcaacaacacccacaagcagtagcagcagcagcagcagcagcagcaatagttctgttcaagctgaacaaccaacgcccattgaacagctgcaaacagtgaattgtgacgggccgccgttgccgtgcaatttggcgggaaggtcggcacaatttgaaatcaaaatggaatttggaatttggcgggaaagtcggcacgaatttttgaaaaatttaaatgaaaattcatatacaatttgatcgtaaaatacggcaggatttttgaacaatttaaatcaaaattcaaatgcaatttgatgggaaggtcggcacggattctttgaaaatgtaatcaaaatttatatgcaattaggcggtaaaacacgcaataatttttgaaattaaaattaaaataaaaattcaaatgcaaattggcagtgaaggccggcccgaaattttgaaaaatttaaatgaaaatttaaatgaaattttgctggaatgtcagcatgaatttttaaaaatttaaatgaaaattaaaatgcttttttcatttcagaaattcttaccattgttattgaataatttcttattccaattttaaaattcaagcaaaataaaaattattaatttgcaaaaaaaaattaaccatttattattttaatttaaatttaataattttttgatggacataaaaatctaaatcccagttaatgatggaataaaatttatctgcggatttgaaaatgtttaatgcgagttttaggaaggatttcaaccctaaattgaatggcggtgatccgaatcagcctgggatcaaagcgcgcttaaatgccgaggcatttcgctatttgtcaggcgaacttgtcggcatattgagtataacattgcattttaatgaatgaattggtttttaattaaatttcctaattaattgaaataaattttaattataattttagcagttttaatttaatctaattaattaatcaaatttcagactatcaagtgaaacgcgccaaattgcctgacattgatcagtgcattccgaaggcaattttttagaaattatttatttatttaaatgttaattaatttttaggccggcggatgtttgagaataaatcatttgcatgttaaccgttataagtgctcgaagggtaaacacattcaaaaattaatctgttttttatttatacaatttaaaatttgtttattcaaaattaaaaattaaatgcaaaaaataataaaattaaaaataataaattttcaaaagatgttttcttcaaaccttcacaacccaatcgtttgattatggatgtgcgcaacattgaccttgagtaagaaataaataattaggaatttataagaattatataaaaattggctaattaaaaaagcagtttttgaaaaggcattttcaaaatattttttaaattcatatttattcatgaaaatgaatttttcggagtctctgatcacaaatcgacacccgtttcattcattttccgaattcttgacttttcccgatttgtttttttgacaaaaagtatttttgtaaaacgaaaaagttcagccattggtttttataattttcaaaactgctctttttaaagtagagccaaaaaaaaataattattattttaattattatttactattttatttaaaaaaaaaatatttttccacagcgtaaatggcgatttgggaggccaaattaccatcatgcatccattggcattgtttggccaagtgcaagtcactgct

SEQ ID NO: 2909 - DNA, 1463 bp, Heterodera glycines
  unsure (1)..(1463): unsure at all n locations
aaaaaaaaaaaaaaaatttttttttttttttttttttttttttttttttttttttttttaaaaaaaaaaaattttttttccccaagggtaaatggggatttggggaggccaaaatttccatcaagccctcccattggcctttgtttggcccaatgtcaagtcccctggtcaaaaaagaaattaagtgttaattaatttttttttaggtaaaattttaattaattttttaaatttaaaaccattaaaaggtaaaagtggggattggaagttttgttgaagaacagtgcaacaaatgaggcaaaactttgggtggttttcttgggaccaatttttgttttaatttgaaatttgaaattttcaaaagcaaaaacaaaattcaaaaattttagattcaatttcttttattgtttttctttactctaattaatttaattaaaaaaaacaaattaatttataataattaaggatcatttttcataataatttcaattaatttattgttgtgttgtttttcttagaaatgatttttgattgctaattatacaaattaatttttaataaataaaaccaaaagaaaacattaatatgaaattgttttaaataatgcgtaatcttaacacatttattatattttatttttaatttattattaatccaataatttcaggctcaagtcgttttggccgaattgacacttccatccaatatggcggcttattaggcgacattgccaaccaacagcttaaagtgagtaaaattataattgcaaaatttaaattttgagtttaattttagtatgaaaatattttaaataaatttaaaagacaaaagttaattagcaattttatttatgatctaattaattaaatgaaatttatttaaaaaataattaataatgttattttgaattagttcatctataaattaaacatttctttggacattaaataattagtttaatttttttaaataaaatttcatttgaaaatgcccttggcaatatttccctaatttaaatttgttaacatttttcaattttgaattcagcaaaaaatcaacaaggttgttcgtcgccaaatcacttcacaagtaccacatttgcatgatcattttttaaaatattttttaaaataaataattaagcaattttcaatttttttagctttgtaaacgcgtcccacaaatggtcgatgagcaagtgaatccccaaattgctggcgttgtgccaaagaaaattgcgttcaaatccatctcatcggttgcactgaattcgtcatgtcttgcagctttgacgggcgacggcggcgcagtaatttaaataaaattcagaaaaaataatcaaattaaaatttattactaaattattatcattttaattgccatttgaattttattaaattttattgttattattatgcaaaagaatttttttttcttctnataaatttttttatttctttaca

SEQ ID NO: 2910 - DNA, 976 bp, Heterodera glycines
  unsure (1)..(976): unsure at all n locations
ttaattattattattttgtccatttcaataatctttaaaatgctcttaattcgccctccgtttctttcgtatgattttttctttcctcctcctttctttctattattttattatttttcgtttgaacccaaaaggcaatgatcagcggaagaatggggggaggaagaaaaagaaaacgagtttttttttgggggggggacgaatcactgaaaattctcccgttgaaattgggggaggggggtgatcgaatattttgttacgtatcgacggatcaattgactaattagcaaatgggttttggtattcttttcccgaatattcccttcctttgccttttttttttggcattccgtttgctttttctctcttttcatttactcatttctctttttacctttccattggaatgaattcccttttttacgctgtatttgtcccttaaatggaaaattcattggactcgaatgaattttcacatttcgtgtanaagtgacccccccccccccctcctctccccaaccaaattacctatttcttttccttcctccttctaccagggttgttccgggtgacccgaatcccgaaacccacatttttctcgtcccgaaacccgaatcccgacccgatgattttgggtcgggtttcgggacaaaataggcactggtaagaaaggggtctgggtgaaaattaggtagataaggaaattggtggaggagaatttttgaaaaaaagattaaataatatattacttttaacgcattccttttgcctttcattatttggcgtttgggttcgattccgcacctggtaagaatatttttaatattttcttttacatttttcaattgaaaattaattaataaaaatatttcaacttaaaaataattatttttccttttttaaacagtctaaaaccgtaaattttaccaaagatctggttagtttttgacaaaatctgtttacaaatctcactcaa

SEQ ID NO: 2911 - DNA, 2255 bp, Heterodera glycines
  unsure (1)..(2255): unsure at all n locations
acagtgaccagttgagtcccgccgggaaatgacacttcagtccccgagtctgtaacttttcaggggatggttgtcgcaaaatcgagaggatccgataacattattattgtaattatctaattatgatcaatatttctttttcatttcccttttcccttttctcttttccctattttcccttttttctttgtcctccttctccttctcattgtagttccttccttcctttgtttgttgtttattcggttgatcatctcttctcccgcccctaatcactaatcacttttatcaccactccattcacagcccaacaaaaatcaaaccaaatcacgacgtgtccattattggtccactccctcccttccccctatttcttataaaattattggcaatatttaaagatcactttcttcttccttctcattcattcattcctcctccctcttcttctttttcctcctcctcctcctcttcctcttacccttcttattccttcttccttccctccctttttattactttttctttttctgttttcttcccttccgcctccttctttctctctctctcctctctctctctccccccgtctttcctccgccgttggattattgcgctgaatgccaaaaccgcgacagacatttcgtacattttgtagcaaacaaattccgttattccgtttaatcttccgccgagaagacgcgcatccatttgataagctgaattttcccaatttgccggcgcattggcagcacaaaacaaatgatgagaaggaagtgagtttggcattggcactttcgcttaaagttcaaaagggcggttgggtaattactgccctaattgccttaattaattgaccttttgtcgctaattgtccgtcatccgatcaaaaatcacttcccctttttgtctttttgtcttttctttttttctctttttcgcctttctttggagtgccgtccgtttgtttcgtcatccttccctttgcgcatcactgttcaatccgccggctcctctcaatccggaactcgtggcttaatccaaaactcgcgggacggtctccgccgggaggcgacgaattaataccctcgggggattctctctttttgcaaaggcaatttttaaatgtggaaggaaatgattatgagttgattaatctccaagtcacgcgaggcgactcataaagcggcaaaaataaaatgcgaagggaaattccaaaaaaaaagaaaaatgattttaattttaaattaaaaatcaaaaaaataattttttttttttttttaatcctttaatgtaataaaataacagtaattattattccaaaatgtttctctcttttctccccaattatgccaatgttttcttttcccttctgtctttggcatgcttttcccaccgtttttcttcgaatttatccaaaaaaagaataaattctccttctcggttgaccattttaggtgttctttttgtagttttgccaaactttgccccttttttgcaaccataggccaataataattagggggaggagcaaaattagaaaaggcggggcagtgccgtggctttgtaaaagaagtgccgccgggcagtgaaagccgcgcattcctaaaaaatcccccgggggtggggcgtaattggcacgcattccttggccattatcgccacaatttgccaaagatggaaaaaaataaaattgctaacgaatcacagtaacttatggtctgccattgaaaatgtttcgaaaatgcaaatgcattgcttcaattagcagttcaatgccttgcttcttcagcactgtctccgctccgtcgtcttccgtcaattcggccaaactgctcgccgccatggacaattcctcctcctcctccacggattgtccatccgcttcggtcggcctcgtcgacggtaccgttggcggcacctccgccattacggtgcccgtggtggagtccgtttgtgtgccggtcgatttgccggctggcactcaaattgtggtggagacgcaggtgctcacgtcggacgtggaccaaacggtggccgaggtggagaagctggacaaggtgtggtggcacggcaaaaatgcccaaaaaaaatttcggcagctgaaattttccccaatttcactccgatcacttctcttttttccgtttgacagttcattctttgcttagcaaggtcgcatcatccancaagttgagcaggcgctcacctaggtaggcggcccttcgacggccgacgaacggacggcggagaca

SEQ ID NO: 2912 - DNA, 1229 bp, Heterodera glycines
ggggggggcggcggtggggatctgtgaatgaattggactgatcagtcagtgagtgattgatcggtgattaattgtactgatcagtcactgatgagtggtttggactaattgatcattaagtgaatgattggatcgccgatcactgatttggaaggtctgatcggagttaatccccgaaatgggccgacgagtcttattcaatggtccaaataatcttttgcagtttttgccgaaaatgtgaagggcacggcttccaacggccactgaaagggcacgcgtcctcctgtccctacaacaattgcacgtgcaaaacggtgtggttttggtccccatccgccgtcctcaattctctgttcattcagtgcaaaaatgtgatgagtttgcgtgccaatgccatcattcgtcgctaccgcacgcgcaccaacgaatgcggcctcgtgctgaagccggtgcacttcaaaaacggaaacacgcgactccgcgtgttccccaaattcatcagcggttcgtttggcactttcaaacgaagtgaggcgcaacagaatgccaattcagaggaagaatgtctgccaatccctccggcgcagatgggcgaattgcggacgaaaaattgcagtggcggagacggcgagacggagcagcggacggtcggcgagctcggcggaattccgctgggacagaaaacgctgagtctgcgcaatttaacaagcgccgggggcagcaaacgatttagtgccattgaggtactataaaggaaatgagtacgctaaaaagaggaagagagagagagagagaaggtaatatgtagtgagagggtgagagtgagagagagagagacagcatggtagagagagagagagagagagaaagtgtgtgaggagtgggagtgagaaggggacatggtagttggttgagagagaaagagagggagagagagatgagggaatatggtagagagagagggaaggcgattacggtagagagagagtaatgcgtaagagtgcagagaaaaatttattgcttatttcaggacgatgaaatgcgtcccgtctcctccccaaaacgggccacctcccatgatggcaattttgtcgagctgttcacttcagccactagcgccggcggcgatgagccatccctcgtgccggccgggctccacctgctgcccttcgccctgccgacgagttcgacttcttccgatgcattggcacaatgccaaacacaatcgg

SEQ ID NO: 2913 - DNA, 3872 bp, Heterodera glycines
cgagacggagcagcgacgggtcggcgagctcggcggaattccgctgggacagaaaacgctgagtctgcgcaatttaacaagcgccgggggcagcaaacgatttagtgccattgaggtactataaaggaaatgagtacgctaaaaagaggaagagagagagagagagagaaggtaatatgtagtgagagggtgagagtgagagagagacagcatggtagagagagagagagagagagagagagaaagtgtgtgaggagtgggagtgagaaggggacatggtagttggttgagagagaaagagagggagagagagagagaaagagagggagagagagataagggaatatggtagagagagagggaaggcgattacggtagagagagagtaatgcgtaagagtgcagagaaaaatttattgcttatttcaggacgatgaaatgcgtcccgtctcctccccaaaacgggccacctcccatgatggcaattttgtcgagctgttcacttcagccactagcgccggcggcgatgagccatccctcgtgccggccgggctccacctgctgcccttcgccctgccgacgagttcgacttcttccgatgcattggcacaatgccaaacacaatcggcgtgtctttttgccaagacaccgaatcgaagtgaaaatgccgccaatttggagtttcaccagcaaaacattctgtcgctgaacagcgcgagaacggcgacggagggagggcaaacgatgcaattttatgggaacaattcgacggcgaatgtgccgataaatttcgcaattggggcgacaaataatggacaaccgcagcagcatcaacagcagaacatcgttagtctgctgggaccatttagcggagcatcgacggcaaacgacggacaattgggacaaaatgcgacgatgggaaacgtactgacaatgacgacaaattcaatgggcggactgttcatgtgcgatcagcagaaacagcaaaacctatgggtgcagcagcagcagcagcagcagcagaaacagcagcacattcaggtgatcaacagcagagaggacatgttgatcactgatcagtggggacggacggagcgaaatccccgggattatcccgggaatttccatgcaaacagttttctatgatttgtcactcccgccagtggtggatttgggtggaaatttggaatgactttttattgaaaggaaaacgaaaatcttttttgtaaccaaacggaaaccgacggagaagggaatattctaacggaaaaatggacaatttaaaggaattcggcccagcaatgatttcaattcaacccaacccaatccgtaaacagaaaataagtgttcgattgttgcgatggcgattgaattctcttaattttgggaatgccccctcccccatttttttgttctatcgatgtttttctgtttccgatatgtgtccgttttccgtgccgtgccgttcgttgactgtcccttcccccagggtttacttgcccaactcgacccttctctgctcgtccagctgctctctccgttccccaccgtccctcaacagcatttgcttcctcctccgccttcttctgtaaacccactcactcaactcgttgaacagctccaacaacttcagcaacacagccccgcttcttcgctgctttctgccgccggtgtgtgccgaaattcggcgacggaagggaaaaaaggcgcatttggcaacacaacgacggaagtgccgtcgtttcacagcccaacagccgcaacagcagcaggtgggcaacgaactgataaatggacaaatgggcacagcgcgtccgtcctctcacttttcacttttataattgagttatttactcctggatcaaaactcggaaaatcgagagagatattgtacagacttttgcagttgggaagcaacgatttaaatctcgccaactaagccaaattcagacatttcgccaactaatataaaatcattttttaatttatataatgtttaatgttattagtcattgctctgaattgttaagagagcaaccgacacattgctgaatcgctgatgagagcctggtttctcatagataaacaaatttgcatgaaattttattattgtttcataattaaaatcagttttaatctacatagttggcaaaattagttggcgaaacgtccgaatttgggtgagttggcagggaccagagcgtttgggcccccgtttttgggcccccgcgtttggacccccgtttttgggccccggggtcgtttgggccccaacccaaaaatagaaaaatgtgcttttttaaaaattaagattctaaaaactaagcctgagggatccctcgccacttggcataagttaggtttaattaacattcgctcattttttacaattttacttattccaaatcctattattttttaatagttaaccaatttgatgtacattctgatttgtaaatttttcagaaatggctaacccaattgcaaccaaaaaacaaaaagtaaaattgtcttacaaagaccacctttgcaccttcgctaaaatgagttctgatgggatgacaaaattttggagatgcgagttcaaaaaatcaatttcacatagtgagttggcgaaacgtccgaatttggcttagttggcgaaatgtccacttggcgaaatgtcgtcgtgccaatcacggcccctctaactgcgaaagaggcgaacagagtttctttaattttttggagtttgattaaacactaagtaatgcccaatggttgttgagcaaatacgccatatgttaatttaaattccatctgtccaacagcatctcttcccaacattgccttgtcccatttgcctccgtccgtcgccgtgccgcgtttgtccgccgttggtgacaacgaaacgacgcggcccatccgtctgacggaaacattggcattggcaccggacgcgtcccattggctggcggacccgcattttagccaattcgtggccatcgtcggacagttggaacggcatatgctcggcattggcccgcgcgagcagacgacgcccgcgacgcaaaacaaaagcggacaaaacccaccctcatttgtgttctgaagacaacaattaactgagttaatcgaatgctactgactgattatggacatttatcagcgattgatccccaacattccgatcggagaaaacaatgagaaccaaatcagaacaatcggacaaatacgagttcctatgttttcccttttcctgctgctgctattctcgtccttttttagtgatattacatttttaattggcttttgtgtcataattaggccatattcacattttatgatttgcaattggagggctaaattttctttaaacaataaataaactgattccttccttttttcctttttaccatttgttttactttacacacttttgcacacatcgggcggaggagtgtcacaatcgacgggtcaaaacgcacaaaaaaaatattcggatttgccgcaggggacaaatggaaagaaagagaaagtgaagggccttttagggtcattcactcactcatttcactcattcattcccttcctttttcccccttttccctttttcgctgtcctttgccccccgtcgttctctgacctctcattttactaagggcaaaaattcaaaaacggtctttttctctttgggcgtcttctcaggcgaaacaatggaagggcgggggaaaggttttggcgggcaaatttatgaaaaggcgaaaaaggggagagaaaaaaaaggggggagagaaaaggagagggtaagaaaaaggcagaggaatagcaagagaagggcagagtgatgagaaaaagagggatggaagacgggaggacagagagtgggggggg

SEQ ID NO: 2914 - DNA, 1447 bp, Heterodera glycines
cgttcttccctcccctcccctcccatttcttatccaatctttgtttttctgcttctgttccttcctattgacgggcgtgtgaagtgcctttgggcggaatattttgaattttgcattatggcaaaacgccaacatttgcccattgcgaaattccgcccccatcgaaggacaaaagaaaaaagcagacgggcggagatggtcattctcattcattcatttcattttgctatttaagcacgcctttgctttgcaatttcactttcctttccattcactcactttccgtttaccctttgatttaatgcaacaattccctgccctttcccttcccttttcttccgttttttgcgtttcttccattttttgtttgtcctttcgcggcccactgggtattctcctgtccacctcggcagagacaatctgacgctgatcagatcggtgactagacagtacccagcgggacacgaagaggactttggaatgtgaaaaaaggggtggatatgaatggaaaacattttcttgcatcgcttcactctggagggactgaactttgtgcagcggcgcattttctgcaagaaaccgatgcacatgtgcaggcccaccagagaatgtgggagagcacttccaatttgaattcaaaatgctttatttgtgttattttactacaataatactgatgcagtgcaacagcaaacgccaaagtggccaactgcttttacccgattgaaatgtgatgcctgtacatttacaaatttggtatcacagttcaatccggtgccagcggttgggcacaccaaaatgagagaaataaaggcacggtgatgactcaacaattgtcaacaaaaatgtgaggtcccctaagaattcctaaatcgaaaatacaatatttttggttccattaatctcgttggttcaccattcactgacactaattccttaatgggtgacggggaggaggcggtagtgaaaggcttacccgcaccgaaccatttgctgaaaattgagacaacaaaaaggggcataattatccgacgacataaggacaaattatttatttcgatatataaattattatctctaaaaatcaaaaaatgtgaatacaatgagttacaaattaagcgaaaagttggaaaaccatcacaataattttgctcattcagcgggaaaacagaagataaaaatatttaacagaagcggggaagggaaaagcgttaaaccccttattaaggtcgtagtttttgatgaaaaagcaccccagttatctatttgttatgcaaattcagcaggagaagcgtctgatatgagttgaggcaggtcataagtgccaattccacctggtggtcaccccgggagctggggatcagttgaacctagagggaattcaaattggatttaaagtgggaaattgggaccaaagacgggtggagggtgacgaggtgcgagtaaa

SEQ ID NO: 2915 - DNA, 3932 bp, Heterodera glycines
  unsure (1)..(3932): unsure at all n locations
ttcttttttcatttcaccatcaaatggtaaatctttctctcaatgcaaaaacgatttctctctcttctcttacaattctttccttttttcgccattttccattcatcacatctctctttcacttcagaagcccccatttcctcaccagtcgcctctttttccttcgggttcccaggtttcgcacaccaggtactcgggccctcggcctttttcgcttcgctctagtctcatttctaaagaaacaattttcaggcaactcagtgactttcttcggagttgagaaaactgcacaattttcgtaataaaatcgccagtattggtgacactcaaaacaataatcgccaaaaatggtaagggatcaagcgtttgggaaatgactcagttgaaaaatcctggagataatttcggtatcaatggaaataaaccattaaccaatccattcgtatttcgattcagaaaatcagaaaacaaaaaatgaattacggtgggagaaagcagatatgtcatttatccgagtggccagtataaaattatttttgcagttggcccttatggtgaggattatatttgatttaaaatgtttattataatgtagcattaaaattgaaagatcatataatagggcaattttataaaaatgaattgtgctttgttgtttaagacggcccaaaacagtatactcttttgactgacaaagaaggcaatctcgaatggaatttctacaaaaacatacacaacaataattttttaaaagaaaattacataagcactaaatcggcagaaaaaataacgattttggcggagaagggacccgataaacgtattataagcgaatttgttaattacgctgaaatgaagaaaacgatggatgaaactaacggacaattatgcaattcaactttcatcaattttgacgcacttacggtatgcttgaatcacaagcaaaagtgacttctttgtgaaagtagggatctgtgtgagtctttcttagttaatgcattttggtggcaaaaaatgctataatattgccaaaaataatgctaaaatgttgccaaaatatggagcacttattaaaatcttactgcttagaatttttcaccgtaaacaaaattctgataaataggtaaaaaatagaataactcgtacctattaataacgtgtcaatcaaaaattcctgtctgtaatttactgcttatttacattcttccgtcatcattcagatcgcacctcctgacttaccaagattaaatgccgtagaattgaaccaacaaagcagcgggaataaaaatgggaaaacaacaaatggaaaaggccaagccggggacttatcgcatagagaattgtcgaaagtggtggtcccgagttgttataatgttattggcgatggtgattgcttctacaggtaaaaacaacaagacagccagctgatttattttcttcttacagatccgtttgctattcaatgtttcgagttgacaaaacatcaaactctgacgaattacgaattgctgtaggcaatacccttcaagcaattgtaaataacaaagaatatttcccgaaaaatcgcctcaaaaatcacgaagaatttgtaagagagttagagtatgcattgttggagaagccatcaacagaatggtttaataaaaatctagaagcatatgccaaattcgtggcaataccggcacgaaatggaaaaggccgatgggctcagcttgaagatgcgcgtcttatttctctttttctaatgcgacccgttgtaattcttcatccaattgcggaaaagaaggtgcttgtagaactacagccaaaatatgacgattcgtcgataatgagacgcattgaagtttatttcccagacggggaaacaatggtatgtttttgttcaattattctggatagagtgaagcggggcctgggaacttttggaaaatcgggaccggaacttgccgggacccaaaaatcttggctctcggaaccgggaattgcaatttcaacgacaaacagtagcgaaaagtctgaattttcaacccaaagtttcaaaacttgaaagtctccgaatgaaacttttagagttccaaaaactctcggaaaattaaggaattataaattaaattttcttttttaatttaaccataaaaaggtaaattttattcaaagcaaaaatgatttatatttatttcttaaattcttccttttttgccatttccatcatacatattcttcactcagacccccattcctaccagtgcctattttcctcgggttcccggtttgcacaccggtactgggccctggccttttcgctcgctctagtctcattctaaagaacaattttaggcaaatagtgactttattggagttgagaaactgcacaattttgtaataaaatgccagtattgtgacactaaaacaatatgccaaaaatgtaaggataagcgtttggaaagactagttgaaaatcctgtgataatttggtataatggaataaaccattaccaatccatcgtatttgatcagaaaacaaaaaatgaattaccggttggagaaagcagatatgtcatttatccgagtggccagtataaaattatttttgcagttggcccttatggtgaggattatatttgatttaaaatgtttattataatgtagcattaaaattgaaagatcatataatagagcaattttataaaaatgaattgtgcatttgttgtttaagacggcccaaaacagtataatcttttgactgacaaagaaggcaatctcgaatggaatttctacaaaaacatacacaacaataattttttaaaggaaaattacataagcactaaatcggcagaaaaaataacgattttggcggagaagggacccgataaacgtattataagcgaatttgttaattacgctgaaatgaagaaaacgatggatgaaactaacggacaattatgcaattcaactttcatcaattttgacgcacttacggtatgcttgaatcacaagcaaaagtgacttctttgtgaaagtagggatctgtgtgagtctttcttagttaatgcattttggtggcaaaaaatgctataatattgccaaaaataatgctaaaatgttgccaaaatatggagcacttattaaaatcttactgcttagaatttttcaccgtaaacaaaattctgataaatagttaaaaaatagaataactcgtacctattaataacgtgtcaatcaaaaattcctgtctgtaatttactgcttatttacattcttccgtcatcattcagatcgcacctcctgacttaccaagattaaatgccgtagaattgaaccaacaaagcagcgggaataaaaatgggaaaacaacaaatggaaaaggccaagccggggacttatcgcatagagaattgtcgaaagtggtggtcccgagttgttataatgttattggcgatggtgattgcttctacaggtaaaaacaacaagacaggcagctgatttattttcttcttacagatccgtttgctattcaatgtttcgagttgacaaaacatcaaactctgacgaattacgaattgctgtaggcaatacccttcaagcaattgtaaataacaaagatttcccgaaaaatcgcctcaaaaatcacgaagaatttgtaagagagttagagcatgcattgttggagaagccatcaacagaatggtttaataaaaatcttgaagcatatgccaaattcgtggcaataccggcacgaaatggaaaaggccgatgggctcagcttgaagatgcgcgtcttatttctctttttctaaagcgacccgttgtaattcttcatccaattgcggaanagaaggtgcttgtagaactacagccanaatatgacgattcgtcgataatgagacgcattgaagttnatttcccagacggggaaacaatggtatgttttt

SEQ ID NO: 2916 - DNA, 1600 bp, Heterodera glycines
gacttttcagtaatttatcaaacagtgctctatccttctgtatttttatttttgttgcaccgttctcgacagtgggcgatttttgctacaccgcttgaaattatcagaagcaattatgtagcatttttagtggccttttcaatgatgccaaacttgaagaaaagtgcccgcagttactggttgggtattagctgaaatgcatttaccccccatttttaggtggtcatatgtttagcataaaattttatttctaattctcaatatttgcaggccaaaaattctgacaaaattcctactaaagtaattttcagtgctgatcaaaaaagtcttttacagcaacttagtccgatcattccttcatagtgatcgggacaccccaatatacagtgaaaatcgggaaaattttcgaaaaaaattgctaggagggtggaaaatttctctgtgggtgacagattcctatccaaaccataatttttggtgaaaaccttaaaaaacgggctcaaaaaaaattttcgatagaggccatggtttaaaaatacgtggaaagggggaggtggtttaaccgaaatttttgcgaacccatctcaacatcgaatttgaccaccattttttgagggatctttttcaaaaaaaaaacttttggagaacaaaggggggataagcggcggtggtgttaggagtagcgaggaaaaatttttcttttttttgttgaaaatttgcaatttgttaacagattttttctaaaatataccaatttttgcaattttatgacaattttttgcaaaaaaaaataattggagttttggggggccggcggtgccaataggcgtcgccgaaaagtttttcggaattttaattaattaatattaaggaaattcttcaaaatttcataaattttcaaccttcctcccttcgttgttgaattaactttttaaatttttacaaagctcggagtccccaattccccgaattagtgtcggggagtcggggggcaaaaagtcgggggctggggacctcggggagcgacatgtcgggggtcggggcggggaataggcccaaaaatgtcggggatcggggtcggggagctcggggacggtgagcaaccctagttttcagaatgccggcctcgtcactatcgtcactacacctcttaatgcgggtgcagcaattcgcgaaattttgcaaagatccatcaaatgcggatatattgagattttgtgtttaattaaccatttataatgcatatctttcagtcattatttttaaatcaaatttaataaactgatttttgttgcaaatctatacaaatttatgtctgttttattaattttgttttttttcaaattgctaccaatttctatgcaacttttcaagcttaaatattcttatatataatcattttttatttatacaatatccaaaaaaatattaaaaaagtaagtgatcccacctcccccccccctcctcttgcacagctatgctaaataatcaattgcaccctactcctccccctcccccggtccgattaataaagtgctgccttctatgtattcccgcgtaagaatgggcatttagtgcttatgatcatgcaatgaaaatt

SEQ ID NO: 2917 - DNA, 2771 bp, Heterodera glycines
gattgggaattaatacattacaatttttttaagtagggttcgagccccgccaccgcccccgggggcgggacaggttttttgggctcgcccccgcccccgtgactctgacccccgcatcccccgcccccgtgaaaagccacccccgccccacggggctcgaaccctagttttaagaaactataaagaatgccaaaaccaaaattgttggttgatcagttggaacttttgttgagcaccggcaatggcgcggatgtgcactttttggttggggaagacgaagaaaaggaggcgagtgactgacaatttaatagaaatcgagggcatttaaaaactttaaaatattgatcagttaattttgacatatcctgtagtaatttaaagcaaatatatgtggtgtatttgtctactaagaccaagaaatccatttagccataaaagaaaattatggcacgtgacaaaggaaagaaaagtcgcttttttttcgtcgggaccgcaattctgcagggttaccttaatttcgacctatgtctaattccgaacccgaattcgagcaaaaagtcgaaaattcaaagtttcgaattaaagggagggacggttggggtaccatcgatagtattaattatcaaattttttgcatcatcgtttcttgcatggtaatttaaacccattgattggaggaaaagtgaccaccgactttatcattaggtcaaaagaatgagcctgtaatttcaggaaatcgcttaatttatcctaaaggcatatatacatataatacaatttgtgatcactgcaacaaaacaacaattttatatacatcagatgggctcaaattcattatccaatccacatcaattaaatggatcatttctcaacaaatcgtccagtcatttctgcttctgatcacttggattgatcactgcgtcaagaggcctaaaaatcgaaaagcaataagtttggatatctgcataagaagcctcattcactgacccatctcaaatgtcgatccgattccactggtccataaagttccatccaatcgcttccttctcccatttggcccatttgctttcgtcgcgcacaatcggacaacggatcagaagaacacggtcgatatcgttcatcttcttcaacgtcaattgctcccgggtcaattcgttggtcagaacaaatggcacaaccagatgatcaaaagacgaacgaaagcgaatgacagcgatgaaattgacgggagatgaagcggcgtaaaattcctaaaatagggaaaaatatgaaatgatagatgaatgaattttacgattagatgccccaatttgggtataattttttttgtcagcgaacgccaaagcccgtaaaaatggcaaataggtaaataatcacatcaaaatcacctctttgaaggcttcaatccttggcgccaaatgccagccaccgcattccaaccagcatttgaacacctttggcacattgtccggacggggagtgaaaagccatttggccaccgcctgtccttccgacgcctcggcactgtcatcgcatggaaatttggtgaagaaaccactggaataggcattgacaacgcgaagtgatggacagtcgtcgagaattgacgggacgaattgacgcaaacggcagaaactttctttggacaattggatgccacgaatgtttgtcgcgatcatgggccaaatgttgagcaaaatcgactccaaagtgcgttgatcgaagtacgtgtcgatggtcaaatgaatggggcgggcggcgagaattggacgaaaacggtggagaaaagtgatgacattgttgttgaagtacctgtgaaaaatgatggaattgttttacaaacagaaaaaaaaatcatcaaaatctcacttcaatgaaatggctttgaatccgacgactctctttggcaacggcttttgcgtaattccaaacgattcccaattggcattgacaacatccatttccttggtgccatccgcttcgaacttcattttgattttcatggatctcagagtccagtagcgagtcttgaagtgttcatccacgtagaagtcaaaacggtggctgatcatcgcaattccaaggccaagttgtgaagccggaagcaattcgaacacacaaagccaaccgtcgccagagataaaactgaaaaaaggaaaacaaaatttaaaaattgaaattgaaaattggcattttaattttacattgctttcgccattttctcctccgcttcgtttcggttgtcagacattttattgaggcaaataattaagacagttttcgtcggacttcaattggcttagcaaagatgaaaaaattatgtgaaatcggccgtttcctttttaaaatgtgtggacttttggtgctgccccgccgtgaggcggctcctttttgtgcactattttcgtttttaaaattggatccggattttttggcttttttaaataaattgtgaaaaattcaaaacaaaaaacttttattgagctacaaatgcttttaagccccgccgtgaggcgggacagttccaaaatttgcaccacattttactgtggaaagtccaagtaccttaattggacaactacgtgtcaatgagcacagtcaccgttggccagttgtgaaacagaaaaatgcgaatatcagatgggggtgcgtcccatcctaaaaattcctttttttcgtctaagcatccctcccctttttgtgcactattttcgtttcaaactttttaaaccaatatttttgttgctttttgaaaaaaattgggaaaaaat

SEQ ID NO: 2918 - DNA, 1194 bp, Heterodera glycines
catccgcttcgaacttcattttgattttcatggatctcatattccagtagcgagtcttgaagtgttcatccacgtagaagtcaaaacggtggctgatcatcgcaattccgagcccaagttgtgaagccggaagcaattcgaacacacaaagccaaccatcgccagagataaaactgaaaaaaggaaaacaaaatttaaaattgaaattgaaaattggcattttaattttaattttacattgctttcgccattttctcctccgcttcgtttcggttgtcagacattttattgaggcaaataattaagacagttttcgtcggacttcaattggcttagcaaagatgaaaaaattatgtgaaatcggccgtttcctttttaaaatgtgtggacttttggtgctgccccgccgtgaggcggctcctttttgtgcactattttcgtttttaaaattggatccggattttttggcttttttaaataaattgtgaaaaattcaaaacaaaaaacttttattgcgttacaaatgcttttaagccccgccgtgaggcgggacagttccaaaatttgcaccacattttactgtggaaagtccaagtaccttaattggacaactacgtgtcaatgagcacagtcgccgttggccagttgtgaaacagaaaaatgggaatatcagatggggtgcgctcttttctaaaaattcctcttttcgtctaaccatccctccctttttgtgcactatttcgtttcaacattttatcaattttttgttgtcttttgaaataaattgtgaaaaaatttacgcaaattattttcgcttttaattatgatgtacaatgcttttaagccccgccgtgaggcggctcctttttgtgcactattttcgtttttaaaattggatccggattttttggcttttttaaataaattgtgaaaaattcaaaacaaaaaacttttattgcgctacaaatgcttttaagccccgccgtgaggcgggacagttccaaaatttgcaccacattttactgtggaaagtccaagtaccttaattggacaactacgtgtcaatgagcacagtcgccgttggccagttgtgaaacagaaaaatgggaatatcagatgcgggtgcgtcccatctctaaaaattcctcttttcgtataaccatccctccctttttgggagtcgggggcgtttgg

SEQ ID NO: 2919 - DNA, 1131 bp, Heterodera glycines
aaaattcaaaacaaaaaacttttattgcgctacaaatgctttaagccccgccgtgaggcggctcctttttgtgcactatgactttttgataaaaaaattttcgctttatatgatgtacatgctttaagccccgccgtgaggctcctttttgtgcactattttcgtttttaaaattggatccggattttttggcttttttaaataaattgtgaaaaattcaaaacaaaaaacttttattgcgctacaaatgcttttaagccccgccgtgaggcgggacagttccaaaatttgcaccacattttactgtggaaagtccaagtaccttaattggacaactacgtgtcaatgagcacagtcgccgttggccagttgtgaaacagaaaaatgggaatatcagatggggtgcgtcccatcctaaaaattcctcttttcgtctaaccatccctccctttttgtgcactatttcgtttcaacattttatcaattttttgttgtcttttgaaataaattgtgaaaaaatatacgaaaattattttcgcttttaattatgatgtacaatgcttttaagccccgccgtgaggcggctcctttttgtgcactattttcgtttttaaaattggatccggattttttggcttttttaaataaattgtgaaaaattcaaaacaaaaaacttttattgcgctacaaatgcttttaagccccgccgtgaggcgggacagttccaaaatttgcaccacattttactgtggaaagtccaagtaccttaattggacaactacgtgtcaatgagcacagtcgccgttggccagttgtgaaacagaaaaatgggaatatcagatggggtgcgtcccatcctaaaaattcctcttttcgtctaaccatccctccctttttgtgcactatttcgtttcaacattttatcaattttttgttgtcttttgaaataaattgtgaaaaaatatacgaaaattattttcgcttttaattatgatgtacaatgcttttaagccccgccgtgaggcggctcctttttgtgaactattttcgtttttaaaattggatccggattttttggcttttttaaataattgtgtgaaaaattcaaaacaaaaaacttttattgcgcta

SEQ ID NO: 2920 - DNA, 3038 bp, Heterodera glycines
  unsure (1)..(3038): unsure at all n locations
ttaaaaattgaagtctaattcgttccattgggtttcactaaaaaagtgctttttgggtaaatttaaattttttgatttcaaaatatttaaaaatacttaagaaagttctaaaaaataaagctcaaaaaggtataaatttgtttttaattacatatatttaaaaaatagtaaattttttattgtaaaattacataaattgccaaaatttttatgtttcttaagaaatctttcaaaataaaagctctgattagatattaattaatatattaagtttagaagaagtccaattcaatttttaacttcatttttaatttttcgccatttttcatttattaataaattatttaaaagtgtaatttattattattattattatttaatttgcattttgcagataatcctgacgaacaagcggccgcaattcgtcgagaagttgcaacgcgggaggaaacattgcgcgaacttcccaaattgtaatgtcaaaaataaaactcgagaaatttccgagttttcgggttgtttaggtctcagttttggtgccaattcttaattttggattcgaaaatcacgcgtttctctgtgaattcggttcggtattcaaaaaatttctcgaattttttggaccccggcctctagtccaggagaggtcatcttgttcacggggctcaatgaagcgacaatttcccaaattttctcgaatttttttggagtttttggattcgtgtttccggtcaattctcagtcccgttgctctcgatagttccctttttacgtaatattttatagagttcggacccgtatacgccgggttttcccgtatttttcgacgatacgagtttttacggactatggtttttacgggttattttagcccggtaagtccgtactccgtatacgtgccctaacacgtaaccttttccctaaccagtacactcgaacaatttgctaatattttgcatatatgtaggaagcgcatcatgccacgctttgtggtcaaggacatggagacgttgttcatcgacgaggttcgccagtccatcaatctgttgatctccaacttggagtcggtgccggtggcgcctcggcaaacaatgggccgcaaaaaggagaaaagccgaggaaacaggtgagtgccaaaatcacggggccaacaccaattaaaattatcgcgcaaaaattttggtgtctgataactcagtagtcactgatcggagaaatggctaacatatataattataatgtggagttgatcaaatgtaaatccgattaatcagcgtctcgttcccgttttaattgctgatcagtaatgaatcgtaatgaccaatttctttcgttcaaaacatgatcaatcaaaaattgttttaaattacttgttagtgaccagctttaaacacatttgaacagatttttcttttatgttcaacaacaaaattttggttcattagtgtttgacttttttgatttttttggtgtgctaattaactaactacgtataattcactaattaattaattaattacgccttaaacctcagcaaaaatgtcttaacaagaatatttgttatttttgtcaatttgtgaagtgcttttttgttcatgtttcagatcaagatcaattgaggatttgtcgttgttcaattcgtaagtttttttgttaatacaaaaaataagtaaaaaataataatttttctaattacgcttcggaaaagtttgttcgttttttgaactttttaatttttgttttaattactattaaaaaatttttgtttttaataattttaaaaattttgtggctctattaacactaattaacccaaaacaaaaataacgatttgtttgctgaatttgtatctgaataacaccatatacatttttatttgaatttaattttaagtattttaaattatttatttaaaaaataataatttttttagtttgaagcgcagaacaagctcaatgtcgttgaacaaaacagagaacggggacgacgaagtcagcctgaccaaaaatgatgtcgtgctcaatttcaacatggaggtaggtgttttgatttgatcaaagataatctataggattagggaacgattaggataagtgatctggaccatttgtgaatgattatcttcgaaaaggcactggtctgagactgtgactgatcggaaccgtttgatttaagctaatttgtaagtgtgattgcaatgatctctaatcagtgatcggctagtaagggtgatcaggaatccaagtgatcactgaacagtggtgagcctggtttgtttctggtcagcctaggagcgatcagacttctgagaattgggttgggcccatgttgactgatcattatgtaatttggcattgatttgtaccaattgatttaaatttgttttaaaaactctttaaaaaaattaaatttttaaggttgttgtgatggaagtgcagggactgaagtctgtgcagccaaatcgagttgtttactgcacaatggaagttgatggatgttctaaattgcaaacgtatgcattttaaagaattattaacttaatttcaattaatttttaattttttagagatcatgccgaagcctcaaaaccatcgtaaattttttgaaattttttgattttgtaaaagatgattactcaatattttagttgggatacacaaggcgatttcacgacaaaacaaggtgatgatttaactaaataattgatacaattaaaggaatttaaattgactatttttaaaattaattttttcaattttaaaattaaataaataaatcattttttaattatccattttaattaagtgctgccaaccgtcaaggtgaagctgtacgctgaggtcaaaaacatcgtcgcttttgaggataagtgagtttttgaattgattcatcagtgattatttatatgcacaaaaaatcgtaaaatattcagcaaaaattacaaaatatgtgcataatttttccanaaattgttaaaatagctaaataaatatataaacatttttgtaaaaaattaaagtagaataaagtttattatt

SEQ ID NO: 2921 - DNA, 4388 bp, Heterodera glycines
aaaattaagtttgttggaaatttttcggcccttatttgttagaggtcaaaaggaccattttaataaaggattttttgaaaaaatgtccaaatatgtacataaattcccaaaatatgaacaaatacataaaatacgcatatggatcatcgtcctataagctcaaatcaagctttcgagccctattgatcagcatcattttttgatcaaatcgaagatgatcatttttcgaccacttttgatcagattttttgtgattgctatgctaatctgatcaccatttttttgttcagagagctgggcaaagtagtgatccaaccgacgccgaactgttcccggcagcccgaatggtacaaaatgacggtgccaaaaagcagtgccgacaaaaacttgaggtccgtggcttttgaaattaaaggtgcaatggaacaggcaaatatgagagagcctggacctgggtttttttcatatctgacctggatctggatttcaaagatcaaaacccagggaaatccatgttgccgaaaatggcctggacttgggcctggggatccatgtcaaattcgaactctagataaaactttttttttaaaccaatttgatttccagttaattttgcagaattcgtctcgcaattcgaatggaaaaaccgctgaatttggtgagtttttaataaaatttttaaattttaaaaattatttagcgccaattttgaaactcagttaaaaaataaaatagattaaaaaatttttaaaaataaaaatttttttttttactttttgaattcagaaaaataaatttatatttatgtattttagaaaatttgcggctacctttacgggttggtggctcaattaattaataaacctaattaataatgattaattaattacccctaaaaattataattttttctctctctctctctctctctcttcagaattggccgaattgcgtggaagaaatggaagcggcgcttcttctgccttgtccaagtgtcccagtacgctttcgcaatgtgcacttatcgggagaagaagtcggacccgaccgaattcagtcagttttaagttaagagagttacggcacacggcaagggaaggaccaatggcaattcgtacaaaaaaaattaattaaaaaagagatttttaattcaaaataaatcttttgtttaaaatcttgaaaaggtgcaaaatttaaaattattttttgattattttttattcttattacaaaaaaaaatcttttttaacatttgaataaaaataatttagaaaattttctatgaaattccattgtcttttttaattaatttttttgcaaaaatataaaaaaaaagcttgaaaatttatcgaaaaaataaacaattttcaatttcaaaaaaaaaattgcacgaaacatcgttcgtcacatgaaaaagagtatggcaaaaagggagtaaaaataaattaattaatttataaaataatttggcgctatatggaaagtggccgattttgaatttcaaaaacaaaggggggaccctattgtttcgcaaaatttttttgtgatagtcataaaaatttattctctgtggtttttggggtctccgaccacgaatctttcaatatttgaccaattctgatttgctaatctaaatttgaacaaaaaatcataattttaaaaattcaaaatctcgatttttatttgagttcgggttagggattcaaaatgcatgtcagattcatgatagcgacctctaaaaccccggataacaaattatcatggtttttttatcataaaaaaattttgcaaaacaaaagggtcctccttattgtttttgataaaattcaaaatcgaccacttttcatatagcgccaaaatatttttaataggattctttaccattaaaattattgtgccgaggacttggacataataacggggaacaggcccgtattatccagaaaagaaattcgtgaggacacccgggttttttttttctatgcgaaatatgggatccggtgtgccattaggcgcggccggggaaaatttaaacattttgaatcaaattattaagaaaattgcaaattagatatctttttaattgaaaattatttttagtaataatttatggatgagaaaatcaggccgtttttatcccaaatattagcgtcttcaatctaaggtcctcaattctcgtcaaatattattttcaccatattgaatggaaaacaaaactctggtaaatcaagtttatttatagaaattcttcgacaatatcaatgaaacaataaatcacacgctttctaacaacacaaaagtagaattcacaataaattttaaatcacataaatgggaaggatgaagaattaaattatttctttgcttaaaagaaatattaaaatattataatttgaaggggatgaaaaagatcacaacctgttaggcacggggagaaaaaaggttttaatgggaagaggacaaacccgtgggtttcttttagacactaaaattatgtagagtttgtcctctgagctataatatgggaaggcataaaatgaaaatgaaggaacgataaactgccaataaaaatgtttctagagatttttaacaaaaagaaaattaagtagaaagtgaaacaaacggcaatgaatgaaaagcaaaagatgggcgagaaagaggagaaagaaaattcatagtgaagtcaatgaatgatttccaaaagcaatttggttttttctcaattgcttttagcagttacattggggttcgtagcatattggtaaatcgggcccacagtgaagatgcctcaaaatccaatctcattagaaaaggctaaactatttttatcgcaggggatagaagctctgattcaattgtttaaaaaaacaaaaaattaattttgctatatttaaactcagggtgatatggcagtgctttgtgcattgttaaaaatgactttgcctatcgcttaaaaatatggcaactgaacaagggaaacgtataattaagggaaaataaaaggaatcattaaggaaaacagagttgcaaatccgatgaatgttaaaagcgggaaaagcttaaaacaaagtttgggcaagtaatgccgagcatggcaatgggctgttacacggggcgaatgtgagtcaaacggatttagggtaaatttggttggagttcgaagtcgtggcacaaatctctctacggctcccgtcaattttgcccctggcccctctcttcttctttttctggcgattacccaacttcacacaagcaaagacagcgacaagcagcacaaacacaaaggcaaacacttgcagggcgacgatcagcccagagagaaacatctgcagagcgggtaaaagcatcggtaaaagccagacgaacataaaactaattagtctaattaattttctttctcctttttagcagtgataagtaagtgaggatgataggatgactcatcagacaatcaaaataaaaaaaacaaatacaaagtgcaaaagagtgaaatgaggggcaaaaaaagatgacgaattgggtggttaaagtgcagtgatcggactgacaatgagtgttttgttggtgtgggttgggcaggttaacaaaattagtgacttggacggacagaattcactccccccgcctgttcaccagtctactcagctgtctaataatgtccccaaaaacggtgcttgacgagaattgagtgccaggcccaccatcttttctcagcttttgaaaaggcaaggaggggccaccaacacgccgacggaagccgcctacctgagaagtgagggcctgcccaatgcccggacgacggtacgccgacggggcgtagggactgtatcgctggtcgcttggctgggcaggctcctcagtcccatacaacaagagagcccagtcactgaatattcctgaaagcaaaagttcaaaactaaacaaggaacacaatggcgaacgatacctccgatgtttgggttgttggaaatggactcaaccagcaatgtccaaacaccacgggggtcctctccccacatctgagatttgattgacaatgagacggataacaatgtccaagattaagataaacctgcacggtgaggaatggccacttgtggaagccattttgattgaaatcctaaacgattttcaaggtttacgaccgacggcaaaggatgacgcacttgcggacggggcggcaaaaggacggagcgagtgcccatcggcgaaaaaagagtcaatttcaagtcgcctcgcttcccaaaacgaatggtcgtaatcacttggacatgctccaaatacaaaacaggtgtcccctgctgacagccgctcacttccaaagtaaaattcaaagcaaaccgtccctggatgggtcttggcctgaaggcttaagacggacctgcagg

SEQ ID NO: 2922 - DNA, 3368 bp, Heterodera glycines
ataattattttctatttttaggtcttcaaataactcttgaattggcttacatatttcgagcttcctctgaaatctgatcatgaaggggaatttttgattttacaaaacttctaaattaaaattatcgcgcttttgtaggcactgtaccgtgccaccggccaatcgtataagccggtgccaccaaaacagtcggcgatgtgcacaaaagtgcaaggctttgcggacaaagccagtaagcatggcatggacgagctgatacaggtgagaaaaatgctgatcagaacactgataaaaatgccaaaatgcaataaccaaccggtgatccgagaaaaaaaatacccaagtgattgggaatagattgagactgaccaagctgattggagacataaattttgacaagaatattattcaagagtcacaaatgctcatcagcttttatacgggagatacagtaacttcgtttaaaaaattttatcgataaagaaaaataatagggcaatcaattttaatcaataccttattatttgatctatggatttatccaagacagacacataaagaaaatgagagagagctccataaatgttagaccgattattcttacggtacatatgtgatatactgtaattttctgccaaattttgctacaggcggaccctgtccaaattgggcatgaccatctgtttgccaagctgcaatcgctgacgttggacttccgtctgaatgagcacatctgttcgctgggatggttctcgcctggccaagtgtttgtgctggacgagtactgtgcacggtgtaagtccaacgggttacggtaggtgcctgggctgttgatgatttgcttggataatctcttgaccgaatgttgctgtcaatccatatcattcgagatttggtcgagattttttgaaaatttccgagtctcaggcctgagactccaaaaaaagccccaaggcgcctttcaaagactcgtgaacaaaaggcctcgaaaactccgccacaatttcggcctaagcctcgagaacgggaagcctaaaaaaacacctagacactttaagatatggccaaactcgagatgaacacctctaaaaatccggcaccctttttcaacctaggcccaagaatgagacccaccgagacttttttttggcctaaaaccgggaccatagctctgaaaatgcatagattttcacggaccgattctcgagattttccagatatggtgcgcggatgccatcggcacgtctcgttgctcaacgatttgttgaacaaagcggacgatggacatttggtggacccgacacttattcattactcattcgcattctgtgcatcccatgtgcacggcaatcggtgggcaaaatgccaaaaaactgggaatgaaagtgccagaaaattgtggaaattatttaacttatgccaattcgccatttcaggcccgacggtgttggcactgtcacattggaggagaaggagaagttccaggacgtgaaggagcgcctgcgcggtctgctcgagaaacagatcaccaattttcggtacgaaatctttttttggtttttgaattttaatcttttcttttagctattgttttccattcggacgccctgagggtacggtattttctcgattagattagtgaaaatttgacgctaaacgaacctgacttctattttgaccagtttttaatccctaaaccgaactttgaaaaaagtcgaaaattctaatttctcattttatgattttcgttttgttcaaatttaggttataaaattggaattagtcaatgttgatgtcagaccatgatcagggacgacaaaaaccccgcgggcgcaatttttcattattagaaattattttaccaaaaaaaaaacttaaaaccaaaagggtccaccctctctttggtttttttttttttgtataaaattcaaaggatacgatatgactttgcagcgaaaatttcgtgaaatcgaaatttgccccaaatttcaggtgcgcttaaaggcactctgtcactgttggagcgggtgctgatgaaggacgtcgtctcaccggtgccgcctgaagaagttggtgatttgccaaaaaaagaaaaatgcgaatgccgaaatggtggctaagtgtgtgtccatgcggcacacaaaatcggcaatcaaaatcagtacaattctccaaattttttttttcgtgattcgggtcctgatcactaattaacattgtcagcttgaatggcattctgatcagtttcaaaacaattgttcaacaaaagaatgccatttgcagcgattgatcggttgatttctcttcactttgatcaattcaatgactctgatcatcttcaaattcgttctgatcagcaattgcaactatgtccctgtgtttttttgccaggttcgcgcagtgatcagaaagtgcctggaggacgcggcgctggtcaattacacgcgcatttgcaacgaggcaaaaattgagcagcgcatgggcctggacgtgagcccacaacagcgcatcgaggacatgatcagggtgacggagctgtgcattgatttgttgaaagagaacgaggaacaccacggcgaggtgggcacggcacgggggggcgagagtcggagggtgggtgccgtagaacgaaaatactattttgggatcattatcgatgctagatcgtttcgtaaaatccgccattttagctattttttcaacaaagtatggtataattttgcttcaaaataacaaaattttacattcttggtatcgttcgggtagtccttattttttctattagcatgcaaaatttaaaaaaaaatttaaaaaagccataacttaaatgaatttgatttgtaatttttgcaggcccgatctcgcctaactttaggtcgcttatttttatcagaaattttcaataatttaatttaaagattggagggggtttagcgctttgcgttctccatttctatcagaaaatttttgcaaatccatcgaattttttcgtttttaaattctttaaaaatttttcaattaaattttttattttatttaaagattgacaacgttttaaattgatcttttaataaattttttattcagcaacttcgtgaggtcagtaagttttttgtttgtccacacacaaaaatttttcatttttcattcgcttttttgctttaagtgccgtgcttattcaaattgtgccattgtcagtgtttatttaagaaaatttgtgatgagaaagagaaaagagagggagcaagaaatagaaggagagaggaagagagagaaagaaagacagatagaaacagaaagagagagagatatagagagagggaaacaaagacagaaagagagagagagcgagtgagagaaaggaagac

SEQ ID NO: 2923 - DNA, 3522 bp, Heterodera glycines
tattatatatgtctcggagacattaattcgttgaaaatttgtttgtttgtaaaatctttatgggtgctttatccaatgatttgattgtattgttgatgcaatttgtattgtatcgagttggttgcatgtcctttgtgagatagtttttgtttggtgctgttagttttcgacagtgatgatctcgacagtgttggtttcgacagtaaagtttattttttttaaatgttctaatggtataagtattattaaattttggcactcaaacctgacattagttagcagatgttcgcacatgatttgcaagtaaatttttgtatttttgactacactcaatcaggagatatttatatagaaaaagtgaaaacgataaatttttgacaaaaaattctatacaaatcttttttttattgcttacttcaattataaattttgtatatgcaaatcatatattaatactaacgcacttatttgttagtggcggtttaagaaatgaccaagcagcgttttaaaccgattcatactctttaataagctttgagttttagagctaatttatattttttgagctattgcctatttattataaagtaccattttcaatttcgttcatatacacaccgagtcaattttaagcccctagttcaaaaagtaaatgcatatgtggcgaagtggtttttgtaagatagtaaagggacaaagggtggtggttcgagtccgttgtgaaacatgaatatttttatttatttttgtctaaaaaattaaaaaatgacgaattttgggaattatttttgaaggtttttcccaaccaaattggacaatcttggtatcattcgaaagctcttggaaagtagaaggtttttctaagcaaatgctaagcatttttattagtttgaaaaaagatataagcgtttgaaattttgttttttgaataattttagatcggagcgtaaaaaaataaaactcgagcgttaaaaatattcataatatttttctctatcgacatgcaaaatatgaagaaattctgtaaggcggaaaaaaagttctatagagcgaagtaaattcagtttttctctattaacacagataaagaaatagtacgccaaaaagagagatgtttttttctctgcactctctctttattgacacatgtctcgttttttgactcggtgtgtgtaatagttatagcttgtttccaaaaaacccctccagggcgtgaaaaaaaccctcgatgcttctaattcgagaaaatcggctaaaattcgtcccaaatgatcaaagaatccatctatttgatcctttaaaattagcggttcttttgccaaaaaaaattccagtcgaattggggcgatggtccataaaagacaatttaatttgaaaacgcttttcagttctgtggtgatcagcgaggtggaaacacttgtgttccggtaaatttgttttattgacacgcatttttaaaccggttttttgaatggttttttaggaaaaacatttcgccaaaggcgcaacggtacgccgtgcattttctgtcccgcgtcattttggacgctggcgaggccgagttggcactgcagttgatccgcatctatttgaagctgttccacattttggtgaatttacctaaacgaattgtcttttttttatttttccacccaaaatttttgtttgaattctttcgagggtcaagcgacctttgcctttttaaaaggttaccccacatttgcgtcccggacatttgcgtcccggacatttgcggctcagacatttgcggcccgacatttgcggcttccccaaatcatcattaataatcagacattatataattatttttattttccattggcttgttcatggcccaagagcatcaatttttaaaaatgcttaaaataaagtacgggccaggggtggggcgcgaacagaatagatatgtttttctcaaacaatacatgttgcagcactgtgtttcaaataagttaatttattttgatttagcagaacataaaagtgggggagaatacagagagaaccgcattaggattttgcttcgtcatttaaatacattacagtatcgccttgcggaccgggtcggttgggcgccgccgattgggcgccgccgattgggcgacgccgattgggcgccgccgtttgggcgccggtacgattgggcgccgccgattgggcgccatggggaaatttaaattcattaaccttgcctcaacttagggttaaggactttccaaggacgggtataataatttacaaggacgtaacgtgaaagtttcattaaattcaaggatacaaaaaaatcataatatgcaatgaaaaatgattgtagtattttttcattattattttgtttctgttcatcagtttcctcatttcaccgcatgtgcacttttttgcggtatgcttttttcaaaaaactttttgggaacattggttccggcggttgccgatcagcaggaaaatttttttgaaagatttcagggtacttatgtatgcactttacaaaccataaaaaaattattttttaaaacatttctagggggttttcaaggtcgctgatcattctattttgaccaatttcgaatcccggacccgaattcaaataaaagacgaaaatttatttttcatcaaatcaacctttgttgtcccaaaatctattcaaaagaatgtagatgattaaaaacattatataaaataattgtttttcgcgaattctttttcaaggacattaaattcaaggacagcttcaaattttaagttacagggcataatttcgaggacccatgccattaaaaaaggagtcatgaaggaattttgtgactcaaatagattttaaccccataaacattacgttttttgagtgctgtttctcgtaattcaggtgaatggctaaaaatttttgtagtaatttcagttttttacgtttttggataatatgaaaacgaaaaatttggctgccgcatggcgcccaaacggcggcgcccaatcgtacccgcgcccaatcggcggcgcccaaacggcgtcgcccaatcggcggcgcccaatcgacccccaccgcccccccccttttcatgtaaattagcagagacaaaagcccattaattgatcggaatagatgcatacgcatttgttagaaaaccagtgtttttctttttattttttgcttcatttccatttttgtttatcctttcgcttatgtgccttcttccccacccctccacttccgtttcattgtcaggtgatcatcatcggagatgccggcgttggcaagacgtgtctcagctaccgtttctgtaacggccgtttccccgggcccaccgaggcgaccatgggcgtcgattttcgcgagcgttcgctgctcatcgacgacgaactgatccgtgttcagttggtcagtgtccgcaatttgttttttgaatgcccacgctttggcgtttccgttgccctttcagtgggacaccgctgagggagtgagcgcttaccgtcagtccatcgtgggccactattatcatgaga

SEQ ID NO: 2924 - DNA, 4619 bp, Heterodera glycines
tgaaatttagcatgctcataacgcgtttcaaggtctatgttatgatatcatgattgtgcaatttggttgagtctgagaaaagttatgagttgatttactcaaaaatttagataattttgcacttttcgtcggttgacatagcaccaaatttgccatagttttcgaaaatttgaccctcatgatcagaattctgcaatactgtaaagctttaatatgttccaaaagtcccatcaataaataaaaataatgtaatcattgatttttttttagacgattcgacccagagatttggtccgcaaatgtcggggctaacattccttcctcacgccccatgtgtatcgttcttgaaatttatagcttgtctacctttcttagttgcttctctcgaaaaaaatctctatctttttggtctcgcgatgccatgagttcagttgaagagttgccaatagtaatcgtgtccaatcgtgatctcccaatcggtgtcgtactataggcggcgcccaatcgacccccaccgtcgccttgtagaagggcaccataaatgagtgaactgtaagcttgttaagcattgagaacattggaaaataaaaaaattttgtgttaattatgtattgtaaatagtgaaaaataatgaagatgaaatttggggaagccgcaaatgtcgggccgcaaatgtccgattttggcttgggccgcaaaattcaacaaaaattgggccgcaaatgtccgaaaatggcccttaataaatgggccgcaaatgtccgggacgcaaatgtctggacaccttttaaaagcgcaaattttttatgagtgtgtatgataatgcgctaataaaaaacgttttttctttgggttgcaaaagatgcgctcgccgagcatccaaaactgttgccgttgctgatcactggactcaatcgggcctttccatacgccaagggtttgaaaaaaaattagaaactttcaaaaaaaaataatcaaattttaggtcgcacatcggaggtgctcgacaacgtgggcagtctgtacaccattgtgcagaccgccaagttttccacagcgctcagtgtgctgcgattgcttttccaaattcacagtgccaggcaaaacggcgaaaaccaaaaattttttaaattttttttccagcgatggcctctccgatcgcttttacaccgccttttaccgtcgcctgctcaatttgcagccgggcaaccagcagcacgactcacaactgttcacactggcgcaacaagtgctgcgcaacgatttggtggagtgccgcgtccgtgccttcctcaaacgcttcttccaggtgccgccagaaaacatgggagggctcggcactcgagcacactaaagggtccggaccaattggcggcacacttgttaaaccggatgaaatgcccattttgtcggacgggcatattaaatttttggcttttttctcttgagagaaaaagagtggttccggtggctcagtggttggaactgaacattacgaaatgggtggaggaggcgtgggttcaattcccacccggggccaaccaaataagtaacactttgtcacggtttgtttaaagggaaacctttccaagttgtcaaattccgctttcccattgctatgtgacgaagcgggccaaagacttgggaaattgtcatttgatttggtcggcatatggaatatggggaatacgcctttccttggcatttcccatcagatgcgccggcacattttgtcaatcgcattcctatgggcttaatcgaattaatttgccgtaaattctaaaacaaatactcccgaaattattgtttttttttttgcaattttagccgtaagtcaactattcctggggctttaactgagttcacttacctaattaggctaattagttaatagtttttttcagattgctctttcggccaactcggcattcgctgcggccattctgctgatgtgccattccgttgtgcgggaacgaccgcaattgctcaaagtgggaagggtcgcgggaccataaccaaattgggcgttggcaaaattgcctttttgtcaacatttactaacattttgtgccaaaaagatcatcctacacactcactatacatgaaaaaagggagaggaaaagacttgatttgcgattttgaaccaattttggttttttgaaaatataagattttagggtccagagatgccgataggtgtcgtcgtgaaagtttttatgttttttgaaaaatttaagcgaaatttttcaagaagatacccttaaattccaacaattggccaatttgcttttttcgccctaaagtttgttaaagcatgctggtgaaccgtgtatatgcttttaagcaccgacaacaacgagacgacgacggggaaggtgggcaaaatgaccaaggggaggaggagaaatgggctgtcgaagaggcggaggaggaacgttatgaagatgttgatgaagatggattggttggtggcgacgacgacgcggcggtgccaccaccaaatcagcagaagcagcacaatggcaaccgatggcggtggcatcaacccactggctggctgcacaggaggccagtgcggcgcagcggtgctgccgcctctgccacaactgttggtgcgtgctgagtgtggtggcgggggacggacggtcggtgcatgcgctcgacatttcttgcgaattttgaacaaatttggattaatttagttgcataatgggctccggcggtgccgatccaataggcgctatcaggaaaaatttttttgcttattttctttacaacattaaaatttaaaaaaaaaattcccggttgaataaatgggtcccgcgatgccgcgcgatgtcacagaaaactttgcttccaaaatttatttgtgtatgttcacaggttatgacccaactgtccgcaacccattgtttgcgggtgcagaatgggcagtggacgacgaacttcgcacgctctgccaccattttcaccctaccgtttccgcatttactcgagcattggttaaaggttggtcgatgaattggttcaaacggttgcagcgaatgggggcggggtcgcaaggcaaggaggggtcgcaatttttggaaattttaacgacgcatttgaaacgtcgccgcacaaaaaaaaactttttcagaatttcaagaaaatttaaaattgttttttttttttgaaaacctaattgtaagtattaataaaaactaaatttccagaagaaaaacaaaaaactggatttatttccttggattttcttaataaaaatttacgaaacgacgttttatcctgctcccatttgtcgaccccgcccccttagaaattaatgtatgatccgtttccattcttgatgcaaaaataaattgattgaaaaagcgggcactccccgccaagcatattgcatttttttttttgggtttgaatgcatgggtttgtttgcctttttaggccggccgattgtttacgctggcaatccgctgattgatctttctcaaatgcgttttctggaccggttcgcattcaaaaacccaaaaatggaacggaaaaaattgccgacggcgtcagcagcagtccattgcaacgggggagccgatttgacagacagtggaagtgagggggaggaggaggaatttgacaatttcttggatgcgtatgctgttgatgacaattttgatgatgatgaggatggtgctgatgatgacaacattgattgggatgaggaagaaggagaggatgaattggaatttgagtgattttttttgtcatttcggatcattttttttattttcagttgttgtttaattaaaatattttttccatttggcaacacattgttggctgctctgaatttatttgtcattcatcatttttacatgaaatcatacgttctttctttgtaatttttccattctttttttggcagtgtttgttgtgcgcttgctgttcttctgtgtcccccttgttgtgccggctttttttcttccccagccatacgaatgggcaatttgttggtagatgaagtgccaaaaaaattaataaaatagaaaatcaagcgaattggcaagtcggaaaagcaagaaatgaaacaccggtgaaaatcacccgaatgggtagcttaaaattgtgccgtttgttcgtcaataaagtgccaaaagcagtcatgcattgttaaatttgtgtgtatatccttttgtccgacaaaatacctgcttttccgtcccaaattcgctgaaaactgcccgagagtcatagcaccatttttgctttactcgagtgccttgaactggcaccctaattatgtaaaatggtgtgcccccaacacagccgtggtccggcgcccgccaatgtcgtcgtgccattgcagacaacgaaagtgcacggcagaagcgggtcaagctggtacgcgacaaagtggtggcctacgggcaggacccggctgaacgtgaccgaatccacgcgctgccactgctccaactgcagggtgtgtctgagtgttgtgtgtgctgccatgccaaaaaaatacaaattgtgctcatacattttttagggggggttgaccccccccccccccccccccgctcgcaaagggggcctgcgaggagaggggggggggggggaggggt

SEQ ID NO: 2925 - DNA, 1618 bp, Heterodera glycines
tagctgtatcaattttttttttttaatttctgatccttttttaattttccgggagctggagcgggagggctcctccatacgaatgccaaacaccgctactgaccacaccgccccctgtgttcaggcgaactccaatccggcactctgtcggccacccaggttctgtacgcgtacgcgcacttcgcactgctggtcaacgaccggctgaactgtgtggccgaaatgttgcccgaggcgttcgacgaggcggcccaattggacgccaaatacgccgccggcggaaccgggaagaataaaccaccgctgttcggcttgccgttcagcgtcaaagccaacttttttgtgagcactctgatcattaagggtctgtgcaaaactgaacgaacaaatttctagattttcccgtaggtgcctaacaagcaccgccgggtcccaatgcgagtgcccctttttttcttttctgaatacgggccagacatgagaccctcgcccgaacattccatgtgtttcagttgaaaggctacgactgttgcattggcattgcccgttggttgggccacccgcggagtgtcgactgttccctggtcacccttctgcgtcagcttggcgccgtgcccttttgctacgccaacgtgccgcagacgctgttcagcttcgtctgctccaaccctgtctacggcacaacgggcaacccgcacgacccgaagcggtgtggcattttttaagaatgaatgggatacacatgccatgatgcattcatcctcccctcctaaattacctctccctctctttccagggggttcaaaaaaaacacacatacgggggctctgttttaggaaatccgttagattttcggatgttagtatgcttaattgtgccttcttttattgcactgcacagaagccctggcggttcgtcgggcggtgacgcggcacttttggctgccggtggcacggctttcgcaaccggcggtgacattggcggctcattgcgtattccggcacagttttgtggcttggcaacactgaaaccgggccaaagtgccttgtttatgatctgcacagatatgcaatgattttcccaaaatttcagaccgatttgaaatttcaaatgcccatttgggaatgccgggccatgcccgactggggttgggcactggagtttttgccaaatcagtggaagaggtgtgttacggacagcagcaggctgtttaacagatattgattgttggcatgcaaagcttcatttgttcatcctgtctacattatacaatctgatcggcactccctttgatcactttcttttctttcattcatttaatagcattctttttcgatccatcatcacaaccctttttttggtctgatcacgacagcctagttttatttaattaccacacaattctcttttcatatctgatcgctgatcacccccacccttcctctgatcagttccgctcttttttggcctggtcactactttagcttcattgtttctttgattaatcatcattcgtgcttctgtctctgcttctgcgctctgatcactccctcctctcccatccactgatcaccttatgcttgattctcccccgatcagttgatcatgctgctttcca

SEQ ID NO: 2926 - DNA, 1019 bp, Heterodera glycines
  unsure (1)..(1019): unsure at all n locations
gaaaaatcaaatttttcgaaatttcgattcgaaaattgtttttttcattcccgtttagttgtgcccgtgtggtggaggagagtgtgcaaatgttgcgcagtgtcggcaacgaaatggtcctnttccaaattccggaaccaaaatgcgccggtccgtccgtttctgtcctaattttttttgggaaagttcaaattcaaaaaaaaaaattttgaatttcaccctttttgtatagcctccattctctacaaaaatctcttgcccgacggtggtgcgtatttcaagaagctttttgcccaaaaccctgtcgacccgtaccttcaaaagcaggcatttctgttgcgggtgggtcaaaactcaattataattattataaaattaaattcaattggaatagaaattaatttaattttcagtgatataatttttaattattttcccgacgcaaattcgtcttaatttatgactttacacagaataagcgccctaacaaataagtgttctaactattagcttgcatttttaaaaatggaaaaaatgaaattaaattttgattcgacgcagcaagcaaaaggtatcaattttttgtttaaaaagtgtccatgatgtggcattttttgcgggacatagtttatgctggcaccataatttccacatatttttgtgtacaaatattgtctgatcactcacaatttcacatgatctctgttttgatcagatcccgatttttttccgctgggcggtcgcttttctgcttgatctgatcagtccccagctggcggtcattgtccgctcgtacgtgcgcagtgcggacgacgcgcgccaggcgcacgccgagttggacgcctacgtgcacaaagtgcgtacgtgtgcgtgcaacgcgagggcgcgctgcaaattaaatttttgcctaattacagtagcttaaccagggggttacacaaaatgtggatttctgccaccaaatttgtttggccaatttaaacgttttttcaattcaaaaatttaaaaaaaacattaaa

SEQ ID NO: 2927 - DNA, 1767 bp, Heterodera glycines
  unsure (1)..(1767): unsure at all n locations
gaatagaaataattaanttttcagtgatatattttaaatattttccgnacgcnaattcgtcttaatttatgactttacacagaataagcgccctaacaaataagtgttctaactattagcttgcatttntaaaaatggaaaaaatgaaattaaattttgattcgacgcagcaagcaaaaggtatcaattttttgtttaaaaagtgtccatgatgtggcattttttgcgggacatagtttatgctggcaccataatttccacatatttttgtgtacaaatattgtctgatcactcacaatttcacatgatctctgttttgatcagatcccgatttttttccgctgggcggtcgcttttctgcttgatctgatcagtccccagctggcggtcattgtccgctcgtacgtgcgcagtgcggacgacgcgcgccaggcgcacgccgagttggacgcctacgtgcacaaagtgcgtacgtgtgcgtgcaacgcgagggcgcgctgcaaaatttcaaattaaatttttgcctaattacagtagcttaaccagggggttacacaaaatgtggatttctgccaccaaatttgtttggccaattttagcattttttcaattcaaaaatttaaaaaaaacatttaaaaatcagttcaacgagcattggttggagcagaagttggacgcgctcattgtgcccgcttttcccgtcccagccgttgggcaccaatggccaagcgatttagtgagagagaatatttgttggcacagaaaataatgtcaagccgagtgccaaaatttaaaaaatcaaattttcgaattttgggttgcctgcgctttcgccactgggatgtacaacatgttggacatgcccgccggggttgtgccgacgggcaccgttcgacgagaggacgacgaggcgctgatggacgacacgcaatgggccaccggtgggtggtgatgaacagtcaaaacagtcaattgccacgactaattatctaattattcgagttagcaaaattaatttatacaacaaattggcaattggctataatgttatattaatattattatttttcggtaattcataaattaattattaaatatgcctttacaatttactgaacaattattaataccattttattggctattagctaaaaatttaatttaaataattatttgcatttccctacaatattttataatcgatcgcctaattactcaattaaagacgggaatattctgctcaaatggatgcgttccgcggctgccaactccgttgggctccccgttggtgtacaggtgggcaaaacccggccgatttcacaaattttttgtaaaaaccgatttccaggtggttgcaatgcgttgggaggaggagaaatgccttgggctgatgaatgccattgaagcgatggccaaagcacagaaaaagtgaacagaatgccaagaaattggggaaaattttcaaaattgatcgacaaaaaattgtgttgtgattgaccctctgctgctgcttgccttttaaaaagcccaatttggacacttatatattcattatttgtcttcaatttctgaactttttttcttaatttaaatgattatttaaatatattatttttcaaagaatcaaatcctcttcttgtaatttaaaatatttaaataaaattgtattcattacatgtgtaaatgtaccaaaggaaaattccgttttcaaaaatctttataaattggataatttgtcaaattttatttaaacattttcaaaattcc

SEQ ID NO: 2928 - DNA, 4071 bp, Heterodera glycines
agtcatgaaaggtcttaaaaaacacacggtggttcgcgcgacgaagttagacgtcgcgttcaaacccggtttggatgagaaatttaaaaactcggtacaataagattttttttgatcatttatttcctatttaaggcaaaatcaaagttagcgcattttaaaagaaaaatatggaattgacgaatatgaagcgaggaattggatgacaaattaaaattgttaacattttcaacatttatttaaaaaattcaacaacaattataaatcataatttttcaatttaattttgcagtgattttaattaaaatatttaacatatgacaaaaactggaattaatttttcattttttcattttttgctatgaaaaaaacaaatatgaaaatctcaacaaaaaatatcataatctattaatttatttaaaaaattttcaagtgatcggatggctacgcactttgtgattaaatatataaattttcaaattcaaagatatatggtgctccacgaaaaatcttagcggtagtctgagcaccccgtaatgaaacgacaggaaccgtcatgtcgggcgttactttgcacgcacagtcttcttaaaaataataaatatacataatgtggaaaattaatttaaaaaagacaaaattaaaatattattactaaagaagactgattttaagttatatttttccctcatagaaatttaaattatatcaaaatcgcaaaacccaaatttattgaaaatacttttcatcggtttatcatacctataagtgttccgtttaacgtgaaaaacgtttggaagttcgaacgatttaaaccaactccaacaacgtccccttcggcatacccccacgttctaattgtcgccggtcccccaaataattccaaacctttaaatatatgtttgaataaaattaaaaaaacataccgacgatgtctccatcgctatcaaaccctattccttcggaccaaccaataaattcacttttttttagatttttcgaattgagtccaattccaaaggttcttaataaaaatacacattaattaatgatggctacattagagatattattttttctagtaattaaaaacgatctttatataaaaatttcatcgcttaaaatacaaaaaatcacccttggtcaccgaaaacgcattcaaaatataagactgtgggaaaatttgaaaccggttggagaggcggcatggaaaaagagcaaatgtcttaaccgatttaatttaagcggaaatatattataaaataccatatgggtgcccagtgtgccgtaaaaacaacgtcatattgtgaatacttaaaataggctaattagttaaaaactataagaaaatcgaattttattcgttaaaagccaaattatgaaatggttttcttttgtaaaccataacttttatatatattttcaagatggtaccattttaataacattttcacgtgcacaaaaaattcgttcaattaatagaaaaaatgaccttctttttcacgtgaaagaccttctaattagtttaatggtatgataccaaaattatttcgaaaaatttcaacgtgaaataaaataagttttgagaagagaaaatttctctcgtagacattaatggtatggactataaaaaatttccctttaagttattctaaatttatcaacaaaaagaaatgtgtgaaaataaattattttccaaaaaataatttttccttttttctccattctccccatttgaaagagtaatgatcggtaacatcattcttgtctttttcttctttctctttctttcgggttgcctcgcttctctcttcacattttcttccttcgtcctccattctttgctcccatcgctctctgtcgatttctcgttcctctttttgttgctcccaaacatgttgccgcctcaacatgtcactgtgccagtcgcccctcacttgccgtctttcctccgcgtcccgcctctgttgctcgcgtcggcgtcgctgttcagcctgccattgtctctccgcctcatccattgcggcaaaatcttcggcggtcagttgcaacacatcctcaccttgtgctgaaatttgcatgtcgttttgttgggcgtacatctgaaataatattttattacatatttttaaatgtaagagctagaataagtcgaagttaaccccccccccccccctccccatgcaacttctgttttggaacccatacccattgaaaagttgaaaaacggcagatgagttatgcgtatttttatcttcttaaatactcaaactatttggattgtaatgtgtgacgaaacactaatttagtccaaattcggcaaataaaattagggaatggccttcaaacttgcaaaactttttggtcttttgtgcaattaacgctcaaatattacaaaaaatcatgcgattctattggtaaagaaaatgttttttttttgcaaaggaagttgcgattttattagatatgccgaaataacgaataataaatttctcgatttctttctatttgaaaaggactaaaaaaaatttctttttcgggtctaaacaaatgtgttagagcagttatcctaattttattatacaacatttttgtgtcaaatcgataattttgcacttgttttcggaattcatttatctttgaaaaagaaaggtccgataaattctctgcttcttgacatttaaatatatttatttctttgagtccaatgttcaatttttgcatagctaaggcctggtttccatactcatgcatagtaagtctaggtaatttttgaattttttcgagaatttctaagaatgaaaagtataaattttcgatttcgggggcactaaatgccgctatgtagaaaattttcacccgtttaaaaagtttatttgcaaaaatttcaagattatttgatcgtttaagtatttttccggcaaatttccaattttttgtaacatttttcttaataaattcaatttcttggtctattgttgtcatctgggattgttgttacttctagtgttatgacatcatccaaaggataaaaaagtgaatattgttcttcttttaataagatgttttggaacaaagcctcggctgtgttttcgctagggcatctaagagggcaataaaacgattcaaagccgaaagaaatcttcagaatacttttgaattttccctgttcctttttataaatttcttcgattatggatgcgaggatatctttaaaattttcctcggcattaattatgaaaggatttttaaaataaaatttagatttatattttttaaagccaaattttaagtcctcatgacaaaatgaatcaattatcaaacacccatccattttgagtgtggcccttttagttttttcgttcttatatacccatatgctcccaaacaattgtttggagcctattttcataatttaacatttggctctgcaccctccgggactcgaaatgtaatcttcgggcttccactaatgaattttgcgatagttcttcgaactttgttgcctggtcaaaagttttcaatctttcgaactcacgccacgcagattccgcctttactgactccaaattgatttggtccatgattttgaaaatttcccaaattgaatctgacattttaagatacaattcccgaaccccattagcataaggagctttttccctagattttattgcacgattaagcgtttcccgagaagatttggcaaaatcaccaacttcttctgctaacgccgctacatccctccaggctctctctgtctctttttttgcagcttccaccaaaatggtattagctttttctgatttttcagaattcatttttttatttttcattatttttgttttcttttatattattatattttatatgcaataaattcgtccctaaattctgtttggggtcttggcctttccaaatgtagttgcttttctcgcattgtttcttttaatttattggccaagtctccaatgcctaaatcgggctgtgagtaagcggtccgataggtttgcccaatttcttgccgataatttttggctatttcgattgattgttttgcctcatccgcta

SEQ ID NO: 2929 - DNA, 4924 bp, Heterodera glycines
  unsure (1)..(4924): unsure at all n locations
aggaaagcttcagaatgcttttgaattttccctgttcatttntataattttttctattatgnatgcgaggatattcttaaaatttgctctgcattaattatgaaaggatttttaaaataaaatttagatttatattttgtaaatcccaatnntaagtcttcatgacaaaatgaatcgattatcaaacacccttccattttgagtgcgccccttttagtttttttggttcttatatacccatatgctcccaaacaattgattggagtctattttcataatttaacatttggctctgcacccttcgggactcaaaatgtaatcttcgggcttcaattaatgaattttgcgattgttcctcgaactttgttgcctggtcaaatgttttacatctttcgaactcacgccacgcagattcggcctttattgactccaaattgatttggtccatgattttgaaaatttcccaaattgaatctgacattttaagatataatttccgaacaccattagcatacggagctttttccctagattttattgcacgattaagcgtttcccgagaagatttggcaaaatcgccaacttcttctgctaacgcagctacatccctccaggctctttctgtctctttttttgcagcttccaccaaaatggtattagctttttcttatttttcagaattcattttttatttttcatttattaaatttttttttatattttatatgcaataaattcgtctctaaattctgtttggggtcttggcctttccaaatgtgtttgcttttctcgcattgtttcttttaatttattggccaagtctccaatgcctaaatcgggctgcgagtaagcggtccgataagtttgcccaatttcctttctataattttttgctaattctattgattgttttgcctcatccgctagttcttggcacatttccgcatcttttctgtcaaggcatttttgcatacctttttttatatttttaatgttattctcctcattttttattttgtcaaatagcgtatggatttttcttaccccatttaaaagcttttcatgccaaaattttaccccatgagcattaggatttttgtcttttatgttttgagcttcaaccatggtattatgtgccgagaaagaaaaatctttggcctctttcgttaacctaattatatctccaaatacggcctcaattgttcgccgtgtactacctaattgttgtttttcttcttttgtaatgcagcagcaactttctgccacgttcactataataaagagcaaaaataattttaagatcatcatttttattaataaaaattaacaagcgtatttatagatttaaagactgacaatatcgatcaaagagtaatatatccccttctttcctccgaattctttcaccctcgccccgattttcattgtacacacggccccagacaaacctttcaactcctcctaaatttaaatttgtacggttttttcccttaaaatattaccattccattttttttcccccgcacaccgaaaaacgccacattttccaaaactcctgtatcatccgttacggacaccttgaaataaggtgtcagtgccttctcaacaccacatgaacacgcccccttacggcataaaacgcaagccttaaaaactgatatatttttttcatttttaatacaaaccctgtactccgcatgtactacgttctcaattctcgctctcacaataaaaactcttccgccttcaataatctcgaaatttttaatttcagcgattgtttgcattttctggaattctaccaaaaataataaattaaaattgattaaatatttgggtcaaaaccttcactttaaaaacaacatgaacatttaatatttattataaaaaagcatgcgaaaaaatgatggtaattttaaaaattcttccagtttattctccgcaaccacccggcgtgaagtgtcaaaaagtgagggtgggagtctatagaacaatgaccacgatccgaccaaatctctaaaatatttttttaaattgttttttctatgttccaacctatctatacgttggtagaacatatcaattaaaacttcaacagggttcaaaagtagttctctgccccaggctttgcccattgctcttagcatcgaaacagtgtacaaataaagacggctcgtgaaagattcgtttgttgtttgactcctgccctcccaataaaaccaaaaggaaaacataggcgaaatgaatccctctcctgtatagctcgcctcaacggtaacatgtagcacggttgtaacccttcctatagccgtcccggttcctgtgtcgtaaaaaaatcttaaatttctctcaatcatgcagaaacagaaaagtggggtgcggtgataggtggcaatataatcagaatagcggctttcgtagtccctgtgtattataattttataatttgaagcctcaattaacaatgcctccacttctgctctgtttttctgccagaaaaaatcttctttttcgagagcctcctcaaaatatttttgaaacgagtacattttaactgaaaaattaataaagaaaaaaggtcgaataaataattattgtaataaacaaaaaataatgaaagggaaaaaatgaaaaaattttatttaacagggaaagaataagtgccaataattattgaaattctctggtctaacaaattcacttccccaaatgattgctgtctgtgcatgaactcgttgaaaacaatgtctgggttcgagtgttggaaggggcgggcagggatgatcacggggtctgacagggcactgcaataaaggtccactgaaattttctcaattttccagcccggctcagcttctcggctcattgcatcccccattaattttttcaggatttttttaaacattttttcgggatcttcgttttctgggcatttaaaatagaaagttgtcacgtgctcttttatcccaaattttttattttcgtttgtgtgactctccacttcttcgaaacatttttccaaattaggactattcttgaaataatttttggtatttttcgagcggcggacttcttttgaagtttcttggaagtttttctttgacatctaaaaaataggaaaagaatatgattaatttaaatattaaatgttataaacattaatacaaaaaacacaaaatttttaaatctcttaataatatccaaagggcaaaacattaaaatgatcgtcgataattccttttttctgcaccggcgtatattctttttgtacatcttttgagagaacccggaagtcgtttgtcggcccgatcttctccgggtagtgaaaaacttttttgacccctttcttgtaatccagcaccatctctttgaacaaatcatatttaaattcgtttcgtctatccaatgtcatccctctgattttggttttgtgccaaatcacgccatccttctttcttctgagtttcaaggcgtactgcttcggacccgcggacacaaactccaaaatttcgctgtcggcatactctcgagtcatctcccttaaaaccgcaatttaaatgcgtttcaaaaattatgttctaccccaaaaatttcccctccaccaacggacagcgccccttccgatgagcaaaagctagagaatctaaatttttggtgtttattttctttttattccttttcacctgtgtcacaatagagcagtttacacccctccttcttgtagacctgctccatgtactcgtacagctttagcctcgcagcactcgtggtccacaatgacaaaacaatattcgacactttatgctccctgatgaactcctcctttttccggtacacaactcttgatatctcttcgcttatttttactgggcgcccaaactcaattgtattgtctctccccaattccatccaacgttccatactgcccacaatttccgtacttgaaagggtgttgcgcatcgaaaattttccccacaaactgtttaatcccttaaattcgaacattttttagagattttttataatttctcaccaattttgcaatcattcttagtccgggattaaacccaatcttatcataatccaaaccgatgtcatactttgccttgtacatttcgatgaatgctcttttttcatcttcacttttcacctccgccggccaccccgacgcttccacctttatcttcaaaaacatccgcacatatcctttgaacagttgactgtcaaactgttcaaaatgatacgctcgatagaatcccacaatcctatatcctagctctaaagccttccgcaactcaattgatgtgaatgtccccaaaaatgctctctgcgtgggacgatggttacattttttcacatcttttgtcatcacaaattcattcttggcccttctcgcacaagaccaacaattagggaagaggagcatttcatcgatgtgcacggggaggagggggtacaaaagatttttcggggggattactttcactttcaacagtccatcataaggtacgtcgtcgggtgttgtccaattcacattaaaattcctgctcactacaattttcgggactccaacggggtatggggtgtcttaagcgaaggaaattagcaaaaaaagcaagcacatttttaccataattaacaaagggatacaaactaatgatatcaaacattgatatctcaacttcttcggtagcctttgcgtacaaacaaaagggcatcgttcttcccccggcataagcatccctcggattaattggtcccttgtccggcacactttcaaaaaactttttcatctccttattcttcttcaattcctccttcacgtcacactcctaaaactaacaattaataaatattttctaaatttttttctacccaaacttctccaattgaaaaattttggcacttttccctcaaaatttcc

SEQ ID NO: 2930 - DNA, 5053 bp, Heterodera glycines
actcacattccgtccacattgtacacaccttccatgttctcaatctttgcgatgattttgatgtttttgcccgcctagcccagcacttctctgatggttatagcctattccgaatcccggacccgagcaagaagtcgaaaattcaaaattcggtggtttttcgtttctatcaatgcagaatgacatttgctttttatatataaaaagaaatcttttctgtctgcgataagtgaatagacaaaaaacatatattttttaaccacgattttccaaaattatttgaaggatagggcaagggaaaaattttggaatttttggccatttttaatagatttttccaaatattggcgactttggtcaaaatttgaaatttttgggtccggcggtgccgacaggcgccgccgggggaaattttgagatttttgttgaagttttcccatttttttattataaaatttcagccccagccgttgccctcgctacgcccttgctccccgaggcaaaaattgcaaaagccaaaccaacgaatcggccttcaaattatttgctggaccgctgaaactcctcatattccctttcacgctcatagcaaaaaaaataaataaataaaattttaatagttattttgtatgttaaaaaagcgtgttttgtaataggtaattatcattgatcaacactgacgtggaggagttaataaatgcttttatcgttcaatttctgtttgatacgcgaatttgacatcgaagctttttctgtcatcaatcatgtttttacgggcaattgtgcaaaggatttaaatcggcttttgaactggtcaaaactcggaaaatggactatgtgctatctgagaggttttgatcccgttcaaacacaaggaatttccaaaaaaggaatttattttggcagagccgaaggcataaagtcacttcgttttttgtgctaaaatattagaaaattcaagtaagttgcggcaggcactttaaaccggtttgaatttgaaatggcaaactttgcatttaaaatatgctgttgaagatctaagtagtgtagaaatgagggggagagaggaagaaagaggattttctgtgatggattttgggggcacagtcccatcgacttttatgcgtccaatcaaatttttcattaaaataaatccattaaaacaaaaaatgcactataatagccaagtaacagccggcctttttctctcaatttgtcggcaaaaaccaatactagccgctttttctctccgttcgttggcaaaaagcagccagccggcatttttctccattcttcaaactccggttgctatgtttcgactagctatattactgctgccctgccctttaattttgtgtatggaatggcaagactttatcattgacaaattcggatatcgaagagcgcaaccttggcattgttgcggaatttgtcctgacaataacatctatgacaaaggtcgttgtgttaacgaatctagctacgaaacggaaaccgatcgttatattcgcataaattaacccatatagtttgaactattgagaaattttgtaaatagattagtcaatgacggaaaattgtaaatgcactgaaattagacaaaaaaattgatgggacgcataaactggacttgagcccaatttacaaaaaaacgtaattcttcagcccattgttcaaaaaaacgtaaaacttcaaagacggacctaatcagccatttttaattggccaaatttaaaaaagcataaggtttttatttgcaaataaatatcaatacaacaacaaatgccaaaaacaaaggcacaaaaatataaccatattattttttcaatcgtcaaaagctcattggacacgtccttctattatttgatttcctgcaaacgggttgtgtttgtagagccggcctgagaacaaacggggcaatcagtattcaattaagcgcaataattactgagtgtttaaattccaaagacactgacccgatttccatccggtgataagcaccacaaagtcgccgttgtggatgaacccgcgctccttgccctctttgatgccgtacgcgatacgattgttcacgtcctccgtcgcatttgacagctgcttcacgcacatgtttgatggtaacacggtgatactgcaattttattattttactaaaagatggccctcaaaaattcaaagaagtgaaaaaactcacttcttggtcctcttgactgaagttgatccgggcgacgtccattccattttcgatcatttggacaagcatttctacagaacgacaaacgggccctgaaaagggacagttcttggccagccttagtgaatattcattttcttcaatacttatggtgcaaatgattcccgtcttgcgcacgttggccataatttataagggccgagggtcgataaaatttggtatatttttatgtatgaacttggaatatcgaaacaaaaatttattgtttcactgaggcaaacgaaaaaaaaggcaaaaaaaaaaatcggtttgtaaatataaaaaatgaaatattgtgtgtgaaaagagagcatcaacaaatgacggatcgaaaatttcttttataaagattttgacaaaaatgaccatggtcatgaccatagctatgagagtgggaagagaagcaaaaaaaagaatcgacatgccaattcaaagcaaaatttaaaaatttactttttaaaatgtaaattgttatcgcccaccccatattagagaaatcctgaaagaatgaaacaattcatttattgaccattttctttgtattcccaataaattcacttttatgttcgtagctgatagataaatcgataaagaaaaaaaaaaaaaaaaaaaaattgccatcagaagggcgggaaccacttactctgatgactgatcacggtaaaatagtcacagagtaattgaataaatatcaagtgagatcacaggttaaaaataaacaataacgaaaaatttatatgaaaataaaatcgaggtcaaagtcaataaaatgcctcaaaagttaataattctttatacattggtgctttcagaatcaagagtcaattctaataattttttaaaggtgtttaaggagctagacattaacgttttatcaagggcattccaggccttgactgatctgttaacaaaagatttggaagattttttagattgtaatttaacatttaaccggaaaaaagacttatttcgagtatttaggttagttcttttaaacagagaatttgggtccaaatgtgtaaaaccatgtaaaattttgtaagtagttaggaggtcaaaaatttttcttcgtttttcaagagtagctaatttaaaaaattggagccgttggtcataggtagggcccggatttttatgtgctaaaaatcctgaaatatgtaataaaatatgtgctaaaaaatgctgaaatatgtgctaaaaacccccaaaaatgccaaaatatgtgctaaaatatgtgttaaaaattgaaaaaataagtgtgtttttgcataaaaattcccaaaaatctcattctttatcatttttagcccatacaacgcaaatcaaatacatttcgaagtgtttggggtaaaattgtctttttttgataaatcatttctataaattgaaagttccagcagagaacttcgaaatccaatgacgaattaatgaattcgagatttcattagtttctacaatcgaagaaaaattttttaatttgaaaattatgttaataattaggaaaaaagtcgatttttaggggtgtatttttcaattttcttgtatttttattgcaatttttctcaaaaatgccaaaatatgtgcaaaatatgtgccaaaccccaaaatatgtgctaacatattttatgtgacaaaacgccaaaatatgtgtttttatgtttttataagtcgctctaaatcaaaaattgttcggagataatgctatttttgggcttctctcgccataactaagccgcaaaaaaaaaatgtaaaaacataaaaatccggtctctatatattattatttaattaattttggttttaaaacaatgcacaaaaatggagctttctcttcaactttccacaggttgtaccacgccttttgtgagattgactccgaatgtgaacgaaagcgttccgtgctcagctctctcccgctgatgggagttgttgcttggctggaggagcacacaatcacttttaagtcagtttggattagcaaatgttttttccaaaatgcgccgttaattattatttttgcatcgaattataaaatgcatgaccaaaattctcgcctgtcattagcaagattcatttaatttctttgtgctcctttcaggtccaaaaatgaatttgagttcccttttctggatgttttgggccgaaatctcagaatagaaaggcgaacaatgccgggagaaagagcagacaaatgtgtaacggtaagcccattcatttccttcaagtccattagcattagcatcattagtgtcataattgcatttcagaacagttcgtcctcctcctccaccgtcgccattgaacccgtctgatcggaggactcaaatcgcttggtcattcattcatctcttacaaattcacttttattgcactttttctttttacgtgtcaccaattcgtagaaaggcataccgtatttactgtaattagcccccggtggctctatttttcaacccccctcaaaagggcggctctaattcaggggggtgggggctttatttttcaacccccctcaaattcattttcctcttacataatgaatgcggattgtaggaatttcttaaagaagcggcgataatcactcaaaatttgtcctttaacgggtatttgtatttttcaatttcttttgttatcattttccttattttcaaattattcaaaaaaagttttggacatttgagttaaatataaaatttattcgttgtagatacgaaatttactcactataaaatgtatcaatgaacaggctcttaagtggaatggatgacgtaggtatgttgcaaagcgagcttaatgtgtaatggatggatatttacatat

SEQ ID NO: 2931 - DNA, 1221 bp, Heterodera glycines
gggtgataagcacaaaaatgagtaataaaaaatcaactctcattctctctcacggtctctcgttctttctctctatctctctctctttctgcctttcgctttcttttttttctctccctttctcacgttctctctctctttcgaatctttgttaatgggtgtatggtggccaagaaaaaataaatcagtaatacctggcgcgggcacactttttgtacagcgaatttgactttggcccattcccttaaaaatgggaaaatttaaatttaaaactaatttctcggaaagaaatggttaattgctaccagaaaagtctgttgggtttgccaaaaactgatttttgcgtcttgcgctgcgtaggcggccaaatatttgccgtccaatgaaaatgccaacgctgtgatcggcgcacggtgcgcctgcactgtctgaaaattgagggagtgtgtcctaattcaaatgatgtgcttttgatattcacttgtgccttcgatgcgcgaagttcgtgcacaatgatggcaccatttttgccaccaaatgccaatctgcgcgtgttgggacaataggcgaccatataaaatctgaaaaagtcaaatttgccgatgggatttggtgggtgtccgacttggcaatggcggggaacagctcgaacagtgagcgttgcttcagcagcgaaaggtcaaggcaatggacgagcacttcgccgacctaaataaaaaaaaagtggaaaaagtgttaaatgacgagtctaaaattgtaaattaagagcaccggaatgatcaaatcgacgacgaaattgtattgtttgtcggacagttgttcaagcaaacggagcacttcgttccgtgcccgcatcagcggactttggatggtgtgttggatggtctgatgttgggccaccgcattgtaacgggcaacctgaacaatggacgacgataataagagcgagagtgaaacaaaaagtcatgaccattcgtatcaccagcaccagggaaggcaggcattccgaaacccaaaaatttccgggaatcggaattccgtgccatccctgactgacgccaccaaataaataactgacctctgtgcttagcgttgtgatcagtgcttgaggccttaataaaaatcaaaaaatgaattaagtttttcgcattaacaaaaaagaaaacacctccgacaagcgatcagtgacagcgcatgcctggctgtttttgacgcatccgc

SEQ ID NO: 2932 - DNA, 5640 bp, Heterodera glycines
aatggatgacgtaggtatgttgcaaagcgagcttaatgtgtaatggatggatatttacatatggaacaaaagtgaatcagcagatgaacaatgggaaccacaaagtaggaaacaatggagcaatgcgagaattcgcgaaatttggaccgaaaattaaattcgggaaaaagaagattatcatcacgcaaagtgccattgagggagcaaggaagggatgagacaaaagagatcatataaatgggcgacaaacactggttgggtgtagtcagttgggcggggattttcggaattaaataattgcatggaaatgggggggggcaggggcacaaccataaataacaacgaagaaagtgaatggagggatagaaaaaaaaattatgacaagaaaaattaaaaaagcagaattgttattgtaaaataattaagcagcacaacggagggggggtggggaaatggaggacaaattaagagacaaaaacacacaaaaaaggaaaattggaacatcacaaaagctaaacatcaccaaatctacaaacagaacaacaaaaacaataacaaaggtaaagaaaaaaaggtggtgccaaagctggtgaccaaaaagcaaattttggtcggacaaaactctcgagccagggatttattttgatagcataccaatttgacaccaaaattgttcctcgccctgaggcgatgtcttgtgtgaccaaaccaaacagtaatatatataaatgagaaattacagaataaagtaaaggccgtaaaaaatgtttgcccattgggcacaccgaaaattgaatataaactatcatcattttttatcatatggtaaagcgattttccttcccattcggcagcatcagtgtaagcgatttggaattgatccacaccaatcgggcacggaacggctggtaactgccgcccggactgatcacaggaaattcaccttgcaatgattagtgggtgataagcacaaaaatgagtaataaaaaatcaactctctctctctctctctcacggtctctcgttctttctctctatctctctctctttctgcctttcgctttctttttttctctccctttctcacgttctctctctctctttcgaatctttgttaatgggtgtatggtggccaagaaaaaataaatcagtaatacctggcgcgggcacactttttgtacagcgaatttgactttggcccattcccttaaaaatgggaaaatttaaatttaaaactaatttctcggaaagaaatggttaattgctaccagaaaagtctgttgggtttgccaaaaactgatttttgcgtcttgcgctgcgtaggcggccaaatatttgccgtccaatgaaaatgccaacgctgtgatcggcgcacggtgcgcctgcactgtctgaaaattgagggagtgtgtcctaattcaaatgatgtgcttttgatattcacttgtgctttcgatgcgcgaagttcgtgcacaatgatggcaccatttttgccaccaaatgccaatctgcgcgtgttgggacaataggcgaccatataaaatctgaaaaagtcaaatttgccgatgggatttggtgggtgtccgacttggcaatggcggggaacagctcgaacagtgagcgttgcttcagcagcgaaaggtcaaggcaatggacgagcacttcgccgacctaaataaaaaagtggaaaaagtgttaaatgacgagtctaaaattgtaaattaagagcaccggaatgatcaaatcgacgacgaaattgtattgtttgtcggacagttgttcaagcaaacggagcacttcgttccgtgcccgcatcagcggactttggatggtgtgttggatggtctgatgttgggccaccgcattgtaacgggcaacctgaacaatggacgacgataataagagcgagagtgaaacaaaaagtcatgaccattcgtatcaccagcaccagggatggcaggcattccgaaacccaaaaatttccgggaatcggaattccgtgccatccctgactgacgccaccaaataaataactgacctctgtgcttagcgttgtgatcagtgcttgaggccttaataagaatcaaaaaatgaattaagcttttcgcattaacaaaaaagaaaacacctcgacaaagcgatcagtgacagcgcatgccttgctgttttgcacgcatccgcttctgtggtgaagcagcaaaagtcactgaaaagcggacagattggaccttcaaatatttttgagtgcatccacaccccatatacctaaaactttggcgattttcaaattttatgatgaattattttattataaaaaattttataattttgtttgaaattcttggggagaggaaacgagctgctcccatatttgttgtactataatatttgaacaattgaactgtaagcactaccatttatagaaaagcactgaccttttttcttcgtcaacaccggcggctgcggatgccaaattgagaaggcccaaaatggtttttgacaggtccaaatggggctgccaaagcacaaagcctcggcccagcaaatcgatggccgcccggcgcagcggcgaattggcgggaagtagcggcgattcgggcaccagcaacagctcgagcaatgacagtgccgtggcacggcacaagtcggtgttccgctgcaaatcggacggaaactcggcacccatggcgcccaggaggacaatggcggtcgcctgattcctgtgcacttggtgcacaccaccacacaacagcatttggtcctcttggagctgtaaagagatggattattcatgcaaacaattgaattttgatgagaacagagagtgacggagtggtcacatttttgggtgaaccccaaaacttgccgccgaatttttaaaaaattcaaacttttttcaagaaaaaaatcttagaattttttaaaataagatttcaacgaattaaattaggtattatcaaattgtattccattatttcttcaaattgatcacagactttgtttgcaattgcggtggacgaggcgcactgttggtacgggtcgtccagcgaagagagtgacgaggagttgcactgggcgacggatgacgacgccagggaggaggaagcagccaactgctgctgctgctgttgttgttggctaacactaaagtgtttatgctggtgatgctgattgtgtttgttgttgctggtcagtgaactcctcggcgaggacctgcagttgttcggcatgtcattgccaactccgctggtgtccaccactgtctcggttgttgcaccgccgccgccgcattcagcgccaaccatcgacgaggggggcagcaacgacggcagagcgcccgagctgactgttcgcggcggaattggcggcacagcaggacgaggcggtggcgccagtttcgtgacggcggttgctgttgttgtactgctcgcggtcgacgacgcaacactgttggatgagtttgctgccgacgaatccatttgaaaaaaagagccggttgcggacaaatggtggtggaggtgatgatgctgatgacccgtcgtcgttttcaaaatcacaggtaacggcttttcctcaacaaaagcgacatggtgttggtggtggttgtcctgcagagtgccaatgttgttagtgttattgccgtgggaatggtgagcagcaccagcaccagatgtaattgtggacaactgcgacgtggtccctgcaccgccaaaatgggtcccaaaaatggagatggacgggtccaaaacggtgggtaaaaagttggaccaccgctcgatcagccgacgtcgacctgaaccagtgaaattcaggggaattaacgagttcacgaggccccaccatcgcctcccatccgcgtcagttcgcggatgagcagtgcttgcgctgcgtctcttatctcaatgcaattgtcttgccacctgcaaagagagaggggtgagattttgggcttgctgtcgatgaaaaatggacttattgatcaaatccaagtctcgataggacttaaaatactgttgatggctttaaaaaaatttagggtccgtccgaccgtccccattatccccaaaaaatgactttcttgccaacaaatcgatgcgcggtgttgcgtaggcatcgctcggtctgatcagttcagggagcagcacacagtgaagtgctgcgacattggaccagccctgtcggattagttggcactcattttccggcaaaaagtcggtggatttgatggacgatgttcgcctgatgaaaaaagggataaattggtgggaaaagtgggtgaaataaattgtagaaagactcctcctggaagaggagcactactcacttgagaggcggctttttgatggccaattggttggatttgcttttgagtgtcataagtgtgttggacagggccacgactgacaacagatgagcctttaatgaacaacaaaatgtaagtggcaggccatgccgaactatcgctgaaatcccataccgtggtcagggcacgactttcatgccaatggatgctgcgcgagaaatatttgtaggaaaagtcgtcaagcgcggcaattttgcccgaacaatggggcgtataaagtgacaaatttcctgtgaacattttggcatttaaattttgatttttcggtgtttcgacccgttaaattacaaaccctttttggtgatagtgccaaaacagatgggcagtttcggccggcacaacttcagattatgcatgcacgccctgtccacctcctcgtcaaggtcccacccatgcaacagggagaccaacagtttggccgtgtccatgtacaacgactgttgttggaccaaaaatgtgggggacagcagcgaagcaccacaccgccgatggttgcccttgggttggcacaggcggcggcatttcttgcagcgaagacgaggccggagggaaaggcgccgccgccatcaaaatggggatggcaatgatcggcagcgatgccgttgtcctgatgatgggggtggtggtgcaacggcgaagaagcggcagcaattcgtcggctgatcaatgtgtttagcagtgcccgcccgctgtcagtgccggcgcctgagagacactcaatgtttggcggcggcggcacagtggcagcgaaattggcaccaccatcctccgactcggtggcacagagctcatagtcgagcaggagaagaccggctaaaagacaaaaaactaattcaaaggagggaggagaaaaaggaaggcaaaataaagagaaaatgaaaaaaattcagagttaaaaacacaaaagctaattcagtgtttcttttcatcaaagtttgatgtttttttcatctgtttgatttttttcgattttcaggcgtgaactggccgagacggaaacagcgggggcgaggggggggggagttgaacgagctgttacaaaagcctttattttagtggcaatgaaaaattcattttttatacttttttaatatttaaatttttaaagcgccaatcataggaagaaaatattactgatcagagaatcgatgttgaagaggactaaatgggccttgtcggaacagttgcgcaagtgcaaaacttccagcggaggcgacaaacgaataagcaattccacagaggcggaaagatgatcagcaagggcaacggcagaagcg

SEQ ID NO: 2933 - DNA, 8375 bp, Heterodera glycines
cagggatgtgcctaggtttcgcttttcgcatttcgcctttcgcattttttggcgtttcgcatttcgcttttcgcatttcgctttttggcgcgaaatgcgacttttacacccctaagaattggattaaattcccacaaaatttttcaaaattttacctataaattggctaattttcagtgaaaaactgtttataaatgatcaaaatttccagtttttttccccggcggcgcctatcggcaccgccgcgcccccaaaactcctattttttcttagaaaatggcccaaaatcgcaaaatttggtaatttgatgaaaaactgttctcagcggcgcgccaaaactcttatttctcattagaaaaatgatacaaaaatcacaaaatttgatgattttttggtgaaaatctgtcaacaaattttaatcaaattttcaaaaattttcccggcgccgcctgccccctcttcccaaaaagtttttttggaaaaagcgcgcctcaaaaaagcgttttattgatttttaaatttggaataaaattttaaaaaatgacttttgctttatgattttaactattaaaaagttgcagaaaaaatttcgcttttcgcattttcgcatattttggcttttcgcatttcgctttttttttcatttcgcatttttcagtttcgcaaatttcgcttttcgcatttcgctttttatttttcaatttggcccatccctgttgagcatgctatgttttttgcgatggtaatgcatacataattataaacatttaaaaagccttgaaaatgcagttgagccaaaattaatataatatattcgatagccctaagaattccctatttatctaaaaaaattccaaaaaaaaaattcattgagttttaaaaaagtcctggacaaaaattcctgtttaagattttgtcgtttgagccaagttatgaatttttatggagtttgaacttatcccatttctattattaataaaatcgcatcaaattttatttacaggttaataagggattcaaatgcacatataataaaaatggctcatgatttctgttttaaaaatttttatgaaatttttatctatgccaattttatcggcttaaattttaaaaaagcattatcaaaggtgcgattttattaataataaagagttaaattcggtaaatctttttgttttaaattataagcctaaaattggcataattaaatataaaattttgaaaatttttattcattaccatttttcagaatatatcattcgagcatattaataacatgccaataaaatttggtgcatttcagagccctttctgaaaaaatatttatgcattaattttgaaaaaaaataaataaataataataataataattaaaacaaataagcattgaaatagtttcattagttctgtgcgggggagtatgtctataaaatttagtgccggtctgttgtacggcacggagccagcaacagtgtaaattcagcaacggcggcgccgcggtaggggtcaactccgtctggccaactccgtctcagcaatgttcaaaaagctataacttttttctttgttggccaaacttcacaatcatggtatcattcgaaagccctagatgtttagaagatatttataagctatttctcagtgattaatcagctctcaaaaaagttgtcagtttaaaaccgcaaaaaaggcagaattttcaaagttttttatttctatctttttttatagttcgaaattttctgtaatttttagtaggctaatagagcctgtgaagagctttcgaattatatcaagattgtttgattcggtcaataacttcaagagttatattgactcaaagttggctcagacggagttggccagacggagttggcccgttccgcggcgccgggagtgcccgaggtactggcgcgccaactgctcggcttgccagttctgctgctacttgctgtcattgtggtgtgaaatggcgtgatttgtatgcatagagaagagtaaaaatagaaaaaaaaattttctgatttttaattctacttttcttatttgaaactaattttttactcataaatttttaattggtttttatttcaagagatatttatccatttaattaagaaaaaaacaaataattagataaatgaataaaatacattggtgtgtcataatcaaatataaaatgaataaacaaacaaaaagacaccgccacaggcattaattaaatttttgattgtttttattaatttaaatcaaaatttgggcaaatttattttgtctatttagaagagatatttttgtacttttagccaaaaaattatatagcccatgctggtggataatgcgttcaaaatacagacacgagagggacgacttacataaaacattgacacacataaacttataaaaaaatgataaaaatttgctgattggaattggccaactgatcagctgcagagacagatcacccactgatcactgatctgccccttttctctcatggatggccaacaaatggtacgaacacaaatggattagggatgaagcattattggccaagaatggacttggactcgatcttttaatttaattttatttgttgaataaaatacattggtttatcatataagcaatacaaaatttacaattggaaaaattaaacaaaaagacatctccacatgcagtaattaaatttttaattgtttttattaattttttcgacgttttaaatcaaattttgtcaaattttcgtcaattttttgtttatttaagagaggatatttttgttctttatgccaaaaaataatagcatatgctgctgatggatgatgtgttaaaaatgcgtatttaaaacaatgacacccctaaatattcaaaaaataaaatataaatttgctgattggaaattggccaactgatcagctgcagaagacagatcatccactgatcactgatctgccccttttctctcatggatggccaacaaatggcagaacacatggataagggatgaagcattattggccaagaatggactcggactcagttttttcatcggcggctgttcttcagtttgtaaacttttgaaacgtttttgcacttcagcaactgcataattcaacaagcagtggacttcgtccacccgaatgatttcctttgtttccggcttactgttgccccaaaaatgttactttattgttttagcgtccttaaatactaaacagcaaaatgagtcattctatgcagattaaatatacatagaagtaaaattcaaaaaatttaaatttcgactttgttcggattctggtccggggttagaaattggtcaaaatggatatcttatcgtgatcagcgaccttgaaagctagaatttgtgctcaacgcatcaaataaccctataaatttttttttttttggatttttagtttatttttttgtgggaccaataaaaactgtttttgggacgcgttaaaatcgactagaatgatcatcaatattgttaaaaacaaattaacccaaattatagaaatgccattagagggatttgtagcaattaccaaatgaataaatgatattttgttgtattgtctattttatttttattttttaaaaaattttgatatttaatcaattgagacgcagttggcccgtttcgatcaaagttgtttgagtttgaccgttttaaaagaattttttcttcacatttcgatttttgaactggctcaaaaaccgatttaatcgcttctgatcaacttatttcacctcctagatcgatttgacacatcgagagccgcatcagttgctaagacagaacacaaaattctgctaggatttgggggtatttgaatttgatttgtggcgttatatttcaattagccgaattttttttttttttttttcttttcgcttccaaattttcaatccctcatcgaatccacgcaccaattgtgtaagtactctccgcttctccgagccaacacgaaaagcattcattattcataaaaagtgattccgccactttttgggcgtattttattgattctcaggatgcaaatagctttcatcttaaattaacccgtacatttaatcgaatttctaaagctcaataaagcctagtatacctgtatggttccatgtttgacctggaaaaaaaaacctgagatttcctgtacaaaaatccagggttgcctaaaatggactggtcctggtgataagaaaaatccatgccctagatgtacgaactttccaccctgccatctcattttttaacgaaaaaaactttggttaaaaccttaggaaaagctataatgacgaaattgaccttcataaagcctcggaaatggaattttttaaacggaaattgaatttgtttttaaaaaatacctatattggttttaatgattttttgacaaatttcagttacacacaaagtctttttagacgcctctaataaattttctatgttttatctctacggaaatttgttaagacgactaccaaattttgcgcaattttccttccatgtctcacattttaaattaggtgcacaaattattcgatgcatcattgaaaattttaattttttagcgaaattttcgccaaaaatggccaattcggaactgaacacaatgccatcaaatggtgatttgaagcacaataatgctgcggaaaaggtgcagcaaccgaacgacttgaagaaggtcaacgagggcggaggaggaggggcagaggctggccaagacggaacagcaccaacagcagcagaacaggcacagaaaaagccaagcccagtgagtgttttgaaacacaaaaaacagggcacaaatcttagaggttttttatgatccgatgtccattttgcccaattccgaatccctaacccgaaatcgaacaataaggtccaaaaatgaattttttttttttgaatttagactgtttgtttcggtttaaggattaagaattggacaaaatgaatgccattttcgtctggcgcgacccaaaaacctccacagaaaaatgtttcacgattttaaaatattaaaaataaaaattacaaaaaaaaaagagaattttgacaaaaaaatgagtttaccaaactaattgtaattggatttttgccaaaattgttttattttttgagatttattgtaaatgtgatgcactttttttgtatttataaaaaaaaaattacccaaaaacgatcaaatttttgctcgaaaaattgggaaatttattaataaattaatactttcctaaaattcttaaaaaattaagttggcattgctacgctcgttgttcaatgacgcggcactgttcggcaatgtcggaggcccaattcaggcgtacattttgccaagaactgacgcacattatgtaatttacggtctacgtcagttcggccccagcacgtttcgcagcgggttttcgctttggcatccaaatccaacattgttggtatcattcgaaagctcttcatgctctattagcctgcaaaattgcaaaaaatttcgtcaagtttaaaaaaagtttgagccagaaaagttggaaaattttgttttttgaactcttctgaccataacttttttgaaccttaacgacatttttcaaaattctgcaggctaatagaggacacgtagggctatcgaatgataccaacaatgttagatttggatgccaaagtaaaaagttataagcgaaaacccgctggggccgaactgacgggttccggtaatttatcttctttttttttttggaaaaatgcgggagagaatttttcctgctttgcgaaccttttttacatagttcgaaaccagacctcagaacttgaaaggggtcgaacttgatgtcaaaaacttattctcctactaaagtttacccattttttgaattactataattgcatttcatataataaagccccgaattagggggaaaaccccccggttttcgagatgggaaaggattccggctaaaaatctgtttcaacttgaatttgggtcctgttgctgaacccggttcctggaaaaatctgtacacaaaattctggcctgatcgaacacctttcataataaaatgtaaacgatttattgccgaaaaaaaatttttttttttttttttcaattttcagagtgaatatttgtgtgatcgtgatttgcgtgtccaatttttgtccggcttcactgggtccaacgcatttgtggtggtcacacaacaggacgcactgctgtggacggacgggcgctattttgtgcaggtaaaacaaaaatattttgatagatttcggaaattttggaacaaaaaaaaatttatttttattggaaatcttacaaattttttcgttttaaaatttcatatttttacaaaattttttatacggggagggggagggggtgaaaaaaatggtttataattttttgaatttccaattttccaaggcctccgctgaactgcgcgatgggtggaccctgatgaagcagtgtgtgccggactccatcgacccgattgagtggtgtgtgcagcatttggatgccggtgcacgggtcggatttgacccgaatctgatcaccatccgtaattgtttttcattttaatcatacatttattattactgcaaatttgaaaattttttatccatggacaaaaaaaatgatggcaaaattttttctaaaaactgggtttatgagttttttttttggccgtaacttttttacacttaatgaaatttttttgaaatttagtagtataaactaagaaatgcttgatttgattaacagcgaaaaaaagttatggcccaacaacaacaacacaaaaaaaaacattcaattcggacagcatgaaagaatttatgaatttaatgtgtgtttttttccgcccacagaaagtgccaacacaatgatgaacaaactgttgagcattggcctcataccagtgccgtacacacagaacattgttgatttggtatacgacgatttgattgcttttaaaacaatttttaaatacgattttgttcgcaaattgccccaaaaaaaaaaaattccatgggattttttttttgaaaattttttttttcaatttcagatttggacagatcggcccccggaaatgcctaaaaaactgatccatcttggcgagactgagtgcggtgagaagccggcgtccaaactgcgtcggctcgccctgctgatacggaaggccaactgcgactccattgtgctgtcccagctggacgaaattgcatgtaatgaatttgtaaaacatttaatggagaaaacggaaaattaaatagaaaaaattaattgcaagaaaaaaaaacagaaatttatattttacagaaattaactctcctataggtgtacacccaaaaacgtcgccgccgaaacgtcgcgggacataacgtcgccacaaaaaaaaattaaaatttttcaaaattttaagaaaattaaaaattattttagcttttttgaaaatctaagtgttaataaaaactaaatttgctgatttttaagaaaaaaatcaaaaaaaaaaaacttgaaaaaaattttttccttaaatttcttaattaaatttttttttgaatttttctagaatttttccgaaccaggctaggtaactaaaaaatttttgatattttttttttaaaattaaaaaaaattttgtggcgacgttttgtcctgctcccctcctatagagttatcaagaaaagtcgggccgggtttcgcacttttggatggatgggtaaaagccagaaattcgttgtttttttggaatttataaaagttcatcttttttaaaaacagaaatttaaaagggggagcaaaatttgaaaaaaaactgaaatttcttggaactaaattgcctatcccaaaaaatagaaaattaaaaaataataatttattttaatatataaaaaatagggttgttcaacttgcgtggctttgacatcccgtacagtccggtgttttttgcctatgcctttgtgactgtcagtgaaaaggttcggagaaaaaaaaatttttttttttttaatttttgtaaattttcccctccctcaaggcctttctgtttgttgaccagcgcaaaatcagtgccgacgtggcggaccatttgaagaccaacaacggcagtgtggaaatgttcgactacgccaacatttttggctttttgaaacagttccatcagaatcggatgaaggatgtgcacccggaacggcatagggtacgagattttttaataaaaaaaaaaaacacgcgccgtgtaacgaaaattgtgccaggaatttttttaaaagtatttttgtcagctggatttgaaccttgaccttccaaattgacggtttttaacccatctggacaaactttcatcccttttttgcccttgaa

SEQ ID NO: 2934 - DNA, 2111 bp, Heterodera glycines
atatgcaaattttgcatagaaaaaaaagagaaaattcccattttttcatttgttttagccgtcaacctggacgggatctgtcgcgcaccgttgtgggcacatggctgtaattttgaccatggcgtcggccacggggttggccattttctgaatgtgcacgaatatccacgtgcgtttgttttaatgtgtttttgtttggggcttatttgtttgtatacacagttttaaggagtgagctataaaaaaaatttcgatttttttcgaaatgccaaaaaaactttttttcggcgccctggatgatgctgatttagagaccagggatgtgtcggcatgccagtttctggcctatttccactcggaattcccgattgccaacatttttttgagccgtttgaattacaattgccgaaatttttgagggtgtcggaatagaaaaagtgggatttttaatttttgtgtgccactaataaatacccagtgccgtttttttagcctacattggctaccgcgtgcagagcaagtacaactacttgcacaagggtgtggtggtgaccattgagccgggctattatgcccagggctcgttcggcatacggttcgagaactgctacgaggtggtagatgccaatgccaagggcacgacggcatcggtaaaaccaaaagcagcaccaacgacgccgacaaagacgacgacaacaagtacaacaacgccttcaacagtgccatcgtcgcctgctgagggcaatgccggcggcagcaacgccaagggcagcggcgacgcggtcagcagcagcgacagcagaaagttcgccatgttcgctccgctcacgtttgtgccggtgcagaaatcgttgctggtccgtgaactgctcgaccagcgcgaggtattgtggttttgagtgggaaaggtacaaatcgccatggctctttgattggttgtttggaaatgtttatttttttggcatttttacaattttgtaaattggtttatccagtcaggaatttttaaaattttttttaaccaactttgggtaagtgtaacagtgtagtttgccccccccccttctttttggaaaatttaaatttttttttgccataaaacaagttccaggggttttttttgtccattttccctccaactttccccccaaatcacacagattgattggctgaatcgctaccacaaccaatgcctggaggcggtgggtcgctacttgcaggagaaaagcatgcaggaggagtacaactttttggccgaggcgtgcacaccattctgacaatgagatgatgttgatgatgattttgttgggtcaggggctcccatttgcgagacttttttgtctcgaaaacttttttgacaatttttggtgcaattgagacaaatgtctattctgaaaatcctggaaaatcggtgacatttgttggtaccgtgcccttaaaatgagcactttttgcccctttccaaccccctcctttttttgtcctgctgggtgctgtgatattataataacgagaaattatttttgtgcaaatgtttaaagaccaaaaaattctgtgatccaaaatgcctatgtatgtaataactaataataatatatggtgcataattttgtcatttgaaataaaaaaaaattggtgtgttagaatcggaggtcgtcggatgggaaggttcccaggcctgataatttggaacaattgggacgggacggtatttaaaaatttggaaatgctgtcgatgcccaccaccttccctcattttcgagaaaataggaacccaaaaaaggcacagaaatatgttttctatgattttttttaattccacaaagggggggggggcgggacgaccatcgactgcattatccacaaatttgaacaaaaaatccaggaaaaacaaagaaatgtgtgtattatgtcaatccgtgtctctaatacaaaaaccaacaacagagagagggagaggagatggagatcagcagtcaatccaggaaagaaagaataattggtgtaaaacgacaaaaaatggggtaatactgtagttagtcccccccccccctttttggaaaaaaaatttcaaaaatttttttgccctaaaaacaagtttgcaggggttt

SEQ ID NO: 2935 - DNA, 1440 bp, Heterodera glycines
gggccgatttttcctaaggaaggtaaagccgggtcgtttagggaggcggctctttgcggaccatttggtttcttggattgctgctatggaaattttgttggttgacatgaaatgaaggatgttatccaatttgccgccgattccgttggcgttgaattggaggatgttgagacagttgttggatttaggaggaggttgttgtggtagtgtttgggttggtgggtgagatgcccagttgaattttatagtttgagtagttgggtgtgtaggagggtaaggggcccatttgcgtgcggggccagggttggggtatatgtctccggcgattagaagaagccgacgcatgatggccgggtcatcagcgtcggcagggagaaaaacatgccagtggtgcaggggaaggagcggagttgttgaattgaattgggccttggctggcggttgccaggtcgttgccgccccgtagaggcgcccagtgtgagcaacggggtccggcggtgccgataggcgccgctgggggaaattttaaaaatttgggtgcaatttgtgaacagattttcaacaaaaaaaggttggtttttgcgattattaagctcaattggtaggattttcatttaaaaaatgataaaatatgtatcatttaaaaaaaactatgaggaatcatattttctttataggaaacccacgagtatacaaaaaaaaaattgaaaataatctaatttctgtagagggattgaaccaggggaaagaagaagggaaagtcaaggagactagccattaggccatttgcacacttgggcagcgttacttttaaagaatatattaattattattttttatttttccctttgactccaattttcttcactaatttttcactcagaccccattcttaccagtgcttgtttttcccggttcccggttgccctaccgggaccgggacctcggatgaccgggaattcccggcccggtcccgtggcactctagtttttactttttttcgacaattagaagttttttttaattttaaaagcatgatttggtccccgcccaacttccccccgcaactaaaactatgtaagtataaaaccggcagaagacaagacaatttttctggccattaaatattttcctacacacaacaaaagatttttggcttagtgcactttatgagtccaatcaattgactttatttattgtaaaaaaaaactcgggattgtcaattgattggatcataaagtgcactagagccaggcttttacaacaaaaaaaaattaacattcaaaaacctatcacttcgtcaagtagtcatcagggacggggcttatctcctccgggtccatctcacaatcggcattcgccttcaccgtgttgcgcacttcatcctgtgcattcaatctgaaattgttttttttaaattttgggatcaaaaataatttt

SEQ ID NO: 2936 - DNA, 2124 bp, Heterodera glycines
  unsure (1)..(2124): unsure at all n locations
cttttntggaactgacaaataaataagccaaaacaaaatatttttacaacaaaattgtcatcaaaaaaaaaaaattcagatcactttttgcaaaaaaaaactgcgccgctgatcacgatcgccaaaatggaggcacacatggaaatggtgttgcgcacttccattctgtccattcgatctggaaattttttttttttaattttgggatcaaaaataatttttaggggtttcgagggtgcttgctgcttacgaatctgaacttggacttgcccaatccgaaccccggacttgaattcgaaaaagtgaaattctttttcaaagatgcattttcttgggtaaaagcttcgaattcatttaacacctattttttgttcgaattcgggtcagggatttggaattgggcaaattcgatttcatattcgtggccatcactctcaaaaacgctaggaaactgatttttaacccaaaataaaaaagaagttagggacgacattctttaccttcaaaattgtcgttcatgttttggacggtgtcgctcagcatggtcatttgctgtagaatgagctcgtcgttggcaggcggcgcttcgagcggctgcgcgggcggcgcatcgagcggctgcgcgagcggcgcatcgagcggctgcgcgggcggcgcatcgaaattcgccttcaccgtaagtccagcgcagaaaatggcccaaagagtgaagggcacgctgaattggtaaatataaccggcacaactcccaaatacactcacgtccaataagcggaaatcttgtcgatggtgtagaaagccactgaagtagcgccggaaagtccggcaaggacaacagcgttggcagtcagcttaaagggtttgacttggagctgaggaagctgaacatgtaggttgcctaccgccttgatatcatgttttttgagtgtgggcaccaaaaaacagccgctgagcagcgtcgcaccgtacagtcccaatgcgatttttgagtcggtgcaactgaatcctgaaccattcattttcatccattaattgtcaaaaaacctgacacctcctccgattttgtagaccaaataggacgcgtaaccgaacggaatggtgacggcagtgttggccagcaaataattgtatttgcaacaatgggcgaaagaaggaaactcttgtttctaaaagctgaatggagtaaattctctggtgtcagcaaaccttgaggaattgaaccaattcctgatctttgatggccatcgttgagcccacgaaggcgccaatggaaggaacggcggcgcacaaaagtgcgttgcgggtgtccacagaagtcaaagcaagaagcatagtaaagacaaattgaaaggtatatcgattgaatacggagtgtgaatcgctaacaatcggtttaataaaaacgataataaatggacaaactgggggaggcactccccttttgccatagttaaagtggcttttgttaatgctaaaaaattaccaaaacttttgaattagcggagttttggcgtaatgcagcagtttcctgcaattgaatacctaacaggtttctgttggtcagacattaaaataacaggctttttccaccttaatcaattgtacgcaataaaagtctattggatgcataaactgaaaatactatcatagtgtccaaacttcccggttctaaaattacagtcgttgttttattaatataataattgttattttattcaaatgtacactgagattctggagcttgtcaacttctttgcacgctttttccatcttcgcgttccccgtttgaaggttttttcaatgcccacattcgtatattttacaatccaaaaaatttacacgattttcagattggaatgttctgcgaacattttgcaaataactgttttctccgcttccacctttattggaatctcaatcagcccaaacaatgttcgttatcacacaatttccttactcatgcaacttaagatgaagaactgcgtattatacgtgtgtcgaacgaatacaccgacgaactgttcacaaatgctgcgaatgctgttggtctccagttggatgagttgcttgcctgcatccctggtactggtaatagacaatagtacctttgtatgacaccaaaaa

SEQ ID NO: 2937 - DNA, 4135 bp, Heterodera glycines
  unsure (1)..(4135): unsure at all n locations
gtataggtttgtttttgtatgncagagagtctgataatgtacgtgacnncaggcgaagtgttctactgtcttggtgactattcgcctccggtgcctgtctgggtcgggtcagtctgtgcggatctcaagtacaacgagacgtccaatgtcacttttccgcctccgccaattccctcgtccattttgcccactcataccatccaaccgcttattccgcgtgccattggcggtgtctctgctacggtcgactttagtgttgtaaactatcgcattcagttgtcgttagtgcatccgcgtgagcttggctacgctaccaatccggtcagttttaaccccgtttttaatcatttgcccgaattttagtcgagtgattttgtgatgttccgttacgttgtccccggcactccgaattacaccgtcgaatcttttgcatcaactcgattcggttagtatgtttttgcatttttctattaattttcgcttttaggctcgtatcgtaagcgtccggactacgaatttgtcacccatcttcaacgttcgctgttgctgatgaacatgaacatccattcgtgctcggatgagagcacttaatatttttgaagcgtaacctttgatgataggtctatttgtcgaaatgttattgtatttttttgttgttttttgataaaagaaagttgtttttaaaattttatacctatatgtctgaggaaatatagacttaaaacattaaagtacttttgtttgctttttatcgacctctcttaatttgaatttaatttttttgctaaattctattcaaattttataaatggcattttgtttctttttaacaattaccttttgtttttcatttaccttttccgtgaataacttgatgaaaaaatgacttcccccgcggaatcgctcaatttggacgcagcggaagtccccgaattgcttaggaaggaactcgatacgcttcagtttgttcttccgcttcgttttggctctttcgcttcacatttcttttgtttctcttcagcaaagcattgggtgagaatatgcaacggtacacggaatgcaaagagataaaagtggacgaaggactgcgaactttggaggcgaaggtcggcagattggcactgtccataaattcgcacaaaggcattttgaagcgggagcgaatgcgattggcaggtttggcactttctaattgtcctgcctgaatttgtgactttcgtcggcacagaaactgcgaaaagattggggctggaccaacgcattgcgcacaatgttcagcggacccgggataatttggcaaagagcccacaatttgggcgcgcccattccgtggattttttacacgaagtggcgactcagaatgaccaatccctggcggaacaatgcgaaaccgtcgaaaaattgcgaaaattgttggaccgactgagcaattcagacgaagttctttcttgggtccacacatttacaccaatttaaaaagtattaaattgaggagccgtcattgtcgcgaaatgacctggtcgatcatctcactcgatttgaccgcatttttgagcaagttgcttcgcaagtgtatgctctgaatgattcggcagaggcaatttttttggatatcattcatataacttactgcattagtatatggtctatttgggttttattgaacaaagggagcatttttgcttctttgcaaatggatttaggactccggtttttgtttaaattagctttcggattcagaataggtttagatagatgatagattcatgatcagcaaccccggaaactttagagaaagatttacaagacgtgatatcattttgttaatttttattcctattcttttcaattacttttttaagaaactgcgcgacatttttgtggaacaccgacaaaaattgggtggccatttcgcactgattgacccatttgagaagcaaaaagagcggcgacgactgatcgacgcttattcggcactgaaaggcatcgacgcctttccctcttcgaatgcgcttttgcaacttggcgaatattttccgaagcaacaaccggggacggcacagccccaatttgggatgagtaagtattttaagagccttttgtttaacttattcttggctcatccccccagtcacaatactgaagtccatttctccccttttagctcagttcggtcagccctctgttggtggtggcctttttagtgcctcaaaagcgcccgccttcagtttcgccccctccgctcaacagtcctccaccaatctcttcggcacaccaaaaccaacgccttttggtatgccaaccacaactgccaccgcgccaagtcctttcggtgctgcggcagcagtcattccaacttcggctggcggtgggttttcacgggttggcgttttgtttgcccccccccccctcattcggtgcaaatatttgcgtatatacccacccatgggttttttggcgaaaaacggcgaaaaattttgtaaaatagaccccataattcgggatttcaaaaaaccaaaaatacacccctaaaaatcgacttaaaaaagaaaaatacacccctaaaaatagaatttttgacttcagcccccccccccaaagccaagggtctggctacgcccttgaatggttataatactttaatctttcgaaaaacctgatttaattcactaattcctcctttgagagttttttctaacaaaacaaacttaatattaaaaaatggcctacggaatgaaaaccattaatcatatttgggttgatgataattctcaaatgtctcgtgatttgaatttgattatctttccgcttttcccattctcagcgtccgctgtgccgtcgcttttcggcacttccgtctcttccgccggcggttcgtccgccccttcacagccgacatttggcgggttcagcaacacgctcagttcggcaagcagcgggacgctcttcaaaggctcggcacccgccaaaccgacaaatcttttcggcagtaaatgatccaatggcctattccttctatttgtttttttgttgctgcatttattccatcaattcttttgtttcctgtttttacttttcggaatattattgtatcattttaattttcacttcataaaaaggcacacaattcggatttcgatatgtaatgatttatttcatttcttcgtgtattaatttgccatttgttgtctgatggtgttggtgtatggtcacgtcgtcgacttggcaatgaacatgtaataagtccagtagaccacattgaacagcgtgtaaattgctgaatcggactgatcagtgatcacatatccctcgcatatttaatcccaaaatgaccgggaaaggcgattctcgagaaatagtccaatttctcgcaagtgacaaatgcgtccgttttgcgccttccgccccttttgctcagatttttcatacgaagcgtcgtccgtccctcatttctcatcttttttttaaagttcgaattaattaatatttcaatctcccaattttattgcccactttaaatccaatggccgcgagttcgacgaggctggcgaaaatgaaagtcatcccgcaaagaatccaccaatcgattgccttaacataattaacgcgcggcaaattgcgaattattgcgcctggggggaggaaaatggaaaaggggagaaagagcaaacaaaaccaaattggaagatcatcgccaggagggcattctgtgggcgaataataatttgtgtcagaatgagttgagaatgccctcttccccctttttaccactccgatcattgtccgtgccggaattgccttgggccccaaataaaaagggatccaactgacaatgagcaaggggaattaatccgttaaataattaggcaattaattaattagcaattagttgcataatttgcttgttttgaatagcggtgaatttccacctgacctgatgaacatgaacagaaaggtcggataaaatcctgccgagggaaatttcccaattattaatttgccattttctgtgattgtctcccccccccccaattttcaccttgcaacaaataccacccatagcgccgttggaagtgaaattggacggtcaattcgtcccaaaagccggccgaataattggcttgccgaatggaaa

SEQ ID NO: 2938 - DNA, 1813 bp, Heterodera glycines
  unsure (1)..(1813): unsure at all n locations
tagagaatgtgatctgtgaggagaagagcagaaagggtagggtttgncaatgactcaatggcaatttcgcaaagtttatgggcgggacaataaacgaaacctatgcaatctcgggaaacgagtgataatntaggatgaattaagcncaatgctccctcttcncatcgggatggcttagcaaattatttaccatttttgggttaaaaaataaataattttgtactgaccgatcacatccgtgtcattggcacaataatcaggaaaagtggcataggatggaacaattgtcgaataggtggatggagttcggttgaatgccgttgttggcattgtcaacgcccgttcggtggttgtcgtctgtagtcgcttcttcagcctttttgtgatcggtcgtcggaaggattcttcggcaaccgatggaaatgcttttgaggaggacaaagcggcacggagggggacaaattgagcagaaatagcgggaaaaaggaagaagaaagagcatagaaacaatggcagggacaaaggaatgacaacagcaaaaggaaacggagcaacgaattcggcacggaaagcggaaaaaatgacagcagcggaaggacaacaaattgggcaaggacgagacggaagggacgaggactgatttggacggcactgacggaggcgattggcatggccaaggctgtggccatgatggccaaaatggaccatagtctgtgagttggatgggatatttggtatattggtatagttaaatttcgggtgacggatactccgcaaatttatcgaaattcacgaattgtccgttcgatgagaaggcttaagaattgttgtggatgagtgggagaggggagaacaaaaagtgttttgccaatggaggaaagggcgggagggcagaagagaccgtggcaatgagcagaggacggacggcgccgactcccaaaccctttgctttccttccgccccacgcgtcgcaatttgaggcttccccccccccccctcccctccttcagctcctcaagctttgtcattctttcctttgcttttcctctttgtcccaatgcttttcctcctttttcccctttccttcgcttcttctctttttctttaccttttcccaatgcttttgcttttgccgtcttcgaatttgtcaccaaaagcgaagcgaatttggccatcggcattcacatttccttttgttggcgaatggttttgcgggggcgaagagattgaaaatgataatgagtgaagaaaaatgggccaatggggaaaatatgcagtaaaaagcgaaaagattggaagaaaatgagagagcgagagaaaagagagagagaagaaataattttcatattttaattaaaataattagccattttaattaatccaatcgtccctcgcttaatgaattacgctaatttgttaacattgtttcgtttgcacatctgttaaatcttccgattgacgcatcgttccctcgctgctcacttctcaaaaaaaagtttcgttcgttggattttaaaaatcaaattattttaaatgtttacatttaccaattgttcttcaatttatgacaattcgttttgattttggcactttctctctttttgtgccctttttccttccaattcttttctttgaactgctccaacagcacggccaaccctttgttaatgggaacgcattattggcggcacggattgggaaaatggccattaaaaatgggccaaaagtagtgggtaagcataaaaaagtggggggggggaggggaggagagagtggaagagagagtggaggagatgggaggagagagtggaag

SEQ ID NO: 2939 - DNA, 1385 bp, Heterodera glycines
gggaggagagagtttaagagagagtggaggagaggggaagagagggcgccgagccaaatttggaattcattcatccactcatttaacctttgatcaggcgctttgactgggctgcccatcggaggaatacaacaacaacaaaaacaacggtggaggtgatcaaaaaacaataggccaaattaaaagagaattaaaaaggtgctcaacagcagcagcagcagccgaattttggcggaatgggcgcaatgaatggggcgagcggagcggcgcaaagttgacttgacacccacattttttggcatttcaaacaatttaaaaatgagctaaccaaggaatgtacgggtacaatgggatgggaggaggagcagcacaatacaacggatacggcggagggatgggcggagggatgccgcaacaatgggggacaatgggaggggcacagcagcagcaaatgccaaacggacgaggtggtaagctagcagcagccttattaagagggtaattagtgtaatgactatgcttggtattccctaggtcgctttacggagggtattaaaaacgtggcaaacagtgcgatgaatgccatcggaggaggaggaggggcagcgaacggacagcaggggggaggaacttggggaaaattggccaaaacggcaatgaacgcggctggaatgggaggggggaggacgagcaacggacaatggaacggaaacggacaacagaacgggggaaggggaggaggaaatggaagaggaaatggaggaggaagaagagaaaatggaggaagtggagggagaggaagaggaaatggaggaggaaatggggaaggaagagcaggaaatggaggaggaggaaatggaggaggaagaagagaaaatggaggaagtggagggagaggaagaggaaatggaggaggaaatggggaaggaagagcaggaaatggaggaggaggaaatgggggaggaagaggaagaaatggaggtggcagcatggatgaacaatacgacgattatggttctgattatggtgatgaaggaacggaggataattattatgatgatgctgatgaagatggaagagaagggagacaaggaagtaatagtgggagaggaaggagtaggggaaatggaagagaaaatggaaataataacggaaaaagaaagcagagagaaagagaagaaacagtttatgatgatgatgataatgaggaggatgaggaggaagagggggattataataatgatgatgatgaagatgatgaggaaggaggggagcagaggaagaatggccgacggagcagtggcacacgagcaaagagaaggaagaatgaccaaaggagcagtaaaggagaaaaagagagtgagtgggggggaggatgaagagaa

SEQ ID NO: 2940 - DNA, 2380 bp, Heterodera glycines
taaagagagagggagagagagagagaaaagaagagagatcaagagagggagggagagagtgaaagaaaaaaagagaaaagaagagagagggagagaaaagggtagagagagagaaaaaagaagagagggaagagaaaatagagagatacagagagggagagaggagggagggggagagagagagagagagaagagagagggagagagagagagggagggagagaaagaaaaagaggaaagagagagagagagagaaaagagagagataaagaaagagggagagagagagagagaaagggagggagagagaaagaaagagtaaagagagagagggagagaaaagagtagagagagatagagaaaagagaagagagagggagagaacagagagagataaagaggaaagaaagagagaaagagaaaatagagagagagggagagaaaagaggagaggaagagagagaaaagagagagggagagaaaagagagagagaaagacaaaagttgaaagaaagagagaaagagaagagagagggagagagaaaataggagagagagagagaagaagagaaaagagagtgtgagacaagttgttaaaaatgtgagagaaagtatgataaattttggctagcgcgaagtgcgcgagcgaagcgagcgcgcctgcgctagtatattttatttaggcattttgttttaatagttttagtaatattcccagtttaatttataaaaaatttttaaaaaaatggatttttttttttacttttatattatggtgttcaggaggtgggaggtgagattttttaatttattttaaatgtcagtcacttaaattccaacaggaaaagaaaccaaacataatgccaatggtaacaaacattcatcaatttaaaaatagaatatattttctttaggcattttatttgtaaatgccggggaaggttggttaaaaataaaggtgtttttcgttattctgaaatttagaccctttcgaaaatttaaaagaattttcgggtgcaaaagacacgtggaaaatggagggttttgaggagggaataaccgacaaattgaacgatgaacagcaaaaaaagaagaatgaaaatggtcagtccaaaggtgaatataattaatgttttcccccattcttctgtttttgacagaatttaaatttttaaaattttaatttagcaaatgccaaagtcaatcaaaaatatgacatgaaaaaaattgtaaatggcttacaatgattgaaagaaataggaggtaaaagacgcaaaaaattaaaaagtatttatttttaaaatttaatttagaggatcagaggggtgagcttagacgagcagagcagcagaagctgatgatcaaaaggacggatttgctttatttttttctgttgatcctttcttggcattgtaagtctcgttgttttatacatgccatttacaaagtgaaattgagcaaccgtagggtcggtcaagagatttttaaaagccgaaaaatttccaaaaaatcatatagagataccgtatttcctgtatttgaaggcccgggccttctatttttcaacccctccaaaaaggggcctttaattagagggggggccttctaccaaggggggggggccttcaaatacaggaaatacggtattcaagaatattattattaaaaatatatttttcaaaaatttgtaagtttcaatcaagaccaagaaataggagattgcagtgattagaattattaatttttttttcttctcaaatatttttgtacctattcgatcttaggtataaatagctgattagtataaaggcttttttgacattctgtctttgattttcaaaacatgcattgcggatcccgcgggttcccacacaaaaaatcaaatttgcgggtcccgctcgggattgaaactcaaaaactctaattctgacaactaagaaaagaacaagaaaatgagcattttcaaatttcgtgaaaaataaaaacctaaaaatggtacttacttaggagtatttctgtaattaatcatttatgtagttttttgaaagaaatttatttcatttaagtattagaattacagtcggagtcgttattttggttttttagactattattaaattcttgattttttatccaacgcctcatttaatgaatgtactgtacatccgataattctaatattaaaaaggcactggcgcgaggactatcaggctccattagaatatccaccattaattaattttccataatcatctttacttctttaataatataaattaagtcaatgatatcggctttttcactgttacatacccctcaatttccaatgaatggtattccctctggttcgtttccgtccgcttcttcctctgcttttttc

SEQ ID NO: 2941 - DNA, 1190 bp, Heterodera glycines
attaaaatataaaaaaggaaaatccgcggaccaaaaaataattgtcaaccgaaaagtcagtcttaaaaatttcatacatttaaaactcgtccaatttgtgccacaagacatttgctggcacatccaatgaacaattggccgacattgtcaaaaagagaccgaatttcttaagcataaatgcaaattaatctccaaaaggcttttcgtcatctgctggtccgatccaaccaaccgctgagttcgaaccgctcacagctcggcttggcaaatccgagcaaaaatccgtccgctccgcagcgtgccagccgcgtgtccatgcatttgtacgcgttgcacccgccacagctgtcgttgaacagacgaatggccgacaagccgcaaattttcccctcctccggcgaagagtggtggtaattgtggcttaaatgtcaaaatgttgctcaattgtcaggcggggcggtaaaaggccctttcggcgaagcttaaattttatttcaatttccaattgttggataccttctcggattagccagtccacttcggatgactgtttcacagtctcgccttaagcattgccattcgcccatcgaatcgtagaaaaaggagccgaacggaaggcgaccgccacccggcagggcacagccaatcagtcgaatatcccagcgaaactcagagtcatactgtaaaaagtaattgccaaaattaatcgaagtgataagaaagccaagaaagggtttaccgtgcattgcataatgtaggcaccattttccaccttaataaattcacacatattttaaaatattgccggattcagtcagacccattcgtcgccgttttcgtggataatgccattgagtgtacagcttttgacggcaccaatgccaataaggaaaagacaaattaaaatgaacaaaaatttattattcattttttgccaatctgtgaccaaaataaaactcgaaaatgaaattggaaaggagaaacagaaagtaagaagcaaatgcaggtaattatagtcaattttccagtactataaattatttatttggtcggtttattcgtaaatggcctcagcaactgtcgcccatttgtccattcattttttcctttgcttttcctcgtcttttcaaatccattttttccttttctcccaaatatttttcattaattattctcattttctaattgga

SEQ ID NO: 2942 - DNA, 3008 bp, Heterodera glycines
ataatgtaatggattaaattgaatttaattaattatttattttaccgtctttgaaaatgatttgaattaaccgccgatggaccaaatttgaaaatgagagaatgctcagtttagaagagaagcgcattttttactaattacaatattttatttggtaagctaacaaataaatgtttgtttttagtgaccataaaatgctaaaaatatttttggtttggaattgattgattaatttattgcgttttcgtacggaagcgatcaattttggtctcactgtgagagcggacttttgttgaagttaaaataaatcaaaattattccccgatcaatcgaaggataaataaataaataaaaaataatgggaaaaccctttaatcaaaagtaaaaaataactaattattcttaaattggagaacatacacattctctaactaatcagcagttcgtttttgagcctgtcctttttgataataatttcctctttttgtattttaagtaaaggctaacgccgcttttaatatttttcgcagataaaaatgataaaactttcttttaatccaaaaggtctgaagaccaatgaacaaagaaagattatgaaatatttggattttacccatttattctaattttagtcaatcatttttaattttttattaattattcatttaaaaatgatacaaaataaaaataaataaatgaaaatttgttcaggaaattggcttgtccatcggttcgttgagtttcttcccttttcgctccattttctccgattgggccgacttttcgcaactgtgcacatccatcgaatgaccacaaaactgaccacacatttggctcattgatcagtcggtcaccgttcagagatttgaatttggcgcttttattggcgtttatcgcatcggcggaaacagcccaaggacagcggcctcggcatcgtcagcagaaacatttggggcgatgccacgagcaaattgaagcggaggcattttccgggctgtgaatattttggattcgaatttgaaaggatttgcaaattttggcggattgtttggtgctcattttgccaaaatctccaatttatatttgttgtcagtgtttttctcttagtgatctgttgaaaatttggcgaggtcggcccgtcgattagtaactgaaggaatggttgggtggcgaattgggggaagagtctcgccaaatccattcaattcattcaactctctctcacccattctccacaatcgattagtaataaataattaggaaaaacaaagaataatgaatgatattttaattcattttaataatttatagaaaatattgaaacggttttttttataattgtgggctttttcaaaagtaattatgattatctcaccaccataagctacatacgtttgagaacaaatcatttaaaaattttctcatattattaaatttaaacacattatttaatttataaatttaaaatatttaaagattggactgtttcaaaagctcttcagaagtttcccaaggtctcagtcttcatttttttttaaataatgtcaatcctgcggagaataggattgaattcaggagtttttaccgtaaaaatataaatatatgccagcatcagcagtgataggatcttaatccgactctcaaattctgattcccactttctgacatttcagtgtcgggatcatgtcatttcctaaatttcttacaaccctcgggtctgacaaatgagtgtcgattaccgagtcttttgaggaaaaaaaaactgggaatttggtatatgaaatagccgagaataatatattttaaaataaatttcatacattttctaaagtatgatttttggattggtttcccagaaaatttatgtaatataaatcgatcatgtcgaaatgaaaaataaaggataatcgaaaggatctcagataaaagcgaaaatgcacaatttgccattgacttcaaataaatttggattggagtgattcttttcttttgacttggcgcacaatcacttctttgtttcccatttttattccttttcagatggcttcaaattcaattgcggcttcgattggtgtgaagttgaagcgactgaattcgatggcatttgaattgatttgggcatatttttctgctgagtattctgagacgggtaaacgggtatcattatcatttgctgattttctggcaactccaatgcgaactgattcgagttggatggcatttgttgttgtggcaaattgggcaaatttagccgcggaaaacgaattggtgccgggggttgcgccggcaattccttcccccttagcttgttgcttggtttgaattggtcttctgatgtcaattccgggatcatttctcgaaaaatttccttggaaatattgtatacaaaggtttcttttataacaatcttttttccaattggtctgttctcgcctttcggctctccttctctgtttcgttttgttccatcagaaatggccaaaaatgccaaaaaagggacaaaaacagtggcggatttcattagatttaaatttcaagaatgtttaggtaaatttttataatactatagctatctaaatggaatgcttttattttaagggaatgggttagtaattagtgaggatgatgatgatgataatgatgatgatggtaatgtggctatgttagcctctttaaattaatagtggtgccagctaatttatgaatattgattactttttaagcaaaactcaacaaatgagagagagaataaaaatttgaaaatatttaaagaatgtgtcttcgttcgaatttttaacggttgaagcgttaaagtgtgagacgcaatgtgacagttccgtaattacgcaattcttcatgaaaaataaacaaaattgtttactaaaagatttaatttcattatatccaatttccttgcgatactttctctaattttcttacatttcttatttgaataaatctcttctgtcaactgttgctttccttaattctctctctcatttgttgag

SEQ ID NO: 2943 - DNA, 2026 bp, Heterodera glycines
  unsure (1)..(2026): unsure at all n locations
attaaatattcaaattttttacccaatttccttcaaaattaataaatttaggtagccggttttttcttctaaaatgatttcaaaaatatttaggtaactatttctcgatttttagcttaaaattaatgacatattttgcaacttttggtgcatataattaccagccctaatcaaaacattgaaccaatttcagcagttagttcgtaacacacaaaatttttaagttcaatatgctttaataaaataataaaaataacaaaaaaaaattaaaaaagatcggccaactcagtcccccttctcctcctcggccaattcagtcccctctctcttccatctttttctctcctctttcttccgttggtaattttctaagtttccaaatgccacacttttgtgaagttgctccagtggaaaaagatccgtcgaattggctaattccgttgagaatttcgaccctttttccaattctaaatcggctttttccattgctacgctttcggctgagtccgcgccaaagtcacagcgaaataaaccctttctaaagcgaacaatgccaaataaaattaacagcgaaaaaccttccgacggcaaaaatttgtctgcctttttcgtcgatggcaaaatcgaagaattggccatctccgacgaaagtgcgcgacaaatcgacggagggcccccgggggtcgaaattgaaaagggaaatttccgaggcaccgtcgaacaaagcgaagatttcgtttttctgttaataaaagtataaagctaaaaaataaatggaaattaaaaagaaaaaacagacagactttggggagaggaaaaagtttacggatgggcgaatcgttcagtttcggactgacacacaaacaatggcccattttgaagtgccaaactcgcaaaatgccgtcgccacctcaaaaaataaaagggaatctacgcgtttttgttctgactaaacaaattaacaacggaatgtaaaaataacgaaaattttctcttttcggtacctccgctgaccgcaatttcgtcattcaaacagcacaacgacttgacaaaggaagtgtggccaaggcaaaagcattcgatgatttgtgtgttcggatagcgcgaaacgcgcactttctcgtctcgatcggcggatagaaggaaattgggccttcccggcgaaaggcaatggtcgagaagcattgagaaatgggagagcaattcgatggcaccgccagggcaaaaattggcatctgccaaatcaaaaatagcaatggaaaagtgagtgaattggccatcattttcaaaacacaaaacaaaccattgacgcggaattgcagcagagaaccggaccgagtgccgaccaaaagagtgtcaccgcaagcggaaaaatgtatctgcaaaggacgaaattttggcacattttgtaatggcaatttgttactgcggtcggtgtcttgggaatggtttggcatttcgtttcttcccaagtgccaccaattgcatttcccagcgattgcaactcaaagagaaggacgtgttttgtggtcgttgccaccgcgaggagtttgtggtcggctgaaacatctgaagagagaatctgacgaaaaaatcaaaaattatttgggacaaaaggccaaagggaggaaaaattaccgacggattgcattcgttgtccttccccaacttctgctgattattcaccgcatttggaaaagtcaaatcgacttgaaaagccaattcgacagattgggaaccgttcttggcgcatttaagcacaaaaatgtgtgaatttgtgcagacaacggcacaaaattgttcaccttcaatggcatggattgaaacgaccatcgataaaataaaaataaccaatctgacaataaaaaacacacttatcaattttctagaataactgccattcatttttagaatataaatcaaatttaaatttttttgtaataaaaattaatataagttggnttgtaaatttttttgtataaatttatctctgaattttcaaatgtacagtattcangcaccgagg

SEQ ID NO: 2944 - DNA, 3987 bp, Heterodera glycines
aaatcaaaaattattttgggacaaaaggccaaagggagcttctttaccgacggattgcattcgttgtccttccccaacttctgctgattattcaccgcatttggaaaagtcaaatcgaacaaatcgacttgaaaagccaattcgacagattgggaaccgttcttggcgcatttaagcacaaaaatgtgtgaatttgtgcagacaacggcacaaaattggtcaccttcaatggcatggattgaaacgaccatcgataaaataaaaataaccaatctgacaataaaaaacacacttatcaattttctagaataactgccattcatttttagaatataaatcaaatttaatttttttgtaataaaaaattaatatagtttgtttgtaatttttttgtataaatttatctctgaattttcaaatgtacagtatatcagcaccgaggatgcaatcaaaagagtgtctgaactatacgtttttataagcatatttagttgttagtaaatacatcctgggctatttactgtgtgtcaaagaaatcatcggatgggaagtggggttatggaatttgcaagtgacaatatgttagaaatcctttgaaacaggaatggatgaatatcagaaaatcagccaatgttcgctctcttaatagccatgagcttggggatacgaagtcggattgggcggatacacagcctgggcctgaggttgtgccggataagtcggtgccggagggtaaacagcttgggcttgtggctgggcagggtaattatttgatgccggaggataataaggctgcatgggataagcttggcctgctgaaagagtgcaaaaattaaaaaagaattataaatgttgtccccacccgaagggttgtggacattgtcaccggcacatcgtatttgtaggggatggttggtctggtcgtagttttggttggtgttatttcccggcatacaactgaaggattaaaacacaaatcacaattaatatgcgcatctatcgtaacgagtcaatggaagttcgtacaatatttttaagggttttttagattttaaaattcattgattttttgagaaaaatgctgttttgttgaaaaatttaaaaaaattcattgtacgaaactccattttacgaacttcctattgtacgaataatcatagtaacacaacgatatcaaagtgctgtaaacaatttccttttttgacagatttaatttcggctcaaacccttttaagcaaagctaacaaacattctgttgatgaccatttaaaagacctgtcgaagacggagcgacaagaagtgtaagttaacagagcacagcagcagcagaagagaagagcgacaacgacaatgctaaaattctgaataaaaacaaggcgtgtcgcaccgttcggagactttcgaaggcagcgaaaatggtcgactcaccccaacaacactttgccaacggtgcccatccctccgcccgacttcgcctcactgttcggcggagaataattcggattcgggcaacagtccgtcccacagcaaatttcgacgttctctttgcaagtccaaacgacctgacaaatgaaggatggaagaaaaattaggaaattttgcccattttctcacctccttcggacgcgacccattgggaaaagttgcctgaaataggaaaagcaaaggaaatcaaatggaaattgaaaggggatgaataaaatggacaatgtcattttccccaagtctattaaacattttttaaatgacattttaatttgctaactcttaactcttcataataacttaaaaatgattgaaaagtttttttttctttaaattgtttaaatttttggggtgaatgctcccgtgaatacatttgcgagtgtttgttccggcgatgtgccatttgtcgtttgatttgttgtcgcagcaggggattggttgaccagcttatcccacggcactttgcactaaattcaaaaaattaaaatacattagccaaagccgaaaagttggtaatactgccgatgccccccccccttttgaaaaatttattttctattctaaaaagacgtgaaaatttttttccaaaaaggagggggaccatcggtagtattaccgaaaagtttatctgtaatgtaaaaaccgttccattcttctggcaacggaacagttcagtcgccaccgtttacctgaatctctccgtgctgtttctttgcgtatttttcgtccaaatagtaattgcgtccgtcgtgttggaagggccggtcgaaggaatgaataatcgcttttcctttgaataggattctgattagtaccgactaattaatgccatcctacgactgacccgcttcaaaggcaaccaaaccgccaacggtgcccaccgcagcacccgccagcgcagtcgtgaaagtcccgggacggctcgacgaaccgagtcccgttccggagccaaagctaaaacaaacagtgacatattaagagtgcagaccaatcaaaacaaaaaaaatagggacaatatgacatgaaaatttcgattttaaccgcaaaatgaaaaagtaaacgcctgacttttctaaaaatacatgtaaagtttgttgttcagacaaaaatacttaaatatccagtaatttgccacttaccggcccgggccactgccagcagacattgatgggccgtggaaaccgcctcctgcaggcggcggatggaaccctcccccggtcggtccatggaatccgcctgctcctcctccgacaaaatgaggctgtcctcctccaacgggagctccaccaccgccgaaatgcccacctgaatggcactttacctttccaacaattaattatttgtaaaatatacccgctggcgctggattagcgcgagcagctccaccacctcggaatccaccgccaccgccaaactttttggcatttaaacagtgcaattggatggcacagaacaaaaacgaaaaaatgaatttctttcgaataaatttcatctttgagattgttacggtatctaaactaattaggtaatttattattatggaattactaagtaattagataggatcatttttattaaaatacaatctaggtattctcatcatcattggttgtgtgtgcttctgctgcgagctgatcgcaccacagcccatttcattcgatgaaacgtccccccccccgtcgcatttccctccctttctctcgtccttctctttcatcaatcttttctctcttttcccacctcaccaaacgaagcgtgcgcgacttccaaaaaatttttttctcattcatccctttaaaaccatacaatcgataaagcatatgcttattttgttcgaggtgtgtttgttcacctgtctgctgttcttttgctgactaaggcttttcctctctttgtcgctgtttaaaaaaaatgcaagaaatgagattttatacacctatatatatgaataagtttattataaatagaaaaaaaagtttttatcattaaggttgcacgtgatcgggattttctgaattcacaaattcaaataatttcatatttttcaagttaatttaaaaaggtttaaaatatagaagaatagtccggcagtttgtccaatttgggcaaaaattcatatacttgcttttgtgggtcttttggaaaaaatttttgagtaatttttaatagagagcgggtacggaccgtatccgtatacggatttttacagatccgtagtccgtaatccgtatttttttaggccgatacggatttttacggagtacggattttccggatttttagtccgtaagtccgtaatccgtatgtgtgcctagtccgtagtccggatcctgatccgtacaattttttgatacggattacggattttttaaactgaacttttgttgaatattttttttgaattttcattatatttcgctaagttttgataataaatttgaatttgataactctttttctcaattcttaacttattttcaacaattaatgaattttttgttt

SEQ ID NO: 2945 - DNA, 1617 bp, Heterodera glycines
ctctggtaattttggtcaattatttgaaaatgtttatcatttcattaaaattttccaataaagtttgtcagaaaataaaactctttggctaagcctttgaatttttaaaaatttcatttttttgaaaaatttccaatgggcccacaatgtaaaggcattgatggggtatttaaactagacaaatttaaatgttggacatatttgatgaatttttaaatagttaggattgggtccttaaggttttcaacgcataaaagtattaaaaatgctttacaataaataaaatgcattaaaaattcattgggaaaaggaaataaaaacggttcaatatatttaagaatttatgtgccaccatcatttttctgatagccaagcctcaataaaattgtaggaattcatcgacgaatttgtaattttaaggccaaaatatttttttataaatccgtcgacgaaattttaccaacgaacgacattttgtcaaaatgactcgaggattattcaacaaaattgaaacccaaaaaaattctcgagctcaagagtcgagagtctcgaaaaagcgatgaccgcaagaaaaaaaaacggggggaaaattcaatgggtgggccaagaaagggtaggagggggatgttatattttggatagaaacaaaatctttttgaaaactaggtaggtctttgaaagatgaaaattcgttaaaacaaatacactcttgttcatctcttatttgttagtttatgatcactagggcttgtaattatatgcagatgcatattttttcctggactgtgggagatctgaaacgtacgaaaaacatattttagcttgttttgaagcttctaggccgtacttccatatgcatattttgcatatttctgcatatttcgcgatttatgtgcatatttgcatattttggcatttcgtgcatattttatgtgcatatttgagcattttttcaataaatcctctattaaaacggccccctctattaaagcggccatttgggctctaatgaccgaaaacttttcaaaaatatcagatttttgggtatattttctgataaaaaagtaacttttaaaaaattgaaactttatgccaaaaatagtcagaaaatagaaaattctccattttttgctcaattttcttcaaaaataaataaatattacttttttagttctaaaataatcattcatactatttttttagctattttcggaatttttatgctttaatttaacaaacttaaagaaatttgaaaatttgccctcaatttggaaaaatttatgtgcatatttttcactttttatgtgcatatttcgcgatttttggtgcatataattacaagccctaattatgattatatgcaatgcaaattttttcctggacaggaagcagcattaaatgcgtgaaaaaattttttagcacgatttgaagcttctagagcgaagtttaaaatataagagggaaaatcgcaataagttaaggcaatcctgaagaatgggggtttctattttaaaaaaaattttaattgagcccaaaattggtatttgggcttttcgagggcgctgacaacgaatctgaactcggatttgcccaattccgaacatcgagccagaattc

SEQ ID NO: 2946 - DNA, 1236 bp, Heterodera glycines
  unsure (1)..(1236): unsure at all n locations
gtgattatgataggggctgtaaattatatgcacatgcatatttttttctgggactgtgggaggcctgaaacgcacgaaaaacatgttttagctttggtttgaagcttctaggccgtacttccatatgcatattttgcatatttgtgcatatttcgcgatttatgtgcatatttcggcatntcatgcatattttatgtgcatatttgggcattttttcaataaatcctctattaaaacggccccctctattaaagcggccatttgggctctaatgaccgaaaacttttcaaaaatatcagctttttgggtatattttctgataaaaaagtaacttttaaaaaattgaaactttatgccaaaaatagtcagaaaatagaaaattctccattttttgctcaattttcttcaaaaataaataaatattacttttttagttctaaaataatcattcatactatttttttagctattttcggaatttttatgcttaaatttaacaaacttaaagaaatttgaaaatttgccctcaatttggaaaatttatgtgcatatttttcactttttatgtgcatatttcgcgatttttggtgcatataattacaagccctaattatgattattgcaaattttttcctggacagtaagcagcattaaatgcgtgaaaaaaatttctcggatttgcccaattccgaacatcgagccagaattcgaacaaaaaggttaaaaaaaattttccaaagatacagttttctggggaaaagcttcgaattcatttaataactatttattttgatgcaaaacaatgcttcaagtattaattgaataaaaaatacgcaatttgcgcgaaaattcagattcgtaatcagcaccctcaaaaacccacggaaactgatattgagcccaaaccaaaaatttaaattagaaacccccattcttcaggattgcctaagttaatatatttttgctaatatttttcatttgatcgattttttctgttcattattgccgaaaatttacaatagcaaattgactatgctttacacgataaaagtggttttaaagtgatttgggcactcacagttcgatatgtccccttgtcggttgcaccatggaccaatcgggtcgggtactggaatagcattagatcagggctcccatcatcttttgcgcgctatataccaaaattttgtggacataatatagggaattttgggctacattctataagaaaaatag

SEQ ID NO: 2947 - DNA, 3310 bp, Heterodera glycines
  unsure (1)..(3310): unsure at all n locations
aaattaaattgtttttgttttaaggaaagaccagaatttactcggatgctgaacaattggaatatgtgaaaagaagtgaagaaatggcagaaagaaactcaaagataagtgagagaaaaattgcattgggcatttcaaatgccaatttaagacgatggacgaggaaatttggcaccaaatcgatccgttagcattggtaaaaaatattttattcagtgccaattggtcaactttcaactatgctgagaaaaaaaaaatgcttacaattagtactatttccctgttcctttctttgtaatttctctcactttggcgaattatctcttcatttgttagctgatcaaaagcaaaaacatttacttcgcttcaaaatagtcttgaaatattttagttatgaaaaatcaaaaaaaataaaataaaggtgataccttcttgcgaccaatgtgatgttaaactaatgaattttcagtgactaacaaataagtgacgtttaaatgaactattttcggggaccaatagagacgttaaaacgaagagtttttgggctaaaaataaagcgctgttgataattttaatgaaaacgaaaaacaaattctttacgatgaaaattaaattttatgcaaatttttgtcacacaaattttcgccaatcaacaatatttgacagtgcttacatattaggacttctactcggaaatgggtctcctcatccaacagcacttttcttatggctattattctgatggtgatggttttttagcgcttgacaacactttggcaatcactttttgcaataatccgtcgcccttttttggcttttcgtaatccgcttcatccgttgctgggacgcacgcatcgttctcccatttacaacgatatttatcgcttcgaatctttgtacatttgcttttctttttcctcttttcgcatgcttgttggtgccatttcttagtaacatctaaatttaatttaaaatttaatttatttttgagtatgaattttaagatgaaactgccaaacatacgtttaaaataaatttattgaaaaaagaaataaaattaagccaaatcagtattgattaaataatttttaaaatcaaaaattcttgtcaagaaaataaataaataaattttggaaatgaataaatatttgagaaattttttagtttcataaggcttatttttgaaaatcttatcgtcgattctaaagaggtatttttttgaaaatttttagtgtgatttttaggagtgaatttttctggcatttttggggatcgattcttaatggtgtattttttgttttattgcatatttttaatagatntgngcaaaacaccanaataggcttttttcaaaatttttaaaaagttttaggcataaaataaaactagaaataggcacaataatcgaaagtagcttaaaatcaatcaggaaaaaacttgttttttcttgcggtcagacatagtgccgcccaggaaaaaaatgggaaaaaaaccctaaaaactcgattccctaattataccccttctacattaaataaaaaaaatggcaaagcttttcaacggcaaaacccctttttcctttccggcccacacccccttaggaaaagcccttttaaatcttccccgccttcggcctttgtatttttttacaaaaattgaagagaaaaatcaatagaaacaccacccaaaaaaaaaattttttataaaaaaaaaaaaattctttttttttataaaaaaaaaaaatttttttttttttttatataaaaaaaaaaaatttttttttttttttttttttttttttttttttaaaaaaattggggaattcaaattttttttttagcccaattaagggcgggtaatttaaagtttttttaatattaagttttttttttgccgttttttttccatgggtgaattcaattgcccaaaaaacaggtgccaaaaagttggcaaattggacaaaagcattggccgcaaacaaccaaatgattggtcggtaggatgaagaagctggggcgtagaaaggaactgtcaaaattatctgaataaatttaaattaatgaaaaaactaaaatttcaaaataatttccttaaccaatcaatatttggcgaaatgttttttcgtttttaaattaaaaaaaaagtgttcccgagtcccgacggtgccgagcgtaatcaaatgacattcaaaagaagtctcggcgtaaattcagaaaaaatcccaattttttttttgggtgatctcgacctcatcaaatttcgagaccggactcggaaaaaccccggattttttgggtgtctcagtctcatcgaatccgcttcgagaaatcccccccccccattaatttaataacatttttagacaatgacaattatttttgcaaaacagtagggactcataaatagttaaaaattaaaattattttaaaattaaatttttaatttctcactcatcgccaagcgcattttccaggcgttcattggatgctgatgagctgctcctttcgcgctgctcaattctgctggcctttggcctgtcaaaaaataaaaatttttaaatttaagtttagcgccaaattttggcattttgtttttgctttttgtttgtcccccgacttggccaattcgctccgctgggccactcgacgcgaaatttgcgcgccatcatcgtccggctgatcggtgccctccaaaactgccgccgatgattgtgatgatgatgccaaatcttccgtctcctctccaccctcatcctcctcatcataatcgtcttggatttccgcagaaatatcctcggacttaaaatggaaaattttttaactgacacggcatttattcgcagtaaacccaggaaaattggggaattttaaaaaaccaaacacggattaattagataattgttaaattttacggaataaaaaacggttcaggaatcaggagaaaggctttggaaattggactaggataagcattttttattgttaaacattctgctttgacaggacaggcttgatccggttgagttcaataacaaaaatcaagaaaatctggacattaaaatgatttgaatattttattttaaaatttaaaatcttacacctaaattcatttcttaaatttgttaatatattttcaaaatatgtatttgtttctgtacaaattctttttgaaacaagcttttccgacataactctgacttgaaaaaattgaaaattctgaaaaaaactgaagaccgtcgagaaattaaattatttgaaaaattaccacaaaatggcaaaaatttgtcattttttggtacttccgntgtttt

SEQ ID NO: 2948 - DNA, 1100 bp, Heterodera glycines
  unsure (1)..(1100): unsure at all n locations
ctttttcaaaaatttttaaaaagttttnaggcaataaaataaaaactagaaaataggcactaataatcgaaaagtagcttaaaaatcatcaggaaaaaaacttgttttttctgcgttcagaacatagtgcgcccaggaaaaaaataggcaaaaaaacctaaaaatcgtatccctaattattacccttctacaattaaataaaaaatatgcaaatgctttcaaaccgtcaaaactcattttcgtttcagtgccatcatcacttaggtaagtcacttctaattcttccggttctgcgcttgaatttttagcaaaattgaatgagaattcaatgaacagcatcagaaaaatatgttttagaaataaaagtttcattgtttaaaaaaattaaattatttttatgaaaaaaaaagaatttatttatttattcataaaaaataaaaaagtcatcagaagggcgagaaccacttactctgacgactatcagataaatgtcgtagagtaagtgacaaaatatatggatgatcacaggaattaaaaaaagacaaaatatgtgaaaataaataataaataaattgaggtcaaagtcaaatgaggtcgaaataccaaatcacttagaaatttgttacattctaactttcccggtcttacagattaccctagtgaacttttaagttttattttaaattgatttaaagaatttgtttttattagttctttatcgagttgattccacaatttcgttaccctcccagcaaagggaatgaatatgctaaaaatataataaaatataagtaataaaaataatattaaaaaaaattacaatatcaaatatagatatatatttattattagaaatatgcaagaaaataatcgataaataattgattttttattcgattcgattttttaaaaggtaaaactgtgaaaaattacgaacaaattttaaatagcatttctgttatttaaaacaaaaaatcgcttaggtttcccggtcggcgcctatcccttaaaataatcaggcttttcgattttacgagttattttccgagtaagttttccaacacgttgccgctaaaaacggttgaaaggagtgcgttcaa

SEQ ID NO: 2949 - DNA, 5143 bp, Heterodera glycines
  unsure (1)..(5143): unsure at all n locations
ttggttgatttttatgagtaattaatttaaaaaaaccatttgtcaccaaggaaataattaaagaagaaaacgtcaaaccgtatcgaactcacgacagaaaataatgtaaatggcactaccctctacaccacattccaaatgtccaaaattgagcaaatcttcttcatttaataaaaatttggcaaatggttaaaaaaattcaaattccgtctaacttttttgcattttctcccacgaaaatgccattcttaggggtgtatatttacgaaaatgccattcttaggggtgtatatttaaccccgaccccgatcggggttaaggttcggggttgtcggggtatgaagcgtcggggttcggggtcggggttttccacgaaaatggccaaaaatgtcggggcggggtcggggttgcaaccctatttttaacagaaaatctaggtcaagcaatcaggtaaaaaaatcaaggtaaatgtcaggttttgacgcgaaaaatattgttgtagggatagtttttagcgtaccaggtgttttcgacagtgattgatttcgacagtgattggtttcgacagtagttgattcggacagtactttttaattatttttctgcataatttattgaacctatgaaaatgccgggtttgagtgccaagctgtaaatctgcaggctcttgtagcaaaattcgaaaactaatgccgggtttgagtgccaagctgcaaatctgcaggctcttgtagcaaaattcgaaaattgcaaaccagtgaacctgtgcttatcattttacttttcaaaatttaactagactcataccattatgagcaagtttttaaaaaataagctttactgtcgaaatcaatcactgtcgagatcaccactgtcgaaaactaacagcaccgatttctaagcctatttaggtcatttttatggcattttgtgcctatttcacctttttacgaagaatttttttcaaaaaaataaccatttaaaaaattttatttacatattttagtacatatttgtggatttttgtacatatttaatacatattttagcattttttatacatattttatttacatatttcgcgatttttcttacataaaaaagaagccctgcttataacagggtttgtaattatatggaaatccatattttttttcctggactgttggaggcctgaaacgcatgaaaaacatgtttttagcttggtttgaagcctctaggaaggagttctatatccatattttccatatcgcaattttatgattaaaaaaatgagtatttttaattccaaatgaggattttttgaggtattttagtggcaaatgaggattttttacggctgaaatgaggattttcaaaattttgagatcacagctctgacaataaagcaaaattctgaacatttaattagaatttattgtgcctaaaatggggagtaaaataaggtttcattttccctgctttttttttgggggggggggggggtcatttccttctaaaaaaaatttttctatccatttctatgtaggtaagaaattgcacaattttcaaataaattctttctctctctctctcattttttttgtttctttctttttgtgtctgttttccgtctctttccacaaaacatcgttaaaaggaaggacaacaaaaagagaagggacgatgggagagaaaggaaaagcaaaacaaaaaaaaaataaacaaaaaatgatgacgagcaagagtcnaaaaatccaatcccgaggaaaaatngntggcggacaaaacccgctggcatatgcggaggacctccaaaaagggcatttccaattcaaattttgaagaatggcatagcaaaatgatgcaaatgagttgaaagagttataattttggatttactgcatttaaacttaaaattttgggccaaaatttcaaagaaaaacgctccaaaaaatatttgtcattacttccgccacacttttctctgctttctcccattggaagcacttttctacaattaaaataaataataatgaattgttttgtttttctcatcgtccgcgtggtctctttttcggcactttttcctccgcctctttccgccgcttttcctccgccgcccggtcgtacatcaaaaagcgctcgccgtcgtccaattccaacaccatacgctgcatggtgaacgaggacttaaaggcgttcaaatcagaatgaaaatatgggatgatccggcctaattgttttgcttttggccgtcattttacggagcttttttcccctgatttttaaccctctcgaaaaaaatattatagtaattagcggtgtcaatagggtcttgagtgggcgaactttccagtctttggcgacattttaaaagggtaagaaaaaaggcgattgaaaaagcggaaatcgaggaaatgtaacctgatcaatcacatgatttgattacccaaaataaattccgctatgccaatccatcattccccttttaatgacccccgattagcgatcagaaatgagtagccgatcaaaccgattttgggcgatgcaaacgatgaacaattttctcggtcgatcatttcttatttatttaactcaagcagttcacccacatccttacaaataagtgaaaggaattttcttcaagcattttccaaaacacgctaattaagggtcccgaaaaaaaattgaaaacggattaaaagcaataaaatttttaattgggggaagggtggggggctcccgagcaaccatttctcaaatgctcacctcgtccggttctctctcagaaaatacgtccacaaagccagatgaatgggttccacagaccggaatgtgaagctaaacattgaaaatattaaaaagtaaataggaaaaagaaattttaataaatggttggtttttcataatatttttattgaaatttggataattttttcgtccaatacaacatgtcccaggtagtatagtggttagtatccgcgcctgtcacgtgcgagacccgggttcgattcccggcctgggaggcaaatattttttgatttttttaaacaacaacaatttgaattaaattgtcaaattccactgtcaaattttttaaagagatttatttaaaaagtaaacgttgtttttattatattgaagtaataaatgacttcaaaaattcccatgaaatttagatattccagcaatatttcgaatttttagatgggggatgagtttgactaaatccatttaaataaaccgacccggtccggcgacccaggcccgtagccagaaaaaaattcggaggtaggaatgcgaagactttatttttggttctttgggccaaaattccaaaaatctttttctcgcgaaatttttaaattttcgtcgccaagaaaaacttttctggctaaaaaatgacaaatttttgccaggttgaggtcaaattttcaaaaatatggtaaaatagatggggccgctgggaaaactttgaatggcataaatttaaaagaaaaatgctatgaattgaggataaaaaattcgtttcttcccatttcccaatttcccaggtagtatagtggttagtatccgcgcctgtcacgtgcgagacccgggttcgattcccggcctgggaggaaaacattttttacattttttaataacaacattgttaaaatgatttaaatttcacgcacccccgcttccgttttgcgcatgtaattcctcttcttgtccaacatgttcagcttcccaactttcaccggttcacccaacaaacttttggcctcgtcatgtccatcgaaaatgagctaaaaacgaaaaaaaaacagtgtaaaataaatatataatattttggaaaatttaaatgatggcacaaacaaaaagcaaccatatacctaattaaaaaatgcaaaattcccaatttattataactaaatttgcctcttaaaatttttggccaatttgagagctctgatttgttaaaataaattcccttggatgtttcttcaacgatcaatcagcaaacacgaaaacgtttttttcgggaattaactttttccgagtggacgaatccgacttcttttcccaaattcggttaacgcaccatcgcctttttgaagtggggcgatcccatgtacgtcttctgggcgatgtaatgcatgaagagacaaatgcctgcgccattgaaggtgataaggccccaggcaaggccataggtcgaccatttgacagacgaaattttgtgcaacccattgacgaacgcactcatttttaggaagacaaagttaaaaatatagaaaatataataaaaaagtgaacagaaatgtaaatccatttaaaataggcataaaacaaaaataaaaaaagtattgaaagccaattctcttccaaaaaataaataaatagaaaacaaacaaaataaaaaaacaacaaaacataggaaatgagtttgttgttgatactacagatcgtttggttgaaaaataaatttaaaaaggaaaactttttttttggtaaattaataatcgaaagaatgatagtgtagggattccgttagatcatttgtgtgcttccttccgtcctcattaattcaaaattgctgctgctactgctggacgtcagcagatgagacggactgttgcgacgattgctgcgatccgctcacaaaatcctcgggactttccaccaacgaaatggtcacagctgacagaaaggcgggcactgaattgtaacggacctgcaaatttggtttcaattattaaataaaaaaggtaatttaaaaggaaaatggaaaataaaaaaggaattccgcctcaatattcaaaatgataaatccataaaaattcgtaaaatacgttttatttcttgggttttcgggggctttgatcaacacattagtgatatctttaagttcgttttcgtgtaaaaaaaaaaatttttgatagagaaaaagtggaattcgaaaaactgatggctttcgacttttggttcgaatttgagttcagtgtacaaatgtcatattcgtcatacatgaaaaaggtggggggggggtcgtagcgaaggggaaaagaaggaaatttctgaaaaatttggtttttttcttaacaaaatttgctagattcaatttttcttaaaaaataaggcccaaatctcaaaatttggtgatcttttagac

SEQ ID NO: 2950 - DNA, 2973 bp, Heterodera glycines
  unsure (1)..(2973): unsure at all n locations
cttgcatggcctgggcaggtcgcaaaaaaagcggttttttaaaacaaaaaanagtcgtcgcctttgataaaaatcgcaaaaagctgccagttttcggtgaaaatctgttacaaaattcacttaaattttcaaaatttttctccggcggcgcctgatggcaccgccggagccccccccccccaaaaaaaagttttctaaaaaaccgcgccgcaaaaaaagatttttaaaaacaaaaaccccaaaataatggaggggaagtggcacattaaagactataaaagcacaccaaataattcgcaatcaagtctttccaacgttgagcacattcgttgtccaacagatcgaccgtcggcggttgttggccatgtttctgtgaggaattggttttacaaacaaaaatttttgaaatttgttttaagcacttggaaaaggaagacacagttcttggaatgcacactctccgcctcgaaaaagccctcctcgccaatgcgcacgtcgtaaccgctaatcaatgcaaccgtctcacgaaattcgcgcagcagctccgcattaactgaaaaaattaaataaaacttgtttatttaacaaaaagaaattgaaagaaaaattttaaaaaaatatttcctcccaggccgggaatcgaacccgggtctcgcacgtgacaggcgcggatactaaccactatactacctgggacacatatcaagggtcttttatttcccttacaactcatctttttttttataagattcttttcacaatttacatttacaattcgtttgaactaactttttggtggacaaaaaccttaatatattgagaagagatttggccccaattttccgctaaatacccaaccattttccgtctgatccagccgatctttgagcgcacgaatttgaacacgtaaattgtgaacatggccatcgtccgagtcctccgtctcctctccgaattcgtctcccaccggcgtttcatctgccgctaattcatcaccaacggaattgtcctgaaaaaacgagacacattgttaaaatgggaaaaacaaattttcaaatggcgcgtcaaagccaaataaagcataaaaaattttctaaattgcaaacgaaaatattccatgagtctcaacccaatgaaatacgcacacactaaaaaatactaaaacctgttcaagtataaaaccactgaccaatttgcgtcgtttcaacggattcggagcagaagcgccagttgaagcagacgcagcagcagcagccacctcgcggatgaccagctcatcccgcgcttcgtccaacggattggcggtggcgaagcgcaaaatgcgagttgtgtctgacccggtgggctcctcctaaagccggggaaaattcacaaaacacacaaacagttttttgcatattttttctcacatatttttgcaatttgttgcgcagttcgccaagctccgcgtcgtatttgcgcttgaacagttgcgcaattcgtcgcgactcgccgacggttggcgcgtcgcgtggttgctgctgcgagtccaacagtttcagtttggtctccagctctttgttcctggaatttttcacgatgacttagaattgttaagaggaagttggaggaaatgaccgcagaattgaatccggataaaatgttacctctaattttttcgtttaggatttttgcttttctctccatggtggggtgcattcttaaatcggaaatgttgttttcttattttttacagttggaaggttatttctaggaaagaaaaaaatgtttttttaaaatttctttgaaaattataaaagcgaaaaaaattcttatttactcggaaaaactagaaaactaaaaaattgtgaaacgacgggaggggggaggtgacgaactgctgctccccaatggtgtgcccctataagcctcaaccaaaaagcaccgacttttcgcgcaattggccggcactgcgcaccaactcctccaaaccgttgcgtgagatggaaccgccgccaaacaaacacttcagctcctcatggtcacgctgaaaaggaaagggacgcgatgatgaacaacttaggcttttttgacaatgagcgtgaacactcacaatgagttgcgcattttgtctccgcaaaatgtccgtctgcgtttgcaggtcgaccttttgttcctccaacagttccacgtgcttggcacgttcgctgcaatttgaaaaatttaagtttttaaattatgaaaatttatagtttgtttatgttttaggttcttccggtaaattctatttgaaaattctggccctaaatttcctgggagtgattccattttcgacgattgttcttatttttggcattttccatcaatccatgaaccaccacaacacctcagaatgatcagttgttcgtgctgctttgagcattggatttccagccgttcaatgtccctctcgtagtcaatcatgcgcaattcttgcgccgtcatcccctccgtcttggagccgtccatgtcgttgttcgcacccggcttggcgcaaaaactgctgtttaataacatttcgttgttgttagtgtcctccgtctgcgtttggaccgctaaagaaaaaaaaacaaaatttaaacttagaaatttaagaaaaatttagaaaaacttttatgaaaattcaagaaaaattattttttgaaattttcttataaaaatttagtaatcaaatttcggagggaggggggacaacctgtccctgttgtataaagatgagtaataataaagaaatcgagcacagcgataataggtaaattttggcatttcacaaaaaccaaaaaatcctgttaaattgagccccccccccctcgtcccggattaaatttgaatatttcaatttgcaggatctaataaactcactgtgaaatttgggtcgtacaacggtggcactaatgttctctacgtcttcgatggaaccaaaataattgccgatggttgagcctgaagccaact

SEQ ID NO: 2951 - DNA, 1021 bp, Heterodera glycines
  unsure (1)..(1021): unsure at all n locations
aaaacaaattntggtaatgctcaggcgataaaaaagaagatgagcttaaaactaaaaattgtttctgttttggtcacgcactttgctgctgttggcttgcccttctctggtggtggtgtctttcacggtcatcgccccctctgccgctgctttggttgtgcataaaacgaccaaaattgcgctgaaagcgtcgttcttctttctgtgcaaaaacacgcgaaacttcgggatcatcgttgtcaaatgaagccatttccaatagccaaatgtagagttatgccggtaataaagaagaaattctgtgaaacaatgttttttcctaagaaaaatcgaaaggaaactcaaaaataaatttatgaatatttaggtataactaaatataagtagaataggtaagttcccgaattgacgcattggtaaattgcgagatttagggttccgaactctgattttttttaatcacaccgtttcaaaaaacgagatgtgtaccaataaatagagagtgccagagaaaaatgcatctctcattttggcgtactatttttttgtctctgttattagagaaaaactgaatttacttcatcctgtttaactttttttctgcttgttaaatccgcttcaaattttgcatatcgatagagaaaaatattctgcatctaatgataggttaagttaatattaaaataggtcaaactcaaaagttataagataaacaaaattttaaagcctcataacttttctctggtacaccaaatcgcttagcatttgtttagaaaaagcttctcctcatcaagagctttcgaatgataccatgattgtccaagttggttggcaaatacctccaaaaataattcccaaaattcgtaattttttaatattttggacaaaaataaatgaaaatattcatgttgcacaacggactcgaaccaccaccctttgtcccttactatcttacaaaaaccactgagccacacatgcaaatcttttctggtacaggagctcatttctggaaaggtgtgta

SEQ ID NO: 2952 - DNA, 1378 bp, Heterodera glycines
aggatacgcaggaaaattgaaggactatgaaaatacggaagattcgatgaatgccccttagaatgcttcattctcaactaaacagaacaaatttggtatctaaaaaaagattttgaaaaggagaatctttttctaaacgaatgctaagcaatttgacatctcagaaaaaagttgtgatactttcaaattcttatcacgttataactcaagtcctaaactgctgttttcagcaaaaatgctaaaactattaatttctctattgattctaaatgtccaaagtgattttgtatccttataaccaaaattgttagcatttacgaatttgatgttttttgtgtgttagagatgtgaaaatagtacgccaacacgagaggaaaagaaatgcaaaaattttaatcactccataactttttagttaaccctttttttgctcttaaaaacccttacattttgttcctaatttctttctctatcgatgtgcaaaatttggtgtggatttaacaagtaggaaaaaagttaaacaggatgaagtaaatgttgttctttacaccattaaaatgaagagatagtacgccaaagtgagagaaataaagataaaaagtaaatgtgacagaacgccaattttttcccataattatccataaagatttattgtcgcttttttttcttttttaccgtccatggtctaccatggacagtgcaaatattcatggacagtaaaaaaatgatataaatattgcagtaaatctttattgttgctgtgaggtgatcagtttaaaattttatacaaatacatacaaaaaatgatcgggggggggggcaattacaatatggggcattatggcagtttatgggcacaccgacaacaattcaaatgatcgggggtattgacaattacaatatggggcattatgacagttatggaaacgctgacaacgcacacactcgcagatgatcatattctatcctgacgatccctccgtcatcggccggcccggcgacgtcagcagcagctcagccccgttgcatggtggagttcagtgcctgcacatagggtgttgagtgcgttcacgttgatgttcagctttgacgccttgttttgtgcctgactgaaaaaaagaaaaattgatttttattttttgaaatattaaagattaaaacccaccgacagtatcacctaactatatgtatagatattggtcgagcgtctggatgctctgatagctgaacagtgcactaccgcccggtagatgccgatctcacattacagcaggggattcgctgccaggtcgctgctgggcactccgcggaacggtccattgtcgccagtggaagtgttggacgcgcaaggggccctgtcgcatccgcggtgctccaa

SEQ ID NO: 2953 - DNA, 1774 bp, Heterodera glycines
  unsure (1)..(1774): unsure at all n locations
tgtgtgccgtgtggtctgatcccatgtggagcagccggtcaccggctccggctccgcatgcggctcgcgaagcggcgtctgtggtggggagggcggcggcggggccacgcactgttccacccttgcacgcttccgttcaggccctggttttttattatcatcagcaatttcttccggccaaacatgctccccccatcggtcttcctccccctggtcagcttcatcgggagccatttgcatgggctcttcctcctcttcctcctcgttcatcactgagctgtcgggtgatcccacgtcaccggcacaacagctccatccaaatgggcgagtgcgtatggattgcggcggcacttcatctgaaaaattgaaattgttgttgctgtgtgtgtgtgtgtgtgtgtgtggtaatctagttgctattctcccttttggttattctgttttcttttgtgactcaccaacacactctgctgcaccccgccgaagcacgcgcccctttgtgtacacgggccggtacacgcgggtggagcgacgcgtgaagatgtccgcctggcggttgcgcacaaaccgctggcatggcacagagatggtgcgctcctcctggccatcgcttccgtcagcagcatcagccgcgggacccctttgttgttgttgttgatggtgctgcctgaaaatcatcaaaaaatgtgtgtgtgtgtgtttgtgtgttcagagtgcctcagtgccccccccctcgacccaacaggggagtggtgtcatattatttacccgacgccaaagtggttgatgaccagctgccgcatgcgctcatactgcagctgctggtccgccgcatagttgagctcaaaggagcgcaccttgcgctccgccctcaggtcgccgcccgtgcacgcgtccacgtgttggaacccatagttctttgggccggcggcgaagaagtcgatgatgcgacggccgggcagctcccgcttcatgtcacccaacgcgttgccctcgcgcacaccttcagcgccacgctgcttcacgtacagcacactgtccgtgtcgcagtacagggatcggccgcccacccgtcggacctcctccaaccagtcgtacaggtacagccgggcatgggacgtcacaaaacatgcgacggccaagttgttgtgctccggcgcccgtgcgaacggctcccgcttgcgcaccacacagcggtccagctggtcgttgaggtgggtgaagctgaccacctcctgctccggacgcatgagcagctcgtggaagtcgcgtgcgctgttggtgtacaccacctcgtcgcgctccggacgctccgccattttgccccatagcgagttcagcaaatccttggccaactgacgcagacnctgggttgtgcccaatgttgtcgggccggagatggatgccctcctgctccgcaaattggcggatgtgctccgcgcgtgccgcttcgggtgtcacagccggccggccagccgctcgcctccgccttcagccgcaggaaggtgttcacgtattcggtgaacagcccgttgccattgtccggtgacgcccagcgctcgtagtgccacacctcatggacgctcagcacacggtagccgatggacagcgcgcgatttagctccacgtgcgtgtaggcagcggtccacgcacgctcatgctccgtgtgatgacagattcgttgctggcgcagctcggcgcaacgcgcgcacaggccgaagatgagacgtccacccgcctgggtgcggtagggcagcagcggctcgcgatcgcc

SEQ ID NO: 2954 - DNA, 2223 bp, Heterodera glycines
ggaggcagcccgcgccagaagaggaagccgcggagcgggttgtctcccgggcggccccatgtcagggcaggaggaggacaaagccctgctggaggtggagaagaagctgaaatgctgttttccaatatgggccaaagcagcagcagcagcaactacaaataccttcaaacgcatgggcgcccgcctgccacagctgctctccggtccacacgtgcggtgtgccgatggggaaggggcgcgccttcatgcagtacgggtacagagacaccttggagagagacaaatattttgataaaattcagatgaaaataatatcattcaaaaaacatacaatgtcaatgtacacaatctcttcgtcgggagcgcatttgtgcaacagccaaaagggctccacacggccgccgaacagagcatgcttgcgcaagtcgagcgggcccggcacatccacgcacctctccttgtacagctttcggaggcggatgttggtgcgcagagtgcgccggaactggcaatcccacaccgacagcacctccatcccgtgcagctcggcgagctcccaggcccgttgctgggtgcgcgcccacagcaactccgcgctgcgtccccccgccaacagcatgtgccgatcggggtagcactcccgacaaccttaattgagctcagaaattaaaacattattgtaagtgtgtgtgtgtgtgtgtgtgtgtgtgtgtgtgtgtgtgtgtgtgtgtgtgtgtgtgtgtgtgtgtgtgtgtgtgtgtgtgtgtgtgtgtgtcccaccgtgcatgtagcagccgttgaactcgatgcacaacggtcgcagtggtggatgacggtaggccacgcagtcgagccggaatccgtcatcgtcggcgccggcacagctgttggtgctgttgttgtcgcggcggcggcggtggtaggagcgcccgctgtcccccacaacagcttcgccgatggaccagcgggcagtgcgaagcgggtccaggtcgggccgtacggcggccagcagcgtgaagaagcgccgagactccaccgatgctcggcgtccgcgcaggaatccgccctccggcgtgtgcaccatcgtgttggggcggaggtggtgctggcggaacacagccatggccaggctggcaattgtggttgcggccagaaagggttccatgccgtccgcacactcccccaccagctcgcggaagcgcaggcaggcggtgcgcaaaattttcacatctaaatgcataaatgggtatagccgtatgtgtttgttgtgccccccccccccccccccgcccctaccattccaacagtagcggagcagctcgcggcggagcaaaaagggctggcgcccgggccggcgcagctcgtgtgcgtaccactccatgaaccgctcgcgttgctcggggcgcatcctgtccgggtcgtaggcagcaggtggtggcagcgtgccggccggcagctcaacatccaggttgcgcgcgtggatgtgatggtaggggaagaacggtttgtccggcaccccgcgcagcccaaacgtgcgcggcagggtggccagcgcacagtggaagtagttcagcgagtccttgcagatcagctcccgctggtgcgtgccgcgcaactccaacatgtacacgcgcaacccatgctgaaccgcctttcgcggccgctcaccccgacgctgcaactcctccagcaacagatggatgtcgtaacggccctaagcggacagagaaaagcagcataacaataaattatgaacgcatttgtaaagacatcaaagcttactccgttatgtgcaagcatcacggtgcgcacaccttttgggccggtgtggagcagaaagtcgacaaattgctccatcgcgccccgcccggtgcctggctccccgtcgcagaagaagcgcagccgacgcgggttcagcccgtccaacggcagttgttgttgtccgacgacaccgagctcatccgctccaatgtcgacgtcgctgtcgtcgaacagctgttcaccgatgcgtgagcaccagcgtcgacggttggcgccccgccacggcacgccgcactgacagcgcggtgctcggcgcaacggctcccgctccagctccaccccgtgcgcgatgcaccgctcacaaatcacttccgcacagaccagcaccggcacgtgcttcagcaacacagcgtggtcgaatgccgctggtgccgcctctccatcaccaatgccacccacgtc

SEQ ID NO: 2955 - DNA, 2146 bp, Heterodera glycines
gcaccaccaccaccaccgccaccgagcagaccaagcgccggtggcagggtccacgcactgacggtgcgccgcaaaacagtccgcattcgggaacacaaagcggcactgtgcacagaacagcccaccctgcggcgtgtctgcatcccggcgacatgggaagtgcagcgcatcatagcgcaaacacagcccacacacggcgcgacagcccaacggatgcgagcgtctgtggacgggccgctcgcactcgacacaatattgttttgcctagagggggcggttcgaattagaaactgcattgacatttgattttgactagagatgcatttctttttttactttgctttaatttgctttacagttcaattattttttaaccaatataataaatgatgagtttttaatttttttgaatttgcttctcatttatttttaaatgcagtttattcattgcgtttctttttgaatttaattattcaacatattatttactttcaatttatcgagttattgtttttcttagaattcatttttaaattaattttatgaagtgttgcagttcctgcttaattttctctttttcgacacttctttgcgccttttttaaatttcgtgcttatttttctttgcgttttatttaattctggtctaaatatatttatgttttatttgctttgcatttcttctttgcgttgagttatttttgaggtttaattaattaatcgtttcgttacagtttattgccttcatttttctctttttgcgtcagttctttgtgctttgtgattttttcctttttttacatttcatgcgtttttctttgcgttactttgcgttttatttatttctgaattaaatttttaatcttttatttatttgcatttcttctttgctttcagttatttttcagatttatttaattaatcgtttcgtagcagttcattgtcttaatttttctcttttgcgtcagttttttttattcttcatgcttttttcttttttaaatttcatgcgtttttccttgcgttactttgtgtttttgtttcgaattaaatgtatttcttttatttctttgtatttcttttttgagcaaagttattccaggtatttgctttattttcacatttttttgttagctctttgagattcgttattttttctttattttaatttttttatttgctttacgttgctttgcgtttcgtttctttgtaaaatattaaaatttttacccggaaaagttgttgagggcgctggatgtacccgtagtgggcattccgttgaagcagcaggcaaatgttgaagtgcgcccgattcggggccttccacagcacacgacaaccgtgctcccgctcgaagatgaccaggcgtgcttgctgcgcaccgagccgcgtgtcgagcgcgtgctggatttgttgcgcatccgccaccccgtagctgggccgatccagcggcagggtggcggattgcagcaactgacgggccgcctgttctccgccatgcccatgttgtgccagccaaaaggtgtgcagatgtgcggtcgcttgttggctgtcggcaccgtacaggtgctggaagcgccggtcagccaaccccagcacgacggcacgtgcaaggcaccacgcgtcatccgggttcaccaccggaaagaatgagcggcaccggacactgccccgcgcctctcgctcatccgctgcacaagcacccgcgcctgtgcggtaaaaattgtttttttttggatagttccaaaagcgggccaaacagctgcccccgtcccccccccccactgtcacccttccctccccttcctttgtaccgctattgcgctccagtggccacacagcgctgatgcggaacaaaacagtgccgccgaacaggtcgacgccgccggctgactgcgcggcgagccgctccaattctgcggccattgcttcggcggtgttctgctccggggcgcggtgcgggatgtggtagggcgaggcgaactgcggcggctggcacgacatggcaatgcgcagcgggcgcgggcgcccggccagcacacggtccagtagatgcgcaatgcattgtggcagcaacgtgtccgggcgccgcgcacccgcccatccatacggtgccacttcaactgcctcacaccgagtgtgcgact

SEQ ID NO: 2956 - DNA, 4305 bp, Heterodera glycines
caaatttggttgaattttatcaaaatttctggcactttttaataaattattttaccaatgttcttccctttgtcggttttggtttgtgcacatttgcatttccaatctccaccaatgttaaaagctctttttgcgcgatcgtaaccaacttcttggcaatttgtctggttacgtgatttctcatttttgcaagtttgccaatgataggcgtacttttccttttctgaatatagcaaattttcctctctttatccaattttatcttttttggggcgctggatttttttcttcggtcggcggaggccagtgctggtgcttctgtaatttttgtgcatataacaaaaggccgtctcctcgtaaaagctttcgcaatcattcgacataaagttcctctacatttcattagtaccttcggtgttatctgctcacccagcaagtatcttttcaagtccacgaacttctggaatccaacgtaggtgagaataccttatactatattatttcgaaggagtttgagcaaaaggcggaaacaggcaaagagcagtaagccaaaagctcgtcacaaatagtctcatcgccccaactcgcttcccttccactatgtcgaaaatttaggctactgtcaaatatatacacttacagaacacagtcacacctacacaaacacacacacacacacacacaccgctcagaatttgaaaatttgcttaacaattatttatgaaatgatgagtaaagattttttaaatatggcaacaaattttcaaagcaatgagaaaaatggcaaaggaaatgagtgaacaaatgtgaaatgtcttttaaaaaatcgctctcagtttccggcaccctcattctgttgtgttgcttcccccgtaatgaagtgccgtcggcagagaggacaaatactgcgttgagtcgcttcctgggcgaagcacttccgatgcaagaaatgttggcaggcgagacgaaccacggtgtccacgtctgagacgagccagttgtaacaaatacaacagctgatgttgttgttgccgtcgttgtccacctccacgctgcctttcactgacgatgggaggtgccgcatttgaaagccggtagatatgagccactctcggtctgccaccgagagtggctcatttccaatcatgatgatgtgcgccgctccaacttcatcttccagcgtcagcaattcgtcttggaaataccgggcatcgccacgttggagttgttgttgcggctcaacgccgagcggctccgtgtcgtcaattgtgatcacatctgccgcttcaacggcactggcactgcgcaactcgttcgggactccacgacgcaacaacgggtgggtgggagatgacgaagatgaagacggcacgtgccgacgaagacgactcagctgctgctgctggtggttctgctgtagttgctgacggcgggctcgctgacgaacacgcgtgttgcgctcatcgcgcgagacttgcgcatcaacgacgttcatgcgttgcacaatgctgtgcaggctgcgctgagcagtgatagagcaggcacgctgcggtggtggtgacgatcgacggctgggcggcacagcagccggagaaacgcagcgagaacgaagacggcggcgacgacacggacgcccaaccggtgtacacgggggtggacgtgttgtggacagccatgcctataagaaggacacaatttgttgttttttttcttaaaaatagtattgttaacacttttttgttacaacggcatgaccgcccacaacacgcccgcataaatgaataaaacaaaaaatgtgacgggaaattcatcacaacacaaaaaagaaactaacaaatcagtgtaacaatatttactcagagagagagaaaagacaaaatgtttattgttgtcataaatgcgagcgtgtgtatgtgcgtgagtgtgtaaaacaaaagagattttccgatcattgcatttcgtttcgtttcgtttctttgtttaatttccgctaaccgtttcgctcgtgccttcctcaacatccgcatctcgcgctccggcattggtcaaattggtcgctgccgccgccgtctcatcgggctcgccctcactttgtccatcatctgccgtcacaacgccggtgcctgtaataacgatttaaggaaattaaattattaattaaatccatctgatcagttcatattttgttgaactgacaattgcttttcactcactgttttgtccgtggatgtgctgattattggcaccgctgctgctgctgttgtgacgcaccacgttgctgagagtgttcatgcccggctgttgctgttccaccgcctcaacaatgattggtgtactgctgctggccaaatttgcgcctgagaatgtgagggaaaaatgaacacagttacaaaaaaacgttcgaaaaaatgcgaaaatgcaactcaccaatgtggccggatgccgagagcacgcggtgacgagactcgttgttgtagaggagagtgaacgggaagaatcccttggcgttcttcccctgctcccgaactttaagacgactgaattcgacgatctggtcgcactgaatgttgttggcaaggcgtggcatgcaatcctcccaacagtggacggccatttcctgttgggtgttgtgttggtcgaagatgaggcgcacgtcgaagccgttcagaccacccatcgtggtgaacggaccacacaacacgacaagcccaacaacacgccttaaaacaaaacggggccaatgtataaacaatattaccaaaagtgatcagaatttgagaacatacccaattagcatgtcgggttgccaatccaaaaggagccaagcggtatttgacatcccgttgtcagcacatggtgggagaatgtcggtaaagtcgggctgtgcagtaaccatgcgctgcatttgcctcgagtggacgcgctcaatcgcttcacgaatgtggggagggagggcctaaaaaatacacagaaaattaaaatttaatcactaaacacaaccatctcgacctccccccccccctctcacttcccccactaccgaaagtccgccaaatccttcagcagcactggcactcccgctacgcagcgtcgtgctcccaaaaatgccaccaccaccgaaagctgcagcagcagcacacccgctgttgacaaaagtgccggccttaaatcaaaaataaaatttctattaaccaaaatctctgttaaccattatctcggtaagcaaaacaaaaaatatgaccaaaacatctccaaaaacttacattggacgaaccagtccaaatcgtggtcgccaccgccgccggcacgccacgcatgcagctcactggctgcaaattctgctgttgatcaccgacgacaccacttccaccgcctgctgacagcttaagcggagcaaaagcaatttatgaatgggcattttcaaatgtccaacattactcaccccaaactgcatgtgtgccatggctaattgtccaccgtcgccgccaacaccaccaccgacgccatcactcggccttgcgaagccaacctggaatttaaaattaaaaaaattattattggaaaatgtgaaaattttccgaggcaaaagccatcggaaatccgccgaaaccatcccccccccaccagtgcatgaattaactcacattgctgtccaaaaaccgcgtcggcacaacacccgaagaagcagcagaagaagaagcagttgcactgttcgctgctgacacttgggcaacaccggcaccagcagcgcttgttgcaccgcgctgtaaaagcaacaaaagaaattattaagctcagattttgatcacatttgtgatcagtgaccccgaaaatcccgccttgaaaactcaaaaaaaaacttgccgatgtgtcgctgacgaactgctgtggcattggcgccaaaagcatgtccaaatcgagcgcggcaccgatgccgcctccgccgttgtttccgtacagcgggtgccgcacacttgaagtggctgtgccactttggttgctgctgccgccattgctcgtgctgtcttcacgtgcccgtttcctcccattgttcctctcctttaaaaagggagggcaattattatttgttaaaattgcggatttttatttaaacttgccggagcgtctccattggcactgcgacggcgcggattggtccctcggcgtcctcctcctcctcctgtcccggtgccatttgcatcgctttgttgttgttgctgctctccgttgaacattttgcgcagttttagctaaaattttaaaaaattaatatcaaataaaaatgggtgcacaatgggggggggg

SEQ ID NO: 2957 - DNA, 1718 bp, Heterodera glycines
  unsure (1)..(1718): unsure at all n locations
ttttcattgtttctttcggacttgatttggctatttcttttcttcattaaccatttgattacttaaattgtttccatttcattcacttaacttctgtccttccaaagtgccttcctttttttttacttaaattattttcaaaattcgaaaataaaactattttctgactggttatttatagttaattatgatctctattttttgaatattctactaaaaaatttttaacaaattcgaaattcagatttcttacgcatttgaaactccaaatgttttttactttaaaaataattttattgtcttttttctgaacaaatttgaatgataattagtagggatggtatttttagggtttagccttttttcctgagttaaatggaaaaaacccaaaatatggattataatatggaagaaaaaatcctaaaatgaacaaaagatttctcaaaacttgaggttaaattttcgaaattttaaatcattgaatttttatactaaaactgaaaaatcaatttaattcaagaaaaataaaaaatataaaaaattcatcgatgtcataaatttgttaatttgcgaaaaataattttttcattgagaaaaaataatttacattaattttgatcatgtaataatcttttatggtaaacgaaaaattttttatattttttaggagtgaattttcgaatgttcttatgacgatgaagaaaatatggatgaaaaataaagaaatattaacaaaaaaaaacatgaaataagggaaaattgaaaaatgcatcttaaaatcagtaggttaaaattatattactttatttttagttcggaataaatgtgcaaaaaaataataaggaaatccatacaaatcgggccttaataataataacaataaatgttataaataagataacataaatattattcaaagttcgtcctttttgtcaaatttgggcaacactttcggcacttttcgaatcattcggtccgccgaatccaattcttccgctgtcacaatgccatcgttgtcaaagtccaagatccaggccaagcccgggtcccgcactcgacccaatgtgcccgatgtgttctgaccggtgccggagtgattgcgatcagttcgagatgcatttaggcccgtatccgccgacttttttcgggacgaagtcatcgcggccaaatccctgcggaagactcggagaaactcgtccaattgcaccacaccgtcaccattcacatcaaaatacctaaaatgggagaaaacccaaccctttttgaatttttctttagaatttaaaaaattgttagaaaataaaaaatcgtggtctaaaattcgataaaaaaaagaaaagttatgagaattcaaaagttatgccaactaaattcgaagtatgataatatttatgatatgataaataattctaaaaataaatgataaaaaagatgatttggcgcaacaaataaattaataatataaatagatttgtccttgaattcaacggcatcattaggaaaaactttcgaattgaaattcgttttctcaagaatgtccttataattggataaaaaatggcattttggatgatcactttttttggcattttgcctatttttcactcacttcacataataccgaacgacgtgccccgtttcgatgtcttcgttgngccatcgcttgccgaattcgcgtcgcattttgtcaccgaatttggncaattccgccgcggtca

SEQ ID NO: 2958 - DNA, 2337 bp, Heterodera glycines
  unsure (1)..(2337): unsure at all n locations
atgctcgtcattcggaatgtttttccacactgaaaatggttntagttaaataaaaataataaatattaattaattattttaatatatttttgcctttgctcttcgcctttctgctcaaccgatagggaacctcaatttggcgcagttcaccggcacacattcccttcattgctttgtccaagccgggcattaccatgccgacgcctaactgaatgcgaatgccctcttcctttggcatccgtccgtaagtttgatcaaactttttgcccgtctccaggaagcctaaactgatcatggaccaaagcagcgatcggccaatttatcgaaaacaacgaaagacacaaaaaagggattgattaagctatttcaccccattgataatggaaaaaatctttaatttaaattttgaaaaataattataatttttgataattttaaaaattaatagtcggtcacccaactcacctttgtaatggaatgtcacaaagtccatccgccgcgcttttcgtgcgcattcgacgggtacccaagtttttttcaccttcgcttttaaaaagaaacatttttaaataattaccattaattgtttaattatattacacattgcattaatttcagtgtttaattgcccacttttatgtccaatggtcccccattggccgcttcttccaattcgcggatttgtgccgcgctcatcggcttcccctcgccgcgcacttcgatcaccggaatggcatcctccggcctccgtctgttggtcatttcgtctccgtcgcccagcggcagaattgggtcggaattagcaaaggcaaaagcttaaaaatacaaaaaaaaattctcgaaaacgaagtgccgttcgctcgccccgggctaatagccgctgatgagcggcgttcattgcgggtttttctggttttttcaaaatcataaacaaattgctcacctttaaatgtgagataaaaaagagccaaataacggaaaagcattttgtcgactgaattttaatttaaaattcttaatcgatgttcggattattgatttattttgcgatgaaaaaaacaaaatctgaaatttgttcgttttgtttgggcggagttttctgcttttctttgtgtgaagcaaataatgtgagcagaacgaatgtgaggaattggaggcattgagagggcattgaccttggagcggaagtgaaggaaagaatcgatttgggcatcggaatttcctcaattggaagtgatgggaaaagcaaataaaaattggcatttttttaattcatttatttaccgaaagatcaaaattaaacaaattatcagctaaaatttaagaaacggaaatttaagtgataaaattatataaaaaatcgcataatttttgctcatcgaatcatttaaatgggtcgaatttgttattgggttaagtttgaaaattctagagggaatggtgatccgcggtgccgataaactgggggaaatggaatttttaaaggaatttgttgagaaaaataatcaaagtttgcagaacgcgatcgcggtttcaaattgccgcggaggcgaagtcgccggcttttcactcagcttttcaccacaccaatgaatgacttcccctgactgattggagtacgatggatacattaaaacgatgaagaaaaaataacacatatcagaagtatatgaaaaaagtcctcaaggttttccattgatcagtacagtactcttccgatcatcaacaacagtgccaatgggatactgtagcggaacagtgacgtcattgtcccaccgacggcgggggacagtgccgagttgcagccatcgccgtagcagcagcaaaaagtgctggctgtgttgttgatgcaaatggcaccagaactcgtcgcctgctgattgtacgccatctttgggagggggggggaatctttgatcaaatcgaatgttttctttagagtttgtcataagattccgtttttcaaattatttcaaattggcatgactacgactatcagcagatcactttccatttgatattgccatcacttcctttccgatcactttttctcacctgtccctgagtggcttgtacggtgcaatttgtagccaagcatgaacgtgtcacttggccactgttgaagtccaccgttttgacgcatgccaacgaaacgccaacgcattgagtggccgaaccgctcaccggcgcgctgagattggccaagccttggtaacagctgagcccatcggaagaatgaaagcggagaaaaaggcgacacaaagcaaaggaaaagtgaatttgcgaaaacgaagaacgatttgacgacgattgaagaatggcattggattaaaatga

SEQ ID NO: 2959 - DNA, 1554 bp, Heterodera glycines
  unsure (1)..(1554): unsure at all n locations
ttcaacgctttattaaaatgacaaatgaatataaacagcttcctaaatattcaaaaaaagaatgggagaaaaattatgccgatatttgtaagaaaattggagtcagccgagacataattaacaaatggaagaaacaatttggaattcgctgtaaaataacggagaaggaaaaaatggaaaaaatgaaaatttattgggaaataaaaaaagaaaatccaaaaatgaatgacaaagaaattgctaaaattgtgaacacttcaaatgcgaatatttgtaattggaagaaacaatttggagaagaaatgtttgagaattgaaaacggatgattttttaagaaattgctttgagtccctccccgatcaccaccttcaaaaattggaattttttcaacaaatatcggaaataaagaaaaaccgaatttatttgtaaaagaaaattttattcattatatatatatataagtagcgcggccgtgcgcggtggtcgtgctggcgttgggaattggaattcggaatggggagggaaagggaaaagtgccacatattcccgaaggatgggtccacggggtgatcaagcccgggattgccttcccacactcgctggtcacacaataagtggctttattctcgggacgactgagctccgttcgcttgaaaaggcaaacgttaaatacaagtgaaaagtgaaatgtcatcgatcaattatcgctgggagggcagtacaattagtaaaaagggaaattaaatgcaaaaagaaataaatgtgaaaataatgaaatcctagagcttcggcagttaaacgagtaaaaacccgacaatttcgattctctcttacacctccaaccttaccaaagaccgtccccggtctcttaccaggatttcacttcacaattgccaaagcaaaaaaattatttcaaaaaaataataattttgctaattttcatgcccttttcccaattttgaatcaaaattttatgcttcgtgccactcactcccaaccttacattggatcgtccctgatccagttcaagactcaggcatcactggcaaagtgcccagccatcaacctttgtctgcgagaactgatcaggacttttttcagatgccaaacaactgacggcatttgaccaactgatgaaaggagtttggcttcgtccgaatgaaagcattgatcagcttggcgaacgtgtttagcacttggtccgttgtgcttaccctggtctcacggaacagctatacgacgaatattcggccatgcatttcattagggcactccctaactcagaattggcaatgactttggagatgactcgtaaacctggtgcaacattcgatgagttcatcgcacaagcagcacgagccgaggcagttcaaaatgccgcacgaaattcttggcgaaacagccaaaacaacggctgtttccaaaaccaacgaaggcatattgtttgctataattgcggncaagtcggacacacttctcgnaattgctattcacagccgacacatcaggcgcaccagggacatccnagcagcaatttccattcatcaccatca

SEQ ID NO: 2960 - DNA, 1455 bp, Heterodera glycines
ggaaatttgtttgtcggagccgtaaattttgagcacttatcagaaattgagaaattcttttcgaaaacaacgaatgattcggaaaaaggcggctttttggaagaaagctcggcgattggtaaaattttggcggccaaagtttcggtatatggacgtaagttgaatgccatgctggacggcggatcccaaatttctccaatttcggccaaattcttctcacaaatcatggataaagtaagccaaaagaacgtcatcgcccgctctgaaagccgcattatcgatataagcggaacggaagtgaagtgttacggtgttgtttgtcttcccattcggcgtgaagcattagagacgaagatcaatttattcgtcgcgcaatcagcttttggctacgatttgcttttcggcacgaatgccttaaaacaattaggcttcaaaatgatcgacgaggttagcaaccaaatcgtagacttctcacccgcttcaatgctcgagaattctccaatgatcgttttcaaaacatttgttattgatggccaaaacttggacaaaacaccgggaaattttggagggaagagaaaggacgcgtcggagcctaaaaatggcactgggaccaagaaatgtaataaaggacggcgacaagaaaagcagtcagagacagagaagtcatcagttcgaaatgccggtgaaagaaggcccctattgaccaaaacattcgtgccccaactaaaaaccaaggaaattccgatcaaaaattctgaaaattttggagaaagtgcggcaaacaaacagcgattgaattcggttcaaatgaaagtgggcgtgccaaacgaaagcgaagaagagtatttggagaaggaaaaattatggtcaaattcagttagggacaactgaaaatttgggtagggggaaggtgagcccaaaaatgcttcgtcggcaaatgggaggttggatctatgcgatcgccgccctgactcttggtcccaatcgtccttccatcgaggcgagactgacgtcaaatttggccaaagaattttttgtcgcggaagaaagcgccgaaaagaacccgaccgtggaatgttcaaagacggatgctggcacaggcttaactcgcccaccacctatcggatgccgaatgagcataaaaggcaggggacgcctttttcttggagggtcgggatgtgttagtatttgatttttggcgtttaaatttattttaatatattgtcccttcataattttgtcttattgtctgtctattactctctatgtaatcgatattttgccatccctttccagcagaaaatgttccctcgtcttcgcttcaattcattctgttggcagtgcactttttatattattttgttttattttcctcggactcttcttccatttttattgttgctgattttaaataaaagtgaattgtccccgtctggaaatattgttgagggaaag

SEQ ID NO: 2961 - DNA, 4893 bp, Heterodera glycines
  unsure (1)..(4893): unsure at all n locations
ttttatgttgctgatttaaataaaagtgaatgtccgcgtcttggaaatattgtgagggacagcagtgaataggctccgaccccaaaccagcataagttttgcacgacaactataaattaaaaaataagaatgccgtcaatttttaacgggtatttggccggatgaattttaaaaattttaattaatttatttaaagtaaatttatcataagccttttattcgctttcatttaagcaaaagtcaaaaattaaaaaaaataaataaatcaaaaactaatatagtttaataataaaaaaaaaatctaaattaaatttaacttcattattttcaattaattcaacaattctctttaattcaaatgaccgaattttatggtacaccaaaattaataattcttaatttgaagccagaagaatttaataattaaactttaattcaaaataattgtaagaaaatatgaaaaaatgtctatttttgagaaaaattcagggaaatgggaaaaggaaaaaaacgggaacggattccctcgtttgcacatgggaatctcattcccggtgggctagaaaagaaagaatcaaagcggactcttaacaaatcaccatttgtacactctgttcatgtatttggaatgtccgtttttttcgaacgccaatttaattatcactttcaattggttgatttggtaagtaattaaaaaattaagccgataaaagacaataaaagttataaattttagctctgctgttcgaaaagtgattaaacagtctcaaattgctctcaaattttcgatattttttgaacctgtgccagataacccgaggctggcattgataaatttatttatgtttgtgacgaaaatatgacaaatttttcctgaaaatttcagtaacaaaccaatcccaactaattaattaatatttgtcaatttcgtttcacaatctgttgcttgccacaatctgtcaatgatttcgtcttcaatgagttcctttctttcttatgagattattgaattattaaatggttttttaccattttttggcaaattaatgcataaaatgagattctatgattatatccaatgaaacaaatgacataataattaatcataataatgatgtcattcggaaatttttctcattttgtgtaaaagaatgatgtcagtaagaaaaataattcatattttatataaatgaaaaaatacactaaaaaataataattataattctaaggctttttctcataattattatttttctttttttagtttaaatggctttcggtttcgttaattccatttggctttttcttctattaattttttgtattgaatcattcgccgatcagacttcttggaatggatcaaatcaaaatcaaaaaataactggaaatttggcactatttgccaacgaagacgaagttgatccgccgttgtcgtctgatcgaacaattaccgacccaattaaagcaattaaaacatcccaaggaacggcaaaccgaacagacgataaggcaaaaaattggccaaaaggaaagattatgcattttttattttagcagttgaattttggaacaagaagcaccccaatgaccgtccctctggttgggaacggtgctaaaaatggccaacattttggcacaaaaaaagcgccatcgcaaagactccgctccattttctcatgggtctcaaagttcaatcaaaatggtcacattatgaagctctaccaaaagttgaagaacacccccgggggatggggccaactcatccgcaaaatgtacgctgaaatgctttcggcaaagaaactcggagctggcaacagcaaaccgttacgcgagaactgtcataaagccctccaactgattggagagggacgagcagttcaacgcgtcgatgttcagaagataaaaccgttccacgacttttggacccttttgaaaaattcggcactttcgctggtgacactttttaagggcactttaaaaacgaaaaatggaagagaaagtgaccgtaaaatgaagagagaaaacattttacgagcattgaaaacattttccacagaggacaactcatttttcttgcgaatggtccgaaaaaatggaaaaacgaacgaaagtaagcaaaataaatactttatttatcagggattttaaaaaatgaactacttggtagagtgattgttaaatgtttttcaaatttaagcacacaaagaccaaaaacgacgacggcaaaaacgattggcccctttgattatttttggcataatcatcggaggactgttggtgatcgcgtttttaagtgaatgggtaaaagctggtttttaaattcgaaaagacataaaattctgcctttttttcgagttgtgctattgcataaagattttaattttggttcaattagcgacaaattttgaagttaattcctaattgctttttttcattgtgttggacaacacagggaaagactaaccgtttgtttttacgttcattcttattttaatttattttctattaatcctttcgttcgaaaaggtcgtaaaccgataaatgcggactttttgataaataaatatttatgaattttttatttattaattatgcatttattttttggatacaaattaagccctaagaaaatggattaacttggatattaatttttatacaagtaaatgagtgaatgaatacacataataaaaagtgagtgaattatttcaaaacattaaccaattcgccagttaaatttatgctttcatcaatttctcccttttgccgacatttccgcgcgcccttttcgtgttccgattcgtgccatggcgcgcgctttagccgcggctttacgcggaaagccgcacattgccggtggcattcgcagcagctgagccgccgggagggcaacagcaggcgaataagtgggcataaggccaggaaaagcggctgccggtgcaaaagcgggcacagcggcggcggctgtcaggccgggaaaagcagcggctggcataatgcctaaacattggaaaaagccaagaattagcattaaaatagctaaaaaagaccagggaatgccgcagatggggcatatgcggggaccgccgctgccggcataaagccagcgggggagcgcagaatgggcggaggcggtggagcagccaaaaagggctcaaaaaggttggcaacgatttttgaaagcaaatctaaaaattcaccaaagactgtgcgacaggtgcacacccaaacggtagaatagccggaggcgatgccattatggcgggcggtgggggcggaggcggcaagggaggcggacccgcaggtgcagaagcgaagtaacggccgggtgggaggcaatcatactgtacaacataaatacggtagggataaacggtaggcaattaaaatgcgcaattaataccatgaattgcgacctgacagcactgaacccgagcaacagaaatgggctgaattggggaaaatatgcacaagtttttaaaacaaaattattctaattgatttgaattggggtacaaaagcacggaaacgtcagggaatctcccgaagaatcgacctttgatttgctgacacaaatttaattcactattttcaatcccaattggagaggggttagtcgagattaatttgcattggcaagaacagttatataccctaattaagcaatttaaattaaaaatctatttaataaattattattattaattcagattttatggcaaaaggctgggaaagtcgcgaaaaagctgctagcaaaatattaataaaaagttgttaaaaacaaagattttttttactctaatttttgtgaataaattttagtaaacaacttttgattttttcttaaatttatatttatttattttgtgaatttctctttttctcctttaaaaaattctttggcaaaaaatttcaggccataggaaaattgggttaagataaagaaaaacaaaaaacacacatacccaaaagcaagaagcattgtccatcccattttatcagttaagcaaaagaatttataacaatgattaatgattaataattaataattctaaaatgataaaagtcaattattgtcacagcatttatcacaaaataatggcaataataatattaatgattgacaacaaagacaacttcttaaaaaatgtgtgtgtacacatttgcatttgcattgtcaacaaagttttggggacttggccaactcggccaattccctccgtccgtccgtcgatcggtgggtggtgacaatttgcaattcgtcagtccgtcggtcgggaaaaaattgtcgacgggcgacaaacagaacagacaactgaaaaatacacaaaagtggggaaacttaaagtaaaataagtttaaatttattttttgaccagagaatagagatgtggtggcaagaaatacaattattaaatttttgaataataaaaaaaagcaattagaacaaagcaataaaattattttctttaataaaattaaaacaaaaagaaaaacagatatcatgacaataataaataaatcatcacaaaaaaaaaatttttttttaatttattttgaaaattgtcgttcatacaataaaatgaaaataaaaataaaacacgttgactttctgatctaattatatagatattgataaaagagaaattaactaatttaattaaaatatttatggattttaatttactataaatatgataaaaatgaaaatagacaagcatttctaatttggaaaaggagtgaatattacgttatggggtattcatttcaataatatgaaataaaaatggataaaatacataatatctaaaaacattttcgagaaatcaaaaatcgaataanatatttgattacccagatataaaaaaattcaatacatccattattaggggg

SEQ ID NO: 2962 - DNA, 1324 bp, Heterodera glycines
  unsure (1)..(1324): unsure at all n locations
ggggggggggggggggaggaaaacctgcttagaacaattaaaaatatattcaaaccatttcgaaattccgatgnatatcaaatttatagatttggccgataaaagaaaaaagttatgacttttttaactttgccagacgcaaatcagtgggaaaattgttaatttttaaaagtaattttggcttcgatgatacacagaattacgttgcattgtaatattttgttaaacttgataaattgcattatttatttttttatttgtctatttcttgaaaaatccaggaacagagagaccataaaacggactttttcatccagcaccttttagattttcttaatttgcccgtccttgactgcaaattgggcatttattttgaaaggaaaaagtcacataaagaaagaatcatctcgatcattaaaatgccgatttttaaacgcattcttaattattattattattttaaagtaaattaaaaataattctacggattttccaaagcatccattttgtgtgtagcagcactgctcccaatttgttcatctgctgctgtttccggtgttcgtccgccaaatgaaatgttttgcaacggcggaaaaatgtctctggggaagtagtcaaagggaatgtcgaaagtccttaaatttctttcattttgaaattaaaaaaaatatccgatggaaaaatgccgtactcccaacgtctcgaatcaaatttaaattttcgaccaattcacctgttcttcgccatttccgcttcttcttgcgtgtcgtttgtagtcaagagcgagatgttcttcagagcggacaaatattccggatgaccacccgctgccgtgaagcgcagcgggaaaaggagaaggattagcagaagaatgcaattagcaatgggaagcataattatggctaaaatctatttaaatcaaaaaacttatcaaaaagaaacaggataaattaattgagagattttttgtgaaaatgcataaaaatggacaaaatttgtagtggttaaaaatgatgaatttgtttaaaaaaagtgtccgtcccttctctaatgatcggatagcagctgaatgattttcattttcccaacacaatttgtcataattaatatgcattttgattattcaccataccatcaatttactcaatctttccaaaagatcgggtttttcactgaaattaatgattaaaaaaggattcatttttaaaattgttataatttgttttatgcttgttggcaaaattttattcaactcgagaccttgagaccaaattgagccgaaaacgaggcaattaggacaattcttaaaaaatctatttcttca

SEQ ID NO: 2963 - DNA, 6587 bp, Heterodera glycines
tgcctcggcctgggcctccaatttttttggcagggcgcctccccggcttggagtgaaccaggggtcaaaccaatacttcatggaaaacatggttggccccactcggcggcctttcccctttttgcacggggaacccctggtcactttgagtgaccgcagttcgaggtgtgtcaatgagagacaccctttcttgcgtagccaagattggcttcgctccggctttcgagggcctgcctctttttttacttccaatggaagacgccggcgtgcttatttgtaaagcacttaagcttggggtggtggtacctcggagagatgccgatgcctctccattcccatctgcactcccgtctgagacgggtgagttatcccgactgacagatcgctctgcctgtcgccgatacacatctttcatcttctttctcaaattcttttgttttgaaggcatctgaaacaacaaatcagaaagtgttgcaaatgtggcacaaagtatgaggaaaataaccatatgatgcacataaaataaaaatatttatttaaaattgcgcaaaaaggttattctgtcatcattcttcgccgtggagtgtagtcgtcctgtgctgaaatccatcagccagggctcacacatctcaataagaatgcagatgcaaaagttggtgcgatacattccccgaagcgacgtcagcgaactacagtggtgcgacaaatgccccgaagggactgtcagcgaaccacattggtgcgacaatgccccgaagggcctgtctgcgaaccacattgatgcgacaatgccccgaagggcctgtcagcgaaccacattagtgcgaccaagccccgaagggccagtcagcgaaccaattttattgccctttgttcgcgccaatccctaaatggccaggggcagggaactccgaacaacagacgcgttgctgatgaacagaggacaatcccaccgtagccaaccttctgtttggaaaaagggaacttcgaacaattagcactgctaattaatcaaaggacaatcctcttttacaaacagttagctgggatacaaggccagaaaatggcgttcccattaggcggcccagccacatgcattgcaaaggcgaaagcaagtctgggctttattccatatcatggtcgcaaagctgaccgatatgggtgccatggtcgcgaagcagaccggcactgtgtcatggtcgcaaagcagaccgacactgatggctatggtcgcaaagcagaccagcctagccatggtcgtcctttaagggactggccattgaaccacaatcctcaaaaggcagtccacatttatttgatgaactcagatttcctacgttacttctcaccagtccactggtcttgacaaagtgcgggaccagcttcgcaccggctgttggccagcaacgataaggaattcatggcgccaccattgagcggcccagccacatgcatctctaggcgagagcaagtctgggcttgctttccatatcatggtcgcaaagcagaccgatatgggtgccatggtcgcgaagcagaccggcactgtgtcatggtcgcaaagcagaccgacacggttggctatggtcgcaacgcagaccagcctcgccatggtcgcaaagcagaccggcgtgtacactaatatcatggtcgctaagcagaccgatatttgccatggtcgcgaagcagaccggcatgtgcacaatcttatcatggtcgcaaagcagaccgataagattttgatacaaataaaaaatgtgaatctcaaaatgaataagaggacagaagcctttacaagtgattgttcaaatatttgaaatgtttacttaaatattaatcaagagtaaaggcttcttaaaaactattgtggagcttatgcgtgccaaagtgtacgaaacttatttcctaagtaacctcagatttgggttactaaaactatttacttagtgtacactttgccataatttaatatatatgtgcatctgaaaattttttcttattttattcaaatcatggtcaaatcgatgaattttaaaaattttaatcggccaaatacagcagtttcctgagagaatttttttaatctcacaaaaaatttgcgggatggaaacagcatcaccacaacaatgttgagatttcaaaaattcacaataattgattttcataggtttgaaaatacaaattttgaaaatttcaatttttaattgccgaatgcaatcaaaaaatttagagcataaaaaatatttgaccggttaatttgtgaaaaaaaacttgcgcagcaatccgcttttgccaccgaaatatttgtccaccagcgaatcgaaaccgagcgaaagcagtgctaatttgaggccaagttgagcaatgccaaaaaagggaaagactcctaaaatccaaaaaaattttaaaaaatgattaacaaaaaacataaaaaaaatttggtacttttaaatgaaaaaagtaaaaatatatttgtctttctggctttatgggggttttcaggtttctgctaattgtaatttttttttcttaaataatttatgattttgctacagaaacttttcaaaattctgtgattttagagaccaattttaaattcataaggttcaattttttggggtgttaccgtttttattgcatttcaaatttcaaaaattacataagcaaaaagccctaagaaaacccgacactctaataaaaaaatcaaaaacaattatgaattttggaaaaaataataattttcagccattttttgaaaccaagaaaggtttggggctcctaaattccattaaaacactattagtttaagtaaccaaaaaatcaatcacttttacaaaacaaagtaaaaacaaaaaacttatcgaaatttgaaaaaattcgcgtttaccattgaaatgtttgtccaccagcaaatcgaaacggggcaaaaaaaatttggaaaatttttatttttagagcaattttgaaatggaggcctccgttttgggcacaaactccttaaaaagcattcaataaccctaaaaaaacttgccgaaatccgttttgccaccgaaatgtttgtccaccagcgaatcgaaacggggcgaaatcaatgccaatttgaggccaagttgagcatggtcaaaacagggcaaaacgtccatcgaaacttcgtggcacacccagctgaaattgtgaaagaataactttagtaaataagtaaatttgcgcttagaaaagtggcttaatttggcaaaagcaaccctgaaacataaatcaaattgtaaaattactcaaaaaatttgatttttctcttaatttcaaacaaaaatgttacaatttattaaattgctcaatctatcaaataattttaagcatataaaatcacaataaggtgcttaattgagtaaaatgagtgcgaaaatctaaatttaaaattgcaaatttcccaaaaaaaatttttctgatttaaaaaaatattttcgtttttatttacgatgctctgaaacataaggaaaatagaaaattcctcaaaaaaatttcacttttttttaagtgccaaccaaaaattgtagagcttaatggtcaacattgcattgcgcaactcggtcaaaatggactaaataatggtgacaaaaatgggagtcaagttaatttctcaaaaatgtgtttaagaatttccaatttttattaaattttttttatgcaaaacaaaagggtcccccccccctatggtttttgacaaaattcaaaatccaaagtctaaaagagtatctttctgaaatttttttcacttttttccaattattaaatagcgtgaaacgcgtaccatcttttaaaaaaataaattctgcgtcaaaatccctgtcctgtatatactcacctcctcaagcagttcctcgaaagggttgtggtccaaccgaagtgtgccgagttgctggagccgtgaaattcgatttgtcaaccgtacaagacgatttgaagcaagatttaggctgacaattgaccctgaagagcatcggagaacatttcctgacaatttgaaatctgtttagcactggagcagtacaaaaaactgccaagaaaatttttaagaaattttttaaaaaccctaaagcaaaaaaatttcacagtgattttttaacattaatgctgaattacaagttttttcaagaatttaaaaaaaacgctaaaattttttccagaaattaaaaaaaaattctcaccggcaaatgctcaaattcgttaggctcaagtccaatgtgtttagctgttccagccttgaaattgcacaaaattggcgccaattgcgttctgtgcaccattcgtccgagcccaatttgttggcagcaaatgaaagttgttgcaaacggcgcatgccaaaccaacggatgtccacggcacgaaaatcaatcccgacaatgtcgaggcgttggagataggtcgatgaggctgtaaaagcacatacctataattaatgaaatctggccataaatttggggaagggtgggagggaaatgcattagtagcaaatttcgttaaaactgtattcaaaaaatgaatgcttatatttagtatgagctgaaataagttctttttctatttttcgccttgcctagtaattttgaaaaattatagcaagaaaaaatgggtgcaccccaaaatttcgccaccaaatttcgccgccataatttcgccggctgaaatttttaaatgctttttcatttcgtaaactaatactgtaccactattcgaactaaaaaggcaaaaaaatttaagctttgcctataattttaaaaattataccggaaaagttaagaattgttaaattttttgatcaaaaatggtcaattttttgaattataaacgttaattgagggttattgctagaaaatttccaaaaatttttaagtcgctatttatacatcgaattgcttaaaatttgctttgactccttcccacgcgccttcaagtgataagcaagattgttaccggtacttttgcagtttggggggggggggggtgggtagcattttaaattaaaaaaaatttatccatttttttaaatttcgtcaaatctgtcggtatctcatttttccatctgcagaaaaattttgttaataaaaggtttgagaattgcaagatttatcccagcactttgaaaagccaagaaaaattattcatttatttaattagaaaatcggtaatctcagcccaaaaaagcgccaacaaactttgcctagttttcccaaagctgcgatcagatcggctcattcggtggtcgactcgaacgacttgagcgctttgtccacggcggacgcgtaggcgtagtatttggtgctgttttggtgcgaagagaaagtccgagcagaaaattggtgctggtcgaagcctcggaattatgtgcttaaatattgaaaattaaattggaaaatagggaaaattggggaggaaaacttaggtcgcccatttcgaagaaagtcggttttgttcctcccccaatttacgcgttcggtccgtcgttcgtccgaccgaggacgacaaatgggcgacagaaagcgacggattggcgagaattgagcattcgttggttggtggcgggacggaggaggaggagggaaagttggggtcaactgaagaagaaagtgcttttcttcaaacattcatgagaaagttgtttaattcggccttgaaaataccgtcttgcatagctttacgcttcttcgttatcgcttgctgttgtgccattttttagcgtctttaattattaaaccgcaaattgttgagtaaagagaaacaaatctgcaatattttatggcaaattataaaaatttaaactcataaaataattaaaaaggagcttgaccaaaattttaatggaaatccaataataaacactcttatgatgtaaaacaatatttacttcgttctgtgtaaattttctttctatttgttaaatcaataccaatttttgcatatcgatagaaaaaaaattgcatcgattaatgctgaattatttttgtctatggtcaaactcaaaagttacataacaaaacataaattatttctttcctctccttttggcgtactatcttcatgtctctaacacataaaaaaatacaaatttcgcaaattctaacaattcttttttataagggtacaaaatcagtacaaagatgattagaacaggtagaaaagtgattagaagaggtgtaacaatgattagaaaggtaaaacagtgattaaaaagggtacactcatggttttaaaattaaataatcaaggaaatagtttattaaaagtaagaataaaaattgaatgcaattaattataaatttaaaaaataaaataaattattccttttattaattaaaatgagaatttgaaatgtacatgaattgtatatatatttaaattgaaattaattttttgacaaattctaattaaaaaacaaatgacttctttaatttaaaaagaaataaataatcaattttaaatgtcaaatttaaatttgttggttcagatgggcgcttcgcgcccgttttttaaattttttttggttcagatgggcgcttttacacccgttttttaaattttttgaactcata

SEQ ID NO: 2964 - DNA, 2479 bp, Heterodera glycines
  unsure (1)..(2479): unsure at all n locations
ttttaggctagctcgaaaaatttgaaaattttcgaaattttaaaattggaaaaatcgggcttttaaagctctacaataagtctgctggccaccctgcgctcaggtcanagcctaatgagttattcaacggggactgaactggacaaatttggtactgaaaagttctagaagcacccagcccagggggttagagatagaggcctggaattttttttaatttttagccaacatttcaacttagggccctcacagcgggaattttttgatccgagttttagaaaaaaagttatgggctaacaaacgcaagaaaaagtgagaaatcggtccccgggactcagtcgtccgcgcagaatttttttctatagttttcccgaattctcctcaaaaagttgtaagacccttccaccactttcagggcgctcccggccttcggccgggagattttgttttttgaaacgaaactccttgtcaatataacatatatagtaactagcgggtgcgtgaaccgtcggctatttagctgggaaaaagcgcttcgcgctttgggagcttcgctacctagactgttacggggaaagaggtacaaccacgggtgggaaggtacaattgtgatcagaagagttacaactacggttttttcagggatttttaggccgcttcgcggcctcgaacgggcgctttgcgcccgtttttaaatttagttgggccttttcggccgcttcgcggcctcagacgtgcgcttcgcgcccgttacaacggtgttagaagaggttcaatagtgatcagaagaggtacaacagtgatcagaagattacaactttgataaaaagggtacaccagtgattagaagaggtacaagtgattagaagaggtacaaaagtgattataagaggtacaaattagaagaggtacaacagagattagaagaggtacaaatttgatgaagaggtacaaaagtgattagaagaggtacaaaagtgatagaagaggtgaaacagtgattagaagaggtgcaacaatgattagaagaggtacaacagagattagaagaggtacaaatttgatgaagaggtacaaaagtgattagaagaggtacaaaagtgatagaagaggtgaaacagtgattagaagaggtgcaacaatgattagaagaggtacaacagagattagaagaggtacaacagagattagaagaggtacaaatttgatgaagaggtgcaacaatgattagaagaggtacaacagagattagaagaggtgaaacagtgattagaagaggtgcaacaatgattagaagaggtacaacagagattggaagaggtacaaagattgtaggaatggtacaataatagtttaaaagggtaaaatcatggtttaaaaattaaataaataagtaaatggttttataaaaaaatataattaaaaattgaatgtgttaataatttttaataattataaaataaattccttctttaatttaaaaataaataagaaattaattttatattaaaacatttattcatcaaaaaataatttaatataaattaaacaaacaatattaaattaattaaaataaataaataattaattttaaaacaaaacatttatttataaaaaaaatttaattcaaataagaaaatttaatttattttaataaaataaaaaatattttcaattaattaaaatatgtaaaaacagcaaaaaatacaaagaaaataatttacaccgtccggactcgaacttcgccccccccccccaaaaaaagatgcctcagaatccccaatcacacagggattctgaggtcttaacgatgtcaaaagtaaaatctgatcacgtattcgtgatcagcggcccaaataacgactaaagacatgtttttggaagatttttgacgaaaaatttttttcactcaaaaaccatgtgcacccccctttggtcccgaatcccaaaatcggttttatttttgtaacaattcgtaagaaagtgataaaaatgtaaaataagatttatattttaaagaaaaaaattgcggatttttgtagtattttaattttcaaaaatttcttttcagaagggggttatgaatttttttctgaaaaatcgaaaattttcagaaattctggaataactttttttctttttaagatagaaatcccaaataaatcccataaaattctcctgatttttctctatttttataatataattgcatgaaaattgatccacacttcgatttgttatgaattttcgaaaattaacccaaaatcccgaaggccaaaaaattgacgaattttcaaaaatttttaaaaattccaaaaaaatctgaaacgaaaaacaaaggtcatattcgtgctcagcacctcaaaataccccagaaaaaaatttttcacccccattttggcccacaaaaaaaaaattgaaaatttctagggggcctagctcgaaaatttttgaaaattgagaaaatgaagtacaccgt

SEQ ID NO: 2965 - DNA, 7049 bp, Heterodera glycines
  unsure (1)..(7049): unsure at all n locations
gggaaaacaacaaaattgggtttttcaagtgtccctttggggtactcaaccaattatggggagcagatttccgacgcagaatttaagtccacactatagggaagttattcgcgagggattcgcccccgcccccccncccgcccttcaaaattttgaaaaaaaaataaaataataggagacgcagaattttgaaaattttttataaaaactgatgacaagctaatgtgataaaacaggttaattcttttcctttcagtatccctgcaaagtttggggcgcttctgatcagtttctgaaaaaaaagttaagcctaaactttttggcctgtttaaaaaggaattaaaaatttttaaaaattttattcatctcccttttcgatagaaaaagcatcagagtgcctaaactaacatgtaaataaaatttggcgcgtttcagagcacttactgaaaaaatattatgaattaattttgcaaaaattggaacgcaaaataggaatatcgaaaaatttcaaatgcaacaaaatgggaaggaaatttaaagataattgcgtttcttctcagctgttaccctgcaaaatctgggatttttctgatcacaactcgtaaaactaggagtgattgaattttcactaaaaagttaagcctcaactttttggcatatttaaaaaggaattaaaactttttaaaatttttattcatctccctttttgatagaaaaagcatcagagagccttatttaacatgtaaataaaatttggcgcgtttcagagcacttgctgaaaaaatattatgaattaattttgcaaaaattggaacgcaaaataggaatatcgaaaaatttcaaatgcaacaaaatggaaaggaaatttaaagataattgcagtttcttctcagctgtttctttgcaaaatctgggatggaattttctttgacaaaattcctggtccaagcgatcccttctccctaccacttccaaaatatgccttttttgaaggtttttgcgttgtcaatttccaattcccgctaatccgtctgtccctctcactcattattgtggggggtgacccatttgccgtgccgctatttaactttttaaataaatttttaaagaatattagaaaaaatttagttctaaaaataaaacatatactcttaagcagggttcccgggcatactgatttccaaggacataatgggaaaatttcactaaacccaaggacgcataaaaattttatcatgcaatgaaaattattaaatttcatccaaacggtttatattttttgccggaatgaaattttaccaaggtttttttcttttggtaatattcctcatttcagcgcattgcacttttttgcggcgcgctttttcgaaaaaaattcagggaaacagggcgatgccgacaggcgtcgccgggaaaaaaaatttggaaattagagaatttgttaacagattttcaccaaaaaatgaagattttgcgattttgaaataaaggcgatggccattttttactttacacatttatttcggcattttttgaaaaattttggaatgggtggaggagaaattgttaataggcttatcaaaaattgatcatttttaacactttttgggtgttttttttgaataaaattttaaatacggtagtgccaggccgctggggaaaaaaattagcatttttgtgcaatttaataccagaatttgcaccaataaagcaataagttaccgtattgcactaattatcgcccggggggtgattattgatcaacctcctcagaaagggggggggattattagatacggggggataaatggagacagggcaataattagagcaaatagggtaataaaaacttggtataaaaggacaaaattaaaatttttgaattatttccttcaatgctcattttcaaggacttcttgattcaaggacgtccttgccattcaaggacggatggttggttacctactctagcgaaaattaaattttatttttctataaatattctttaaaataaatttgtttaaaaaattaatttaacaaatattgataattaaaagtaaaaataaagtaatcaaaggaatgatcatttgctcagctatttgaatatatgcaaatttttgataataaatttggggatcattcacaagacagatagagtggtcgccttgcttgactctttggaattggcgctaaattattattatttagccaaaatgtgtgtggccataagtctcggtgatttgcttttcctgtgtaataattccatgggacagcaaaatttttgcgtaaataatagcgcaaattttgtttaaaaaaacaaaagcgcaagaaaagaaggaaaaaagatggagatgaggaagaaatggaggagaaggaaacgggaaaattaatgaaaatggaataacaagaaaaagaaagtaaaacaagttttttttttaaattataccaccgcagcatttttgatgacaaatttagtcagaagcatcaattcttcgtcctttttgtcaattatttctgtctatcgttttcctttttctctattttgatcacttttcagtttagcatcctaatgtctgtccatcgccattctcttccaaagtttttcaaggtcgtgaaccattcaaaaagttgttcaaaaaagtttccatcagctgttttaaaaattttggaattttatagaaaaaaaatttttataaagtcttaaaagtcaaaatataaaaactaaaaaatattccttattaaacgtacgaacgaatagctgggaagcaaaggtggacatcatacaattggccatgagtagaagggagaggaggaaatttagtacaaattttatgataaatcaatgattttaaccccagttctctgagatgtgctgatttttaaaaattgattcaaaaatcgcaaaatttgcctttatttggacaaaagcttattcctatttattttagaaaattattttttcaccttattttctattttctttttatttgaatattaactctgaaaatgacatattaaaagaagttgaaaaggatctgatttttgtgtcgtttgaatgatgatatcggtcttctaattacaggaaaaactggaatttcaatcatcaaaaatcaaataaatatcagaaggcggcaaaagccgcaaatagaacagttcattataagaatgtcttccaaacatttctatgtatgtctaaatttgtttttaaaaagtaaaatttttgtttttttaagaaagtaatcctgttttttaagttgaaaaatctgaatttaaggacgtaatttttcattttcggtaggaaatacttttagttaattaaggacagaaattccataatccaaaatttgggtggagaacggggcccggacaatccgtcagtggacaccccgccagcaaatttttttttacaactagataatctatagaaattataatcgtacttatccttttttgcacccacccctttcggttttttaaaattttttactatggttattttaggcgctgaaaaaaatctgacatttattttaagctaacatccattttatatgaggcacgtgaaaccacacgttaaaagtgaaaaattcaaaaaaaatatcttttaattaaaatgattattttaccattttttataaaataacaataattattaattcactagaccagggatgggccaaattgaaaaataaaaagcgaaatgcgaaaagcgaaatttgcgaaactgaaaaatgcaaaatgaaaaaaaacccaaaatgcgaaaagcgaaacctaaaggcccatccctgccatagactatctcggggagtcaaaaaatcatgtcccacttccttaatggtaaaatattaatatactttttggtccaaaagagtgcaataattcatactaataagggaaatagtcctatccgattaaaaaaactttcatgttctgatcatttgccattaaaatttgtgaaaaattctaaaaaataatagaaagtcgcaactcgaaattatatttgattcaataaaagttggaatagttcgggataaattagttctacactgggtatttccccattagatttggtgggttctggtcatttcgttaaatattttttaaaaaattaggcttgcatgtttttataaaaaagtgccgtcctatagaagatttttttgaaaaatggcaaatacgctaataaaaatgcacaaatgccaaaaaattcaattaaatccaggactgtgcaaggacatgcagatttaaaaaagcaaaaaaagctgtttctcatgcgtttataaagactaaaaaatcaaaaagcttaaaaaatgaggaaaaaaattaaatatatgtatatactttttaaataaagaaattataaatttctggctttttgaaagtacgcgaaaaacagaatgccaaactgtgtaaatacaagcagtctttggtcactcattggcaaccgtccttttttgggccactctggccaactccttcgtgggggcactgcggctgggcgggctcattcatcccgtcatctccatgggtaaaatgtacaaattattaattttaaaaataattatagcataaaaaagtaaaataaaactttggcaaatttgagtgtattgtaccaaatacggttctcagctgcttgctgctaattaatagttttttcaggcgcccaggccgcgtgtcgtccagtgtgccagtgccaagaaccgtcactgaattgccaagtacgaatttaatagtaaaacatttgattgcttctttctgttagcattagtgtcattattaaattttgagagaaatgcgcattgtggggaagtcagtcctgatacctagcattgttcaaactcgggccaattgcaactcgtacaaaagacaattcgtacaaaaagcaactcgtagaatagtcaaccccgtacaaagtcaaaaggtacagttttattagtccaatcgactttcatgaaatccaaaggtatttatttatgtttccaatcaattgataatacttggggtttttatacaataatattgttcatcttcgaacaaatcgtatctttttgatgacattcgaaagcatataaagtctatcgaaactaaactatataaaatctcagcgtttaggcaatatccaaaaaggatgtgtttgattaaataattgttgattattttcgtttgtaacttttttttaaatgtttgcattctcttatttatcgtattaaataccttgttcagactttgtgctttcgaatgataccaaaaattagggttggttcaaacatgaacaaagttactgtattaaaaccagaggtattattatttgattggactcatattatctttggactcataaaagtcgattcgactcataaagtgcaatatgtagagcccaatgtactgtaataaattttacaaaaataagcctaagcctaggctcaagcaggctagtttaagcatatgtacgagttgtctttgtacaagttgtcatgacatcggcttcaatatcagcgccggactaagccgggtgcctaccccggcgaatggcaccgtctcggggtttcagacctaacttttaaaaacaactatttgtcccatttatgcagccgtcgccgagcccggctaacaataaaaagttttgaaccgagtttttttccaataaaagaccgtaaccgactatccagtatcggtaccgtttctagccggtccggcccctagtttgggagaaagttcgagcattcgaaatgacagattttaattctttttttgcgctgattaaccgagccatgggatttgttcgtttgtagtttaaatccgaaatcactcagcaaataaaaagtttgtattgtcagaaataaaattaattctgtaaaaatttggacaaatgatgaggaaagtgaggacgaaatagcataaatgcacaatagagtagtctgtagaattgtcaattctcattgaacaggatgaaagttcgattctccaccagcacggcactttttaatttttctatttgcgatactcttaaattttgttcattcttaattaagttagcattattattttttatttacccggcaaagccattaaaaatattttttataattatgaattgctttcgtaaggaggacaaagttcatctggacgaatgtgctgtacgggaccatccattgcttgcattcggacggctggcgactgcttgaaattggccattgaactggagtaacactagctaatagacaattgtgaggaagcgactatttttaggattataaaaatttaaatggaaaagccgaacggacaatttttgcctctttaatctgggagtaggacaaaaagacgccaccgaattcgtagttgccgaaacgtcgccggacattttggcgcagcaattttttttttgtaccccgttaaccttccttttaagtagttgcacaggccgagaattttctggaaaaatcggtactgggacttgccggaaccagaaaaggagggaccgagaccacgatttttcaatcgggaactaaatttccaagaaaaaatgcaaaaaaaaaaaattaagttaatttaattatttttgaagtgatcaaaaaaatatataaaaatcgtaactctttaatataaaagcaagaaaaaacagaaaagaaatgccagaattagaaagtttggatgtgtatctttttccaaattgccgagaatttcctcgatatcaaaaatcattttaaaaatttttcattttgtattttgtcatatttttatgtaaattttacagaatctgtccttgaacagcatcatcttgcggtagcgatcaagcttctaaggcaaggattgtgatttggttgccggggtcagcaaaaaacagcggcaaacttttcggaaaatggtaacaaatgaattgaaatttttttaattgtgtatttacatataattcttttttcatttaaagtattataaatttttttattcatttaaaatattagcggaatttaaaacgcttcagttttccatttttatcttctgttgtccttttctttctctactttctcttttattccctttgtccttattatttc

SEQ ID NO: 2966 - DNA, 1649 bp, Heterodera glycines
  unsure (1)..(1649): unsure at all n locations
ttttttactatttatccatttaatgtnngagtaaagggggagggcccgaaggtgcccgtaagccctccacgaaaatgatcataggcgccgtcgggaattttaaaaaaatgttgagaattttaaaatattcagcataatggatcaattttcttagaataaatagaaaattctgggggctggcggtatacacagaaagagagaaagaaggtgggtgggtcaaccaaggtttttcgaaaaatccgggagtcgtaaagaggtcggcagtcaaatttgtaaatttaatataaatctgaaatttggtggttttttacgccactttttctgcgcgtttatttcaacaaacttttgaggatggaggcgtacggcaaacagggtggcggaggtgccgaccccgggaaaatttgaaaattttattgtgtatgatttgttaagaaaattcaagaaaaattattatttttttagtaaaattttcgaaaaaactttgccaacgaaagaattgattctcttttccctttcattccattcacatatatgtatatttcgcctaagcaaaaattaataaattaatgtacttgcacattcgcgggcgggcaaaaattgattttccccctctcatacttttaaataaaaagttaattaataattataattaaaattttctagatttaaaaaaatatcaatttattagcaaaatttcgccaatgataactcctgtgagtaggctttttaaaatataatttaaattattttcataatggtttttcttggtattttctcattttttaattttcaggaacaacaccaaaagcggctcgaatttataaaaaggaaaaaaatgaatagcgtcggctgttacggctttgaggtgtgttgtaaattttttgttttttattttaatttgattttgtgggttgtgatcttgtttctgttttaattgttgctttggatcagttcccctcaatgcagaggttttcttctaattttcaaaattttcctttttggatggaaattcaatataaatttattaattaaaattgcaaaaattgattatttgagtttaaaaaatttccctgccggcgcctatcggcaccgccggagctaaaaaaattcctttgatttttaaattgactcaaaaatcccgagaatattagaactgacagaatttttcgaatttataaaaaatggcccagctctgatcggcgccactgacgatgcaacagtgaaaaattcaatttacggagagaaaaacaactttttttttaatttttggaaagtgaataaaaaccaaaaattggttaataaaagactcaaaaaataaacgatttttaagcaaataagaaaaaattttgaaaaaaattctcaggtttttggtctcgggatcgaggctcggtctcgtggtcaagtctcggtcttgggtctcaagaaattttcggtctcgaacagtactacttcataggaccataaattgggattttttgtccctaaaatcccctccctatttattatttattcattanaatttaagggagaaaacgcgaccctggaagaaatcgaccagttcattgagcaaagagctgcatccgccggcccacaacgatctcggcaacgtccttgtgtgcaggaggcgacggagaccccaccaaagcctt

SEQ ID NO: 2967 - DNA, 1725 bp, Heterodera glycines
gatggaatcgttttgaatttataccttgtttttagacttagctgatcatgagctttcgaatgctaccaaatttgtacgaatttgaccgttttaaagggtcaggggctccctttttcactcaatttttcgagttttaaaccggttcaaaaaccggtttttttgcatttccgcaactggagacctacttttttgtgcagagctcgtcgagacgaatcgattggtatatcatttgttccgttttttacggggggttgactatactacacccaaacctttcttagtacaaacaaattaagtgatcttcgatcattcggtaaccctaatttttttctcatttcattgcataatttcaaaaattatctatctataaaaaatgggaagttttttgttgaaatttttcatttgatggtttttaataaggattaagcatcatctaataaattaaaaaactctgatcagcctataaggttttatttgtagaatttttcaagatttttttttcttcccaaaattgtgtttttggcgattgatcatttttgtgattatttttgcacctcaaaaaattaagctggtcgatttgggtacactttctcgatgaaacacagtagtaactgttggaccatatgttagtaaagaaatctcataatgacaagcggtcttttttgcacttatttgttagaaaggtttgtgctttttcatggcctaaaaacttatataagattttattcaaagatttcaaaaaaaaattttaaaaaattgatgatcaagtgtcaagagttttgcccaactgtttttcgatcagtctaaaaatcttgaattaaccaaatttaatttaaggattggaaatgcaacaaatgtcccaaggcttttgaaacggctatagggcttcacaatcataaaagagtacacaggtagattagcattaaatcaaatttaaataattataaatttttaattttaaacaaaaaaataatttatctcgaatagtagcgcaaaactttcaccagtccgccggccatcgactcccaccattgacttaacggggggaacacctgaaccagaaaaggtaagtcatgcgtataaaaagataaaaaaatttttaaattaaaaaaaacactcaaaatgttttctgaggaattttttcgaacacactcttttttgcggtggcttttcagaattagtgctatttgttaataaattttgtccgaaaaatgatcgattttgcaatttttaatcgaatccatcaatttttattaacaatctcataggggaatatttatctttaaatgttcaaatcagtttaaacccacttttactgtgtaatgagtgcacagtcgatttgctataatttttcgccttttttttctcctgactcaaactaatatttaaaaaatattttttttttggtttttgatttttgaaactgatcacttttttctgattagtttgttggtgagggccaaaaaaagttcgagaatatgaacaatctatctccacacaataaaagtgggttaaaagtgatttatatttactgtccgaaatgttcccttgtcagaaataaaccaattaaatggttgatcaataaaactttgcaaataagtccgaaaaataaaaattaaaaacaaagttaagattaatatattatagaataaattaaaatctttcacttttttaattgttttttttctaatttttggataccccttttttatttcaattttttaa

SEQ ID NO: 2968 - DNA, 6354 bp, Heterodera glycines
  unsure (1)..(6354): unsure at all n locations
tccatatttttaccagccctagtcatcagtgcagcattttttgtttacaattattaataaaatattttcaccgaaaaccgatataaattctaagtttttaattttaattttatggtttttcgtcttatttttccggctgatctctaccgtaatggcaacaaccttgcaacaaaagtacagttgtgctcggtgagtattcggatgattgaccaaaatgcatagaccagcaatgggccaccaaagggagcagacgccttggacgagtaagtagccaattgttttaagagcacgcacaatcacttaagcggaataattaattttaaatttaaaataaattacaaaaaaaaaatataccaaaaaattagcatttttttttctatatacaatttttgttaaaattaatttttaaattgttatttgcaaagttgtaaaagacatatctatcattttttaggaatactaaatagtaaataaattgaaaaacttctaattcatttaaattaattaattaatttttattttgaaatttattattgttaccataaactcaaataataatttcttttaaattaatatttggaaaattaattttatttatagtttcgtataaatcaaatattctatgcttaattttaataaagaacagggaaaataatgttactgtatttcctttaaaaaaaaattaattctcaacggcaaaaaaatgaatgatcaaaataatgctaaaaatctttatgcctaggggtaaaattttgcggtaaatttcggcaatttcaactcaaatataaacctttccacggcacgcttaacatttcgcccataaatttgaaaaatgcgcggaacattgcgccaaactccagcccacaacagttgcaacagccaccgcagcagtgaaccccacgctttcgtcgccgtcggcgattgttgccatcagcaacaacagcagcagcagatggttgtgctgcagatactgctccaacctgaggaatgtctccggcggtggtatccaatgtttgcaatggaaataaatgtacagccattttttcataaattaataaacattggtaggacaactgtaattttaatacattcaattattccgataattagcgattcattttttattttgggagtttggcactctcaaaattgaatgaaaaactgtggcttttggggcttattctggcagaaaatcctgtttccagaaagttggaggctgaataagtttttgttttagtttggatgtttggctgggattggcttgatttgaaggttcattaactgcaaaacgcaccttgccaagttacatggacggtaaaaaatttaaaaaaaaaacggcaaaaaatggttggcgtaaaaaattgcgaacagctacagagagaatgctttgcactatctcttcgtttcttttccacttttcctctcatcttgcgtactttctcatcatttttaaaaaggcacttcattttatatttaaagattgtggcattttgttacgtcaacgatttttaccttttttttttaccgtacatggtttggatataaaaggagactcggccaatgggactcgaacctatgacattttataatggaagaatgccttaatgaatgatctacgcgtttcccttagtggttctccttggagtttactttatacctcgtaatattcaggaatttctttctcagttggacccttcccattgtttttcaataattttttatttaattttttgattttttgcaaatttttctttaattgttcgtccaattttttcataacagcatcattttgttgttgctgttccattttttcaccatcattttccaattgttcaacaaattgttctatgctttctctcttttcaggtgccaaatcattcccaattttttgctttgtattggcaaaatgttgctcaattaattgcgtgagtttactcatttggtcattgataatttgtttttcataatttttttgatgcatgtttaaaatttgttgtgaataagcatcaattttggacagcacttcacaaatttctttgccttcatcatccatttcctaatttatttgaaaaattattatgacactatttactagggataagcgagagtctcggttctcaattctcgactggagaaatttctcgggcttttcgcttctcggtcttgggtttatagtatcaggaacccaagaaatttttagacttttatggatgaccattgcggcgggtggggtcgccgacgaagtgggatgagaggactttaaatgttagaagatttgattttttgtttaacaaaaacggaacgaaacttttttcatccatatccaaatttagtctgacgaaaacgaaagaaaaaattaaaaaaaaaaacagaaaacgaaacaaaaattcaaaattttgaaaacagaaagggaaaagagaattttcaaacggacaaaaacaaaaaaaaacgaaaatgagactcaaaaagggacgctaattattaaaacagttttggattcatcccaaccgaatttttttttctgcttatggacctgacaccaacagaattaaaatagcggaaaaaagcccggtgccgtttctgtttatttttaaatatttttattcatttgatttttaaattaattaattttctggcaattcaattatttttattagagcaataaaaataatattaataaatctaaataacctctgcttcacaaatctcgtcatacaattggtgcacaaatttggtattgaagttttcaagagtctcaatttgtgcacattgattttgttttgatccgttggcatttacaaaaattactgaatttaaaagtaaaaaaaaacaaaacaaattttttaataaaattaaaaaacttacccaaatagaaattcaataaaataacatgtttaaaggaaggaataaaagcaaaaaatttcattctaaaattgaaaaaatgcattctccaatcaaaataaaaaataaataaaatgaaaaatttcagaggcttaaacttttttcttgttaaacattaatttttccaaataaatctgaaataaaaattcaccaattcagaataatgccatattaaaaagggccattgccctatgtttgatagatgaaatgaagtgaaaaaaaattattattttaatatttaatatgtaaaatataataaatctttataagatatacgtaagcaacaatcaatcaatttacatcaatatatgaatgattttatatattttcatgtaaaatgaaaaaaaaatatgaagattttacgaaatttttaataaagtaaaatttaattttcttttgggtaataaaataatctaactttttgaaattcaatttcttttgcaaaacagtggaactgggccggtcgtcgacccattggtgctgagatcgttatataaaaaccatcaataagggagtttatacatcaaatggaaattttcaacaaaaaacttgctataacttttgtcaaagtcaaccaaattagacatttcttgtatcattctgtttgatttcctcatttctcttttccttttcttttgttccttctcaattgtttcttctcaatttcctttttttgtactggaattttcggctgatctttctttaatctacccctcaaaattttgggcaaccaaccctgtacagctcttccaactccgcacttcgtcttttgcaccgtttcttcgctccactctgggacggaatgaactctggttgatttcctcaagcccctcaggccaagtctgttcataaattgagcagctggtgagcaggtggttggattgggaaccgaagggcgaaaccgttctcggactggcgccagcatcatcgacaaacttcgaggatcgaggacgatcctatggaaggggtgagctgtaagggattggccatcctaaaaaacaatttttattttccctcagcagtcgtaatttccactctttattatcacattttctcatctcatttattccgttcatccccgccccttttccgttcgcttcacacttttccttcccccagcgatcagttagtcagtcgtcagtcagtcgagtcgttaagcctattcgatcagtcgttcgtcatggaatatttcaatcaccattttatccggagagaataaattattctaataacatcgaggctttttggggaatttcaccaccaatcctgggcccgggattccttccccaaatcgtcctcccatttattcttcgaacggtgtgtcgactgggggacccaacacgcctccctcactagagttatctattagctaacctaaatttcaaaaaatttagtcaagtttgaaccaaggtatggccaaagtacacaaacaacagggttttcaaaaaattttgaccataacttttttgaaactcaacaaattttttttgaaattttgcaggcttgtagaaaacatttagggctattgaatgatgataagatttcttaattttgttggttctaagaatgttttggtcagaattttggatgatcaaaattattttgtttaattaaaaattttcgttaataattatttttagtttttggtttctagctttcattctaatataaaccctaagaattctctactagcctgcaaaatttcaaaaaaattttgttgagtttcaaaaatttatggcctaaaatttttgaaaacccggtttcgcttgggtacttttggtcataactttgttgaaactcgacgtaattttttgaaattttgcagacaaacagagaattgatttgggctattgaatgataccaagaatgtnnctaatttggttgactttgacataaggttatagccagttctttgttgaaaatttcaatttggtgttttttaaataacgacatagcaccgacccatttcatggtctaagtacgggacggagttttttacgctcatgtaaatgcgtcagtggaaaatgcgccataaaaatgcgtctgtaataagttattttaaataaacttatgtagcataaagtattgttgtacaaaaggttaaaattttgtacaacctcgttttaagtgtaattcaataaataaattttgaaaattatcaaaacccaaaggcgacaaacatactgtaactggattattgtcaatttgtaaccatatcaattaacattaccgtatcttatttcaaaattttgtttacggaagagtaaattgtaaaaaaaaattttttctttaaatccacaaatttattttgcacaaaaataaagcccttactggaaagaaattcacatgtttttaatatgaaaaattgccaacattcataaatccacacacagtttttgaagacgagacggtgcatatgccggaaacagaaaaaaatcatcaatattcatttatggatatattttttaaaaataatttataaaaaaatatcctattccacaaaatgaaaaaaaaaattgagaaaatgtgaaattattttcactataatcataagaataaaaattgtttttttttaaatttaattatcataatagaaaaatatttttagttattacatctatatttcgaatatgaaatttgaaaaattaattctattacataaggcattgtatttgagtaagtgaattaaaaaaaatatatatatatataaatattaaaaatatataaatatataaataaaataaatatatttttaaataaaagtaaatttaattattttttacattaattaattgtttgcttttaaataaagtgacgagaatcatcagcacaatgtgcaccggcaatgacaaagaacttttaaccagaagcccagagaaaattttcgattttgttgagcgctcaattacattaagccttgatgttgattcattgttaggcataggattaaggtaaaaaaaaatcaataaaaatttttgtttaaaataaattccaaaacaaaaaagaataattcttttattaaaataaaaaaatctttttttttatatatcttctcgaaggatcccaaattaagcaaagtttaaaaaacgacaagtgttttctactaaagcccagaacaatcaaatatcaaattttcagacctcgtaacaaaattggaattcaaaaattttacagtatttaattttttagaagtcttttgcatgagcttgcagcaaattaatgatattatatataattaaattaaatatccttatatgactaaattttataatattttctagcccaatttaaacagaaaccaattaatttattttatttaaaattaaataattttttttcatttacagacgtcatccattagaggcatttaaagaacagaaaagcaaaattgaagtgtatttgagcatgaatcggctgttcttttgggtgggtgaccaacaaaattacataaat

SEQ ID NO: 2969 - DNA, 3757 bp, Heterodera glycines
aatggctaaaatgaaaaccttagaagtcaaattccaaaatgttcaattttttaattttaaagaaagtcaatttgggaggcatatgattagaggaatttttcttgtgaaaaaatgtttgacaataataaaaaattcagttttttaaaatttttaacactatataggctcggtcttctttggcaaaatcaacgtccaaggttggctatagatatgtccagcggtacctgggagaaaaattcggaatttttaagtttttaaagaaaagtttaacattttacccacccatttattaatcaaattcccaaactcattagcatagatttgtcacaattgtttttaattgttttttagataaccgcaacaaaaattgatgaaccttttcgtgatttgttgttttacatgtatttcaaccaaaaattgttgcacattttgaacgaaaatggccaacttcaaagatatttggccaaaatttcggatcattccaacaaaaatggtgataaaatggaacaaaaaatgccaacaatgctgctcgatcggcacgattatatccataaatggcttatctgggtcacagagtatgccgaaggttggttggccaagctgatttcgttggccattcgaattggcacactgaacatggacaacgccagggaaccgtttgcctatattatttgccgtcattttgatcgtgtaaaggggaacagtgattttgatgagaattatacggtagaagacgatggtttgatgatggcagtacataaacgaaatgaaattgatgaaatggcgacaaaaagtgagcaaactcagcaacaatatttggacaaaatcgttgcacaaagtttggcgttgcgaaacattttgatgattttagcggaagaagcgaacaatgactttaccttcgaaagttctctcaaaggtgaaaaaaggagcactttttcgttatgccatcccctccccccccccaataaaaacgtcatgatcccgaaaagggaaagctcaaagaaagccatttttggttttttcgaatcgacaaaatcatatataagacaagcgcctaaaactaagcccagaaaagtgctttccctcgtcggaataatgacaattttactgggggggggggcataagggaaaagtaccaaaaaagtaattttggaattctgcctgaggcaaattgaaggcattattattttttcttttcttaattgtatccaacaaacttgatatcattcgaatccgtgggcagctttattattgagctaccgaggcaaaactgcgctttcttttatttgacagttccaataggggccgtcgtggaaacttgaaaatttgagtggaatatttattcacccaagaattggcatttttcgacaaaaccctaaaaaatctaatttttcaaaaattactgataattaaggggtaataaataaatggtataaaattttaattatttattttttcataattataaatttaaaagaacataaaataataatttaggaacaagtagttcctcaacttcttatttaactacaattatctccaaaacattgcatccgttattgatcaaaaatgtgcatagcaaccatcaacaattggtccaccatttggccacgctcattttgttttttcatcgaatttttgaaatggtcgctgtgccacaaatttggttgctcaacaaattcagcgtgggcaccgagttgaagcagttgaagcgcatttatgaaacaacgattaaggccttgcataacattgaaaatgagtgggacaaagaacagaaagcaattagtgatgatgatcatgaagatgacaccgccatttcggctaataaccgttaattagttgattggcgagaaacaaatggacgaagccgacctcaagcattgccctataaaatgcattggattttttgattgataagaatctgataattaattaggttgtcataatttgtattattttttgcacgaataaaagttctcaactgaaactagcactgtgattttaaggcagatttcaaaaatatgttaatttattttgtgagtataactttaaaatatttgcttttctctccttgatcgataattaatcattagggagaagcaggcttaaatggtacaaaattccaaaatttagatttaatatggatgaaaaaaaccgaactatggaagaaaaatatggacgaaacgctgagacaaggacaaaaagatgggaaatttctaaagatataattttttaaaatttttataaaaaccgagaagacagtttgatactttaagtttgaggcgtaaaattgttaatcgaaaaaaaaaatctttcatttggttcaaactttgttgccaaatggcccaaaattaccaaattcctcaggcggcatatgggcaacactggaggtatctgtcatttaagccataatataattgattcttttctttttttttttgcaaaaaatgtatttccatgaaaaatgtttcacgattttttttcgttttacgcgactcggtctcacttatacattgtccccaatagattttctttcctctcctcctatgacaaatgttttacacctatttgacgccaaataaattttctaaaatattattatttaaatgtttttgagtattttacgttgttcagccaaattaattaaacaatcgtaaaaatatttattaatgaatgatattaacatttttgcacatgagggcctaaccgtggttgtccgattgataacaattgcaaaactcaattattttacttttcctatgatttttatcaattttaattataaatatgttaaaatttattaaaatgatacttaaatacacattctcctaaaagttatgtagtatttcaaataaagaataattaaaatttacttaatattaaataaaatcattggctattactgtgaattttttaaattttgtggtttcaatggcgcctataaattaaaacaaagatagttattaatgtgataaaaacaatgaaactgatagtgataaaaacaagataaaaataaaaataatgataattgatagtgataaaaacaatgaaattgatattgacaaaaacaagataaaaaaaataatgataattaatagtgataaaaacaaagtgatagtgataaaacaatgataatcattaatgtgataaaaataatgaaattgatagtgataaaaacaagataaaagcaatggtaattgatattgataaaaacaaaacttggcattagattgttataataatttacagattacacaaaaatatcatcgaggctcagataagatatggacaaaaaattaggaattaaggttttgtggaatttagttatcatatctttttatatatttaagtaaaaaatttaataaaattatattatgatagaaaacacctagagctattgaatgataccaagaattattaatttggttgaaaatggaccaagttatgaatttatatgtcttacattttttgttttcgtaccactatggcggcttttaggaaacgccctggcggatttaggaaacacccaatgtggcggtttttaggaaacgacctagcacctttaggaaacgcccatggtggcggtttttaggaaacgacccagcacggacggaactgacccctacccgcggttgatcgatcgacgaaaagtgcaaaattagctaaatttttgagtaaatcaactcataacttttccctgacgcaaccaaattgcacaatcttggtatcatacaatagcccttcaaatgcattatta

SEQ ID NO: 2970 - DNA, 1894 bp, Heterodera glycines
ttttaatattctatcgattttttattattcaaaatactcataaaagtcataaaaaattaaacatttttttaaaaaattgtttaacaaaattgtcattccatcagactctcattttcttgcgattattacatatcatcaacagtttttgtctaattcatatacgtcgatttcttaaaattatgttttgtaaactttgaaaactcaatttttacaacagctaaatcgggtgccactgcacttgactcgaattcccgacattcttagccaattatatactccaacaagccacatatacatcagtttgccagagatatatgtctcagaatcacagaagagtccgttcccgaatctccatttttgggcctaacccaatctcgataggggtcattaaatgatatgcaccgaaaatcggctattagattaattaattggtcaccaaattaaacactcccgaaacagaatttatttattactcagagtcattcatttaccggtgcaaaataaaattgactcatttatatttattaccaatcaactttctaacattgcatatacggcattttaataattttctttggcattattatttaaaagaatatcatttcttggtccaattttcagagaaaaaaatattgtaaaataaattcacatgcctttttgatgacttccgttcacttacaaaattcacttgtaatttgtttttcatattattcatccgtcaattgattttcgagagtgcattttctatgaggaaaaaataaaataataaatattgggaaatgaaaatcattggcacaagaatatttaattatataaattttattatatcaaaaaacaattaaaaagttggagcttttttgaaaattcgattttatatgaaatagttcaaagaatttatggccagaaaaattcaaaatttatttcgagaatttttgccaatatcttttttatattttttaaaaatttccagggcggcgcctaccacgacaccgttgtgggctcaatgtttctaaatagacttaaaaaacatctaaaattattattttgtattaaaaacagggacctcgaaagtccaaaactctgttttttaatgggggcataaggagccaaatttttaaaatttcaaaaaatggcgcaaaatgtagccaagactctcgtatattcgcgatggcgctttgggtcagagtacagtacaactcaccgacgccaacatgccgatggccgactcgctgacgctaagctcgccgataaattaagcaagaaaaaatgatgaaaaattaaaatttcttgataatttaactttacttggtattcgctcaacggcactgatcttatctttgcgtatagtgaaagaagatatccattaattgttcgccgcgttaacttttgaatttgtagcgaattatacttagttgttactaaattttgtcgcaatttttttttttcaaaggtgtgtaaaaaaaacctaaaaacgctgatggattctactagtttttttaaaatttgttcgttcgtttgttttttcccattcaaagtaaattgcttagttagtgatcagaagcaaaatgcgcgcatgtgagcgaaatttttcgattatgaccatgtttctggctttattttttatttataatccttttacaggaaaatttggttttatttataaaatttgattttttccacatttttcttgaataattatcgcgagaaactatcggtgcatcgatgtccacagctttcggcacatctgaactctcttctttttttttttaaaacgcggcgaaggaatattgactttgaactaaagtggcactgggaccgggaattttggggcaaacccgggacccggacatggtaaaaaaaattttaaaaaaatcaaattttatttttttttttt

SEQ ID NO: 2971 - DNA, 3070 bp, Heterodera glycines
  unsure (1)..(3070): unsure at all n locations
aaaaaaaaagttnatataaatattttaataattttcagttattactttttttaattaaaataataattttttgagtttctgtttttaaaagtctcattggcaaaatcttttttagctcatttttttgactatgaacaatttattattaataataaaatatataaagttggattatcttaaattaatctctaattgaaaaaaatattattgattattttgtaaattaaaagttcactttttacaaaaaacttcgcttataataattatgggtggaacaatatggatatgcctaacaagaaaattaatttcctcaaatattaaaacatcactaaaaaaaaggaaaaaaaaggtaaaaaacaaaataaaagaaaatagaaaattaataaaatccttaaaccaaaaaaatgaaaaaaggttttttttagaaaattagaatgaagaaaaagtttggatctgctaccctttttttaatatttttttttgttttttttttggttttttttaattccttttttatttttcaatattatttctcaaataaaataaaaataataataataatttagtttattaatattacatattgcccatactcatgatttacatataatataggcaaattatttaattcgttttttttctaagataaaattcattaacaaaaaaaatggcgatcaattattatattttctttacgatttgtctattttttacgaaatttgcaatgactattaatggtaataaattttgttgaatatttttttacaaaattatttttcaaaattaggagggccaagttcgacaaataaccaaaagccaagaacgatcaatcgaattgcacatccaagaaacattgaaggacaattagctgctggtgatcatattccgcacacaaatcagccaacaaacaatgccacgaatggccaccaaaatgatcaaaatgccaattcagaaaattcagatttgttggacaacagtgcaacagaacagcattcaagtgttcatgaggggaataacggtataagaaagtttactgttttatttttttaatataattaagcaaataaattattgtatttttaaaattattttctgagtttggaatagttggggatttccgatatcctgatctttaaaaaaaaacccaagcctggatttttttttggacacagctccaggtatcaggggctatttttgacaacctggatttcctggaattttgtcagggaaaatgctggtccaggtccaggcttttttgggaattccaataacgtgatctttcaaaaaaaacaacacaggaaggagcctggtaaatgttagcctgatcctgatacactaatccagggacatcataattttgcggccatgacatttttcatcagatgccagatgcaaaaatgatggttaaccctaatttataactaattatcatcattatttttaatttttcctccattttataacgaaatttcgtcttttttttgtagctggtcgtccaaccgaaaatttgatcatcgaaaatgaacatcgagctcatttctttgatcaaggcaaaagcattgataccacgtcgccgtcgggatattcaaatgcaaatgcaacaaaattggacgaaacaaatgatcatcagcaattggtgagcgaaggtgggaacgacgacgacgacgacgagcgcaaaatgaatgacatggaagaaggttttttgtaaatttaaaaaataaataaataaaacaattttaattagataaaaatataattatggttatttaatattttatgaatcaaaaatcgccaatgttttcgaaaattttttagtgcttaaaaatagggttaagccccgaccctcggggagaaaaatgtcggggaacggggaggaaattccccgaaagaatttgtcggggatggctggagaaattccccgaaacatgtcggggcttaaccctacttaaaaactcccaaagtataacgaaaatattagtccattactaattaaaaatatttctagagttaaaagaaaaattcactgtatttaaaatagtgatttaaagctaaaattcatttgttaattttttaatttcaattttttaatgtatgttaaaaaaattttgttttctgattttaatttcgttttcgttaaaaataaatatttcgtttcgttttgtgatcagattgatcggagatacatacgaacatagtctctcgattagaaaatacgaacaaaatgaataagaaataaaataaaattatttttggagataaattattatttattaaaattcatttattaagaagacagcaataatgatccggtggtctcagaatgttgtccaatttgcttgcagccattcacagaagcatcaaacaaaaaagtgcttaacaaatgtggtgtaagaaaatttgtttatttttttaaaattttatttaatcttttttagcatcaatttgatgtgaattgcatcgatcaatggcaaacaatttgaattaattaaatggattaattaatattaaaataaaaaaaaacaaagcattagtaagattaaaataaattatgtttaaggcttcacagcaaaaattcatgtcctgtttgccgttgtgaggttgatggagatgaacgccctaatggacatgaacagagtaaaaaaacaaatttttattttagcattttaattttaattaattttaaaaattaacaaaatttctcttagctgagcctccacgagtaattacgaccaacacaatgaacacagtgttcagagatttctccggtaacttctgatcaacgaagaattattcagcgtacacgagatttgaattagtcagaatagcaaaagtcataagtagggctggtaattatatgcacatgcatatttttttcctgaactgcgggaggcctgaaacgcatgaaaaacatgtttttagcttgattagaagcttctagagtggatttccatatgcatatttgcatattttgcgatttatgtgcatattttggcatttcgtgcatggagttttttcataaatcctctattaaaacggcccctctactanagcgggcatttggggtctaatg

SEQ ID NO: 2972 - DNA, 1802 bp, Heterodera glycines
  unsure (1)..(1802): unsure at all n locations
gtcataagcatacaaaatacgatttattgtatatgttagcaatttttctgataaagtgtttcttatctgtacaaaaattttttaaaaattaatagccgaaaaattgtacataaaaatntattaattgtataaataaatttattataaaagaaagttttatattgtacatacaattttttgttataattttatttttatgcatcattttgtgatatgttaagggttgtatttgtcaaaaaaaagattttttctcattggaataattcattttattttaaattaaattaaacaaccgagtcaataaatactgaattgtataaagcattgtttttcataaattaaatttttcgtctttttttttaaattaatagttttaaaattattcaacaatttttaagaagtattatccattttcgttcatacaatattttgtgtttttgcttacgtttcgagaccgagactgaaaaatatgaaatcgagcccaaaaaaaaaacccgagacttttctcgagtgagaccgagaggcacgagcatcacaactaagttatatattcataaaaaaatgataatcaaaatttcttgcatattttcaaaaaatgaacatttttttgtgtaaatcttatgcctaattatctttctgttcattatttttcactttttaaataaatttgttaaacataaattaattaacaataataaaaaaatttcatatgtttctttctcttatgcctaattatcttttctgttcattaattttcacttaatatagtttatacaataattatttaaatacatttattaaaacataaattaattagcactaataaaaaaaattacaaatttttatttccgtatttttttagtttccgtttaaacgcgtgacataaagcaggctaatattttaatgtgacaaaggtcaattaaaaataaaattcacttccgatatcatttcacgatatgatcaaatgattgttgttattaatttctacaatatataaataaatctcggaaatgaatgaatcacctttataaattcataaaaattctgcaatttatatttatattagagttaaagtcattagaatgacagtatttccatttttgtgtatttcttaacataatttatttaataaatttgtttttttaaggaaatattccacaaatctttcaaatgtttttaaaatttgtgttttttcctttcttctcaatttcattggcaattgctcaacaaattctgccgatgacaaatgatgaaattgaaatgatcaaaaatataatgggctcaattgaacagaatttgattatggtggaagcgaattgttgcgcaattgatcatgaaaattttgatcaattcaaaaaggcggtcccgaaaatgttcgagaaaatcaaccaaaaaataatgattgaaaacgaaacgccaaaatttgcggattttcaagaatttttcgcggaaatttatgcatttttggacaaagtgcacatcgagatggaaatttttgtcaaaaatttgtccccatattgtgaacaaaatgagcaaaaagcgttgacacgctttgaaatggccatgcaaatggaaaaggaatttttgatggacaatttggtaataattgaagagccaaatgcgaaaatcaaacggtaaattgaagaattaattaaatggaaaattaataatttaagattttttgaaaaatttgactcctcattgtttgcaaaattaaccttaacaattgttgatatgctaacaatggattcattgctaaaggatgagagaaaccggcactttagtaaattgtttggtaactc

SEQ ID NO: 2973 - DNA, 1981 bp, Heterodera glycines
gttttagatcaatttttcaaaaaaataaaataaacccaccccagatcccatacttttttgtatagatttggttcttgactttcttcatcgctttttttatagtttcccttcaaattattatgacaaatatttttatccctgagggataaatgatcattgttcgcctaattagttatcttaattacagaaatgctgtctcagttgcggttgtgttgtgatgtcaccgtggatgctttttgtggcaatcattggcactccaattggcattgtttgcgaaggtgccaatgctgtgcgacgctgcgctaacccaacgccaaaagagatgccgtcaaaaattgcatcgaaaactagcggcacatcaaaaacaacatcaaaaacggcgtcaaaaacaaactcaaaaaatggagagaaaaagaaaaataattaagccaattaaatttttatgaaaaaatatttaggtttttgtaggtaaaagatgaatgaattcattagcaaaattttgtaaaaattttataattaaaatatatggcataaaaaattttcctaaattaataatatatggcataaaaaattttcctaaaaattctaaacgattaattcttttaattttataatttatatgtaaaaaaaattttcctaaattttatggtataaaaaattttcctaaaaagtctaaacgattacttcttttaattttataattaatatatggtataaaaaattttcctaaaaaagttctaaaacactattgtttagccgtttcaattctcgaccagacagcctgatattaataattatattcatttttgattagataatttacaatttcaaaccgttgcatgattcccaaaaaattgcgacaattattaaataattctaattgcactttcagtctcataaaattttcaaaactaatttgctatatattattgcaatttagccgtttcaattctttaccaggcagcctgatattaataattaccctcatttttgattaaattattcgctgccaaacaaatttcacctaccagtgttaattaaaggtatatgaaaattattatactttttactctttcatccttaaaaatatatattttaaagtaagttcacaaaattaaatttacggtatcaagtacagtacggtaattaatacgatttgctatcattcaatagtcctaaacattagtagtgtaagaccacgattccctgtacggttcagtaccggacatttcagtcccagattttctgacacgtttcagtaccagagtcctggcactgaaacggcctttctggtactcaaacggccatttgtccccatggttgacctattgtccctttgtcgaccatttgtccgttttggatcatttatcccaggttgaccttttgtcccttttcgaccatttgtccttaaatttaatctgctaactccgcgcggaactgaacccaggttgtgccgaaaaaagcccaacacactatccattatgccactgatatgtatttgtgctgagcattttatttctgattaaataattcatttcaaaatccaatcacatggtgtcgggatcgaactttttaccccctctccgaaagaaccaaacacactaaccattaggccacagatagaccaaattactttgtgataattgatgtataaacaccattttaaaaatccgttcaccatttcttagaagagctaaaaataatttaataataacaaaattattaaaaatagatataattaaagaaaataatacaatcaaatctgtcggaaagtatataaataaagaaaaaagattcaatcaaatgaaaaaaggaatgtttatcgcaccattcactctaattttgtcgggagccactggcagtggcaaaactcaatggttgatgaagttgctcagaaattacacagagctaatcgatccaccacctgccaaagtactgtactgctattgtgagatgaacgaatcggttattgagctgatga

SEQ ID NO: 2974 - DNA, 5662 bp, Heterodera glycines
  unsure (1)..(5662): unsure at all n locations
aaaaaaaggcctaaatatgtgttaaaaaatgcaaaaatatgtgctaaaaattggaaaaaccaagtgtatttacgcaaaaaaaaaaaacatatttaatatcagtctttatcaattttgcccgatcgccagtcaaaattttggcgatatcaatcaatttgtaaagtcccggattaatttttccatcagttgaataagttccttccgggaactttgaaatccagtgacgatttaacacagcgtttgatttggctgctttaggcatttaaatatataaagaaattttctaaatgcttaagaaacgtaaagtgtcaatttttagggtgcattttcagtttttcttgtatttttcttacgatttttctcaaaaatgccaaaatatgtgctaaaaaatccaaaatagcccaaatatgtgcgataaacgccaaaacatgtgtttttatgtttttataagtcgctataaatcaaaaattgttcggagaaaatgctatttttgggcttctctcgccataactaagccgcaaaaaaatatgttaaaacataaaaatcccagccctaataattacctagtaaaaaaatgaaatggtaaattattttttgaaaaaggttgtcacttacggaattttccatttgccgttgaaatgtttgtccaccagcgcatcgaacgggacgaaaggaatgccaatttgaggccgagttgggaacggccaaaaagtgaaaaatgtccatcaaaacattattgtacacccagctgaaattatgaaaaaatgtcgtgaatgtttatgttcgatgttcattttttggaaaaaaaattgtcactactgcatttggctcacaacttttcccaaaacgactcaattactttatggaagcttacaatgaagcgaccagtcagccgttcagctacttggtcataaacatgcacncaaatgcgccagaaattgaacgattgacaagcaaaatttttcccggagagaatcgtgaagtgtatttgccgatcgaatagtcgtgctgtgcacacctggacaaaaaatactatttaaggagcgaaagtacgcgcaggatcgcaaaatgtacgattttagtccatacattcgtgagaactcggagtttttcacgaaattagctgccacaaaatcggacaaaaagaaaaacgatttgctcaagggtgcttcagcagagcaaattctgggattagtggaaatctgcgcaaatatattaaaatttaatttccgtctaaacagacgacagagacggcgactggctttgtacgctgactactatcgagcaattgcacgttcacgcagtgagcgtacagcacgacatagactacaacagggcagcggaattgctttaggcgctattttggcgcctattctcagcgttctggccgaacagctgctacaaaaggttgttgcgaaatgaagcacactaaaaagatgatgttggttccagagagcgaatatttagcgttaataaatctgttgaaaggaggtgtaggcgacggagcagactcccttcaaaatgaaaaagcgttgctcgacgcacggattcaaaggaaccttaatgatcacaagatggatgctgatgttaaaatgaagcgacactcatggttgtacaaacagaggcatcagattaaagatatgatcgataataaaccacaaaaagtcattgtggaaaacgcgtctggttcaacgccgcctaatattgcaccgtatatgggcatacagaaggcggcaacaccgaataagcatctgctagatgaagttgaagatggcagaaaaacaagtcctcttaaaaaacggcggcgatcaatgaaaacacataaccgtgtcgtcgccacaaacacttccaacggagcgagctattgtgaagaaactgatgcttatacgtctgcgccagagaccgatttgctgctaagcaaaaaaagagagcaaaaatttctgaagcttaaaacagacccggtgcattacgataaattgcagagcataatagaacgaaaccccgccaaatacggagtcgataaagcgtcaggggaaattctaacaaacttcaaaaagccggttgttaagtcaaattacattgattctttgatgtatttgacagggcagagggcagacgcgcctaaaggccacagattttttgtccaaaaaattggcaatgatccagaaattatgacattttttcatgcccaacagggagagggtggtaataagcggcgaaagcgcaaaaggatagtccttgttaaggccaatgctataaaaacaattggactcaaccgcattgggcaaactaaattttttaaaccgctcctatgggcaaagctgtagaacaaaaattattagaacaggtctattatgatcttaggtcgccggcaagctacgccggaattcaaaaagtgttggcggaagcgcagagacgaaatcccagcatcacccttcgtgatgttcatcaatttctgcataaacagcgtacctacacgttgtttaaaccgcgaaaaaaccgcttccgcaggctaaaaactgtgcctagtggactacacacggactggcaatgcgacttgtgcatcatggatgcgctaaaagagcataatgacggatttcgttacatcctagtgtgtattgatgtgttgagccgtaaaatatttactgcagaggctgagtctaaaaaaagtgagcacatgattgcggcatttgagaagattttcaaaaaggccggtgtgctgcccaacaagctttacagcgatgcagggcttgagtttcaggcaaagaaaatgactgactattggaaacaaaaggatatcatcaaacacgtgatgtacagtccacatttgcacgcaggagtcgttgaacgcgcaaaccgtacattgaaggagcggctttacaaatattttagcgaaaagaacacaaagcggtggatcgatgtgttggacagcattgtgcgtaacctgaacagctccgcgaatcgaacaaccggactaaagccagtggacgtcaacttcaaaaatgccgatgctctacggaatcgactatataagcaaggtgaattgagctcaaaaacaccaaattttaaagcgggagacatagtacgaataagcaaagaaaagggtgacttttccaaaggttattttccgaattttacggacgaactgtttaagatttctaaagtgaatccgacagatccaccttcctacaggatccgtgaccaagacggagaagacattaaagggattttttacgagcaagaactggtaaaaactgttgcagaaacaacgcatagagcagaagtgttgaagactcggcgtagaaagggcgtgaaagaacactttgtgaggtggattggctactcagacaaacacaatcgttggattcgagacgaggatcttgtcaagaattagaacaatggatgaattttaccttgtacttccttccaacacaccaggcacagataatacgacatcaaattttacggttaggcttccacacacgttggagttggactcaaattggactgtcgctctagcatctataatctacccatattcatttccttcagtaggaattgatgaagatgacatcattagcattaaacttgttaatccaagctacagatttttggatgacaaaaaatttttgcacattgaactaaagattccaagcatgcaattttcaagtgtggaacatttgcggctgactctaaataacctaattactgaagcgtatcagcaacaaatttcttcgtaccttgacgacgatgccaaaaggacgaaacgacaagaaaatgtcactgatctttttttccatgaaaatccggtggattattgggaaaagattggcgaactccgtgcaaaatatgaacagctagaaaaggaactgacagaagaggagagtgaacttagcgccaacaccacggatgccgagaggagaaaagtgttagaaagcgagcttccacttaaacggcttcgtacacggaggaaaaaggaggaattggaagagctggaacgtgctgctgaacgacgtgatcaagaaagtcctgaagctgagcaaaaaaagattggcgaattcttccaccaccatcccgaagattataatagaaagctgaacgaggcaagactgatattcacacaccatctctcaggattacaagcggtgatgcgcaagtacatcgatgaaaaagacgcaaacaaaattcggcagcttgagtcggaggttgaaaagttgcgtctgaagatcaaacgcctacagcgtaatttaaccatcttcgaaaatgctacgctccagcgtgaccaccaaaaatctttgtcgcaatatgaggagctcagccaccagcagaacagtgcgtatgtcaaagaattttttcaaaaacacccaacaaattactggcaaataattcacaacaattatagaggtcttacagaacattttcagaagattgaagaactgcgagcaaaggcggtaggattaaaggataatgcctctttccagcaacaaattgaacgcgcaaaacaactgattgaatacagaagaaagaggtttgctgcgctagaattcgaggcaaaaaagcttgatgaatcgtcaatacggatggtggtgatcatgatcaagcagatgagggtccccaagcaacaacaactccgggagaagcattaagagataaactgctgcaaaaaccaaagcaatctgatcatgatgctgatgataaaccagatgagggtacacaaacgacaacaaaaacgcatggggatgcattaaaggaagagatattgcaaaaacaaaagcatgctgataatgatgacaataaaacagaggatgttccacaaatacaaacaacaacatcaacaaaaacaacaaaaataacaaaaacgcatggggaggcactaagagaaaaagtgttgcaaaagcatactgatgtctctaaaccaactgcgtccgatgcagagcatgaaactagtgatgtcggtggtggtggtgagaaaatgacgcatggtcaaacgctaattgcccgacttaaacagagcgaggagcagaaaaaagaatgggtagcagtgccccaagatgatgatgatgatgacaggccagcgctaaaacatggagatatgctgtggaaactgttacggtcaacgacaccgcataaccagaagcaaacggcgggcgatgtcatccaccgccaatttgcagatgctgaacatactcgtggacaggtaatgatggaactgttgaaaaacatcttagaagaaaaatctgacgctgctgatgcgcaccgtcaacaacagcaaaattatcctcgtcagaaatctgcacaagttcttcggacaaaaagcagaggtgaagcgttgaaggaactgatcaaaaaaacgcaaaatgagcagctgccacaatcttctgctaaaacgcgaggagaaattttaaagttgatgttggaaaatatgaagttttcccgggaggaggaagtaagctttgaaaaacttgtcgctaagcagaaaaccgagcaaaccgctgccgaatttgtgttcaacgatcttgcacaacggttcgtcatgaaaaccggtgcgggcgtcctgcatgtggatgtaagtaagcatcttgcatatgtgcttggctttgacaacattcgcctatttcatggagaacaggcgcgctatatgccggatctgtctggtggtgtt

SEQ ID NO: 2975 - DNA, 4256 bp, Heterodera glycines
ttcaaatttctttgaaatttccgggctctactaagggctcttgtgaaagcgccgggggcgctttcaacactgagacagcaaggaacacgaagcgcctaacttctatataattatctatataaccttcaaacaatttttacacaactttcaacattcttacaacttttcgcagaaattaaaaaaaaaattttttttgataatttgtgaaaggctaaattttacataattttctgcgcttaattactcactcggccactttgcactaatttatgcttagttgattaatccaaactttttacagttctattttaaaaaaaaattacaaattttctcgtaacaaaaaactcattagctgacggaaaacgagcaaaatcagtgtgaaatcatatttatacatcgagaaattttagaacgatgctaattcgttgggaagtttgtaaaaatatttatgattttttagattcaaggaagaatggtataaaaattaaaaagaaataaattcctagaaaaatttacggatttttttgcaatttaataacttttaggttttcagatttttaacaattaaaatccgcgaattaaaatcaacctattccaaaatcacagacttcaaattaatgaaaatttctttttccatcggtgcaaagttacagttacacgtttaattcccaattggtttgcaattattttgtcactaatttttggatttctttcattggttttgatatattttttcattatatttaatttgtccacatttgaatatttattttttgcttaaataattattaaaaattattatcaaaatttttcttacatttaagatattttggcagcaattcctttttccatttaataaatgttacttgagaaatgcccaattcattcacaaatatcgacattaatcctgtagaattgagtcaaaggtgtgacatttggtgattttttggtcaaaatcagttaattaattgataaaattttcaaaaaaaaaaaatttcagacggcgcctatctgcatagacggacccctattctttttcattgtttggattttatttaaatttaattcttttttccatttatatattttttcgcgatttgtgcctaataattttgcaattttcatctcaattttgttttaattttttctttgtaattttcctttttctctcaacttttctttaattgcttcaaattttctaattgtttctctttttttgttgatcatttggttccgttcctttttctccacccatttgctcaactgctgagctttcattatggtcattttgttccatttttatcatttgttcttctctgtcatttttgtcccattcgttaccaaatatttcgtcaaaatttgattggattttgccggtttcaattttatatgcaaagaaaaataaaataataataataataataataaacattaaattgcacaaattcatttttacaatttttaacgagatttttcttcgaatttttcaatttatcttcttcttttttcccaatttaatcaatgaaaaatcaaaaatgttctgatttttttatctactgatttttgaaggaacctattataaatagagaaaatgttaatgaataaaataaaatgataaaataaattgaaaaataggcaaatatttaaaattaaaattaattagggaaaataattttgcatataaaataaattaagcatataattaaataaaatatatgaaataaaattggcaaatttggagaaagtggatttaatcaaccattacaacggatgccagaaattttctcaagccatttagcgtcgattcgagagtaaatggcgtaggaggcttctgttttaaaaaaatatatttttttattatttaaaaagggatgtatttttagttgtttttgcatatttggctttgagtattttttgccaaaattggatttttaaaaaatttcgtagttttcagttaaaataattaaagaaagaaatttctcgcattttttcttatctttaatttaaaaaagtgattaaaatattgctaaaaaatttccggccattatttcattcaccaggagctgacgatatacattctacataagaagaaacggcaatttggacatagtctgtcccattgctggccaatactgcgctgccactatcgccctaacaaaaatgagcaatttcaattcaattaaaaaacaaaaatggatgagttaaacttttatttatttttcccatttaaatcattaaaattaattattatttaaaggaaattatttgaacaattactgattgagatgcgatcccacgaaagcaaattcggtcacctcgatacaatttacggcattcagacaattggacagcccgaccaatcaaataaggagcagagatagctttttctttcgcaacacattctgtttttataagaattattaatttttatataaaatttataataattttagacttattccaaataataatgcggcgaaataaattaaccaaaaaggtgagttaattttttaaagtgcgtcaaattaagcgaatttctcaacaacaaaaaatattaaattatcaaaaactttgcattgcattttgtgaaaatttcagctaaaaaaaacaatcatcattaagttcatttcgtatgctatgacgttagtcaaaaaaaccagcaaattaaagtattttttgaaataacttttctcaaaagaaactaaatttttaattattgaaattaggattgctccccgtccccgagctccccggtccccgaccccgatccccgacatttctgggccaattccccgctacgacccccgacatgtcgctccccgaggtccccagcccccgactttttgcccccccccccgactccccgacactaattcggggaatcagggaccccgagcattgttaaaatttaaaaagttaattcaacaaagaagaggggaaaggttgaaaatttatgaaattttgaacaattttcttaatattaattattaaaaattccgaaaaacttttcagcgccgcctatcggcaccgccggttcaaaaaatgtcccaaaattgcaaaaattggtatttttaggaaaaatctgttaacaaatttcaaattttcaaaaaaaattttcctcgcggctcctaacaccaccgccctcatcacccctttgttccccaaaagtttttctgaaaaagagcgccgcaaaaaatggtggtcaaattcgatgttgagacgggttcgcaaaaatttcagtttaaccccactcctttctacatatttttaaaccagggcttccatcgaaatttttcaaaatataaacaccaagtccaaaataagattttagtgtcaaaaatatgaacatttagcaacatttttccaatcagttatttttctaatttattcgatcaaattttatatttttagtctcctattatcaattttgataattttggggaggaaaaagcaaaattgtaaatttcagtaattcgggatcaaaagatcaaaaaaattttgcggtagaccttaaaatttcttgaaaaattgtgacattatgccataaaatttcaaaactataagtatatttaagaaatcagaataattttagtcgctaccccccccccccccccaaaatcagaatattcttataaataagaacaaatggaaaccccatgtttaaaggccaacttggactcactcatactggcgctaacgaaatcagatgattaaagtgaaaaaaggaagatttacgagcagttaaaaagaaaaaatggtttttttgggttaaaaaaaatttggccattccccgatcggggtccccgatccccgacaattgagctcctccccgccccgacccccgactttggcattttaattcgccaatacattaaagttcaaagaaaaaattttaatcctctattctcaagctcgagattaccatgtacctaaatttagtcccgttacgagatttgaaaatatataaaccgggcagaaaaaaattaaagaaagaaagtagggttacatgggtccgggtatttgggcaaaaaccgggtccgggtaccagaaaatccgggtccaagtttttcaacccggtccaggtatcgagtttaaccaggttctgaaaaaatctttcaaattaattttttttcatgaaaaaaagcttatatgttaaaaatattataaaatatattcatgaaaaatatttactttatgaataattgctgcccgattattcaaaacttttggggaacgaggggaggggggaggggggg

SEQ ID NO: 2976 - DNA, 5462 bp, Heterodera glycines
  unsure (1)..(5462): unsure at all n locations
ttttttanctagtaatctttccccatccggccagtgnagcagtattgtaaagaattgttcaattggaccacagtggatgcacatcttgggcagtttggccatgagttcggttgaatttagctaaattaacaatatgccaaaggatatttatcaagccaagttcgtcccattccaagcacatattttttttttgcttatttttctttttgtatatatttttttgttttattttttgaaaaaacacattcaaaaccccaattttttttctccacgctgcctatcggcactgccgtgctgaaaatttccttgcattaaggggtgataaagttcgaatggcaaaaccctgtattaaatttattattgtttttgattaatgcctttatcaatgccaaatcgttccatcccgttgtgttcaaattttctttcttgacaaagcctggatggatgaacacatttgatgggtttttgtgcaaatgcaactgaattccattgtacggctttccagtcctaatgcgttcagaactattgaacccttaaaaacaatcaactcatactgtatttcatggaattggatactgtattttattcagaaaaccccgacatttgcttctatgccaaaaatctattcaagtttaagtttttttaagccctgatagcctaaacagaattaaattaagagaacacagtcttttagattattaggagtattattgctgtaattagcactttttgtcaatatttcttccatattttggaatttcttagtccatttaaatccatggccctctgcttataataattgtttcgacttaccacggatttgaaaaataaaaattaaagcctcctcgaattaaattaaaatttgaagaaaacttttttttttaaatttacctaaaataattttggctccatctttaacttcattaacacaatgtgcagcaagcaaaacgaattccgatgaaatgagtgagccagagcaatggccgccaccttttatcttataatacacagtccacggcataaggttgatgtccatttttgtaccgccatacatctggccaatttttgaatgtaaaaatacacaataaatttttggcattgagtgatgaattttaaattaaaaattaaaaaaaataactgaaaaataattaatcaatgcattatgaaaaactctaagagctggagaaaatattttcatttttatgtttaattctataagtcaaaaaaagaagaagatttttcgcgcttctttttgccttagggttttgaaaattcataacaaaatgatttttaccgacaatatgaactttaaggtatttacattataaaacttaaagaaaatgcaattataattcggtaaaatttattgtcatttatgcaaaataaattctggaaatggactatgcctctttagaaaactacgagcatccatgttcttgaaaattggagctttttccagctgatgggagtaaaatcaaaatgccaaaaatatttttctataaaattttgcatttatctaattttttgacatacaaaaaaaaatcttttttcgaattattcaaggcttttttataattttaaatgaatgaaaaaattctttgaaccctaaaatgaatcatttgacgcgtaaaatttaatccctcggattttaaagctaatcaagaaaaattggcaaattggtttcaatcattaaacatccccaacattttttttcttacgagcggattgattcgtcttgcgctgcgacgcttttgggctgcctcaaaatcaaatggcatgcattgttttggtggatcaattagtctccattcgaatttacactcatccggcaccaccgaaattaaatccgacatgacgccgcccaattttgacacaatatccagcggtaacagccaaagtcccgcataatcagccaaaaatgggccaaaattggagtgggcaaaaaattccttgccaaaatcattcaactgttcctgtccatcttaatacgtcattagtttaattggctctactttggtttacacatctaatcagcgaactttccttaattcagttttttgagagtatattaaagaataatcaaagggatcacctaataatctaaagggatcacccttagctcagtcgttttcaagcattccatggtgaggaaaggccgtgggttcgagtcccatcgggcgagttagcttttatgttctactatagacataatttcatttgatatcaagaattacgcattgaccaagtaaaaacaaagttattgcctatgaaactgaggaaaatcactgattaaacgtatacactggaatatatccatttaatgattaccattatcgactgtatttcctgaattagagcccccgggggctctatttttcaactccattcgaaaggctggctttatttcaggggggttctaatttagtaaacacggtatttggaaaataaattcaatgcaagtgattgttattaataattaccattgtttaaaaggacaacattgccacaaaatgagtcaaatttcaattcaatgtttgtgtcgtttggctttgcattgctacaatataagattatttatttcatttaattaaaatattttaaaggatatattttttgttttactgtattttgttaaaaaaattttaaaaaaatgccaaaaacagaaatgtaggcccgaagacggcgggagtaaggacacccgcgggaattgttttccatgaaatttaccattttcaatgaaaattagaccatttacgacatcttcggtgccttttaaacgccgaacagttcaatcccaatgggaaatggttccgatgcttttgataggttaacccctcaaaacgatattttcataataaaatgtgtctcctaaaaatttgaatttttggccaaaattacgttaaaaaatgaaaaaaccgactttttattttctaaagtcggcacttctttgatgtaaatttgcgtactatatatactaataacccaaacagactgacttggtgatcaattcatttccgatggtcagagtttcgttggcaattgaaaagtgaattttcctggcatttggcccacactgatcactgatcgatggctcactgctgacgttgaacaattgatcgaaacgaaacccttttttcagtttccacggaaagcctttgtcggtcattgtgcggttgtagcagagccaaaagcttaattaattaaccaattaaattaagcaattaagcatatgaccaaattaccttgagcatttcttactacggtaaaacacttggattggccacggattggctttagacacttgcaacgtaagagtgcttaatgttttaaaaattaatgttaaagaaatttttctatttattataaatatttataaattatttaattaatcaaaaaattttttggaaaatgaaggatcatttcatcaaattattaaccctgaatattcggaacttgaacaaaaatttttattatgtcaattgagttgtatcattgaccccatagtatttgaaattagaattttgagccacaaaaattttaatttcaaatttttagaattccaaattagaatgtcagattttagaaaaataatatcagattagtgtttaacttacttgtttaggaatttattttatcatccattttttgagaatataattagacaaattgtattgcttactttccatttaatccggcaaaaagttcggaaaaaacaaacaaaaaaatgcagaaaataaaattagccaaaaacatttttaatacaaataataaaaaaaattggaaaatttttacgctttggaatccgtaaaaataatgaaatgattttgctttcacttatttggttgatggaaaacgagaaaaatcgcaatgattcaccataatgcaacgataaatgatagaatgatgataattcattgggaaaatggtaaaatatttatgttaatcatttttaatggttttgtgaaaaagagcataaattatagttttggttagatttattaatgaaaatataaaaatgtgcaagaaaaataaattaaaaattgaacaattattgaataattatttgtttttagataatactattataatcagtgattggactcgtatttgaatggaaaagtacgtacttgaaaatcatgcgggaaaatttgaaatttgcttacctttaagattgattgtacttgaaaatagcaatttaaaaatttaaaatttttttgaaattttgtaccaataattttaatttttttttgtcacttttgattatatgtattctgatcattttgcatttgttcacttgatccactacgattttcttcactttaattttgtccaatccattgccatatatttcgtcaaaatttgtgaaacccaaataataaagaaaataaaattttctttgaaaacaaataattctttaaagcctggaattcacagaaaatagcttcacacagacaaatatggcgcaaacaattgatttttgttgttgattttgtctcaaaataacttttaagaatttttttttttataatatgcaaagatacgcttcttctccaacaagataattgtgaaatcggagaaaatctctgaattttaagcaacttagttagccctgtatttgaattgaatttgaatccatttttcaagaacattaggatcaattattggaaatttattttcttcgttcaatcaattgatatttttaaattttttgaaaaaaaaattaataataaagtgagaatttctctttagaaataaaacctaattatttttattatagaattataccaatactatttaatgattaaattaaaaaaaaaaattaatttgtaaatttaacaaataaatttaaatgtctattttggggttttaatgaggagtttcccaaggaatgattggctggcttatttgccaaaaaatgacaatttgtaacacgaaattgactattcctcatacgaaagtttaaaaatttagcaaaaaaatcagggctttttaagaaatttattgtttcggtaattttttatggcataaaaaccgtaaaatgttttggtttatggtcttaaaatgggaaaatatgacctaaaaaaactcgataaaatggagtttatttaaaaataaagtttaaaagtacaaatagcagagacaaatcacatatcaaataacataaactcctacaaaaaatcacttttcaaaactgaggaaaatttctttttccaagtttttagggtttcatatttaatttccaatttcttagcaattatttcgtcacggatttttggattttcatctttcatcttgaaatattgcttcatcttatgtgatttatcttcatttgaatatcgtgcttaaaatgaaaataatttaaatatcataataaaatttctcttacttttgtaatattttggtggcactaattcttttttccattttcgaaatgtttcataagaaatgcccaattccttcac

SEQ ID NO: 2977 - DNA, 2232 bp, Heterodera glycines
atttttacttttgggaaattgaattcattgcataataaatgaatttattaatatttatccgctttttaatatgaatattcaattttgttatttttctcttcaacaaatcttttctaaattgataaatccattaattattagccgaaaaatcaattttttactaaaatttttagaatttttcttaaaataaatgaaataaaattctttaacgaaaatattaaaaatgtacaaaatggattttgctccattcaaattacttctccttttatgccagaatgccgagaggccccggtggcccggtgagcccgggcgcgccaggcagccctgccacacccttgggacctggcattccaggcagacctggatttcctgaaaaaattggaatctgtagtttaacgaccaattaatttcgaaataattttagtttcatctatggtagcaatcggaaatcgatgcctattcttgagtatataaatatgtacgaattttttcgtattttcataattttcaaaaaacaattacctgtaactccttgctatccagccattcctggcggtcctgcgaggcccttctgtctggaaaattccatgttcgaacttttgtccatttattcctagaatgcctgataaacgatcataccttcttaaattcaaaaaatattaaatttttttcttgaaaattcaaaataccatgcccaatggtacctaaattgcttaaatttttaaaaaatcatctcagcgcctgtcttatgcaaattcattgcattaattttgttcgcttcttaatattaatcttaattttattatttgtattttcttttaacaaaactttgccaacagtaaaattgtacaatcaatttttcactatgatttaaaaatattcttaaaaagtatcagttaatatgtatgtaagaattattatttattgtgaaatgttgttaatatttttattaggatgtgtgtaatagggctgttcgaatctccgatttctgtcatttcgtctcgactaaccgagacttttttacacccttaaagattgagttttttaaataaaataaaggtatttaaattaatatattttgtccattattatatggccttagcattcattatctgtgacttctgcttcgttttttggttttatgaaactcgattcgatcaaattgatgtgaaattacggtttttatttattttttcccatttgatcaatttaacaaattaagaaattaaaatttaacaaattttttaaagaaaattccaccttttcttttcaaatttacatttgctttgtaaaaaactattttcgtcttaagggaaaaataagaattttgaattttcttttgttctgttcagttttgggtcgcacgctttgatttgataattgcttgaagttcctgtaaaaaaataaaatttttcttaaaagttttttggaaattttttttttttgctgcgattttctgtcccggcgaagtttcggcggcgacgttttggggtgtaccgacttttatttccagtaggacacatggaaaaaaagaagtatattttttggtccaatatatttaagacggaatcggcctttaagtactaagtcggaactggcgagaccgaagcggccacacagaactgacccccctaccgttgtatccttcgttgagttgagcgttaccagtaccggtagcagccgggtaattagcggtttgttgtagcattttaccaatttttttccgaaaatctacaaaactagttccgcgggactcgaatcattggaaccaaactcgactcgggaataaaaaaatacggtcaagatacaaatgacaacttttttgggcaagattcgaaatgggacagttcttttgtgcttaaggtatataaaaaataaaaaatatatcttaaaaaaattatcttacttttatggtcatttggcaacaattcgtttttccatcttcggaatgtgtctttagaaatgcccaattccttcacaaattctttctgtttgccttgagcatataaatttttaaattcatcaattcgttcaatgaattcgcgctttttctgctcataaaaattctttttcattgtttggattttgtttaaatttaatccttttttccatttatatatttttgcgcgatttgttcctagtaattttgcaattttcatctcaattttattgttattttttcgttgatattttcctttttccctcaacttttctttaattgcattaaatttt

SEQ ID NO: 2978 - DNA, 2366 bp, Heterodera glycines
  unsure (1)..(2366): unsure at all n locations
aaaataaatttatactgttatatataaaaaaagggtggagttacattttttagacattatggatttctttgttcaaaaatatgtttgcttttgaataattattaaaattaagggatgaaaatcgatagaagaaaactcttgcacaaatttaaactcattattgaaattacaattatgcaaaataaattaaaattcagttaaaatgatatggtaatatatgaaaattttgatccaatttaaaataatataggcatattaataaataaaaattaataatattaaaagcttcttattttaagaacacgaaataataaacaaaaatataataaaattgcatcaagaaagtgcaaataagttttctaggctacctaagacccaataagaaacaagaaagatgtgacgttgcacgtgaaaggcgagtgcttaaaaacaaaaatgtaaaaaatagaaatgataaaactaatgtattgtattttattttaaagtaagatatcttcatatgtaaaaaaaaatttaaattaagcgttttaatattcgtttcggttgaaacattccttatttggggaatttaaatatatatatatatatatatatatatattttattttattttcggattgaaaattcaatacaatttaatttgcaaaatcaaaaattaataaacaatataaataccaaacatttaatataaacattttaaaaataatattcagagaaaaaattttcaggaattattaaaaaaatggattaatttttttacttttataattaattaaaattattgatgataaattggtgaatgactgctttttacataaaaaataaagtttattgaataaatttaaaagttattttattatcttaattataatttaaatcttatttaatttattgaatgaaacccataagaatttatctgtaaatatttaattaattgaaatttaaaaaggacctagtgcaattattggacctgagaatcacatactaaaatgtaaaattttaaattcataaaaaatatttttgatcgaaaaaggctgagttgaaaaagaaaaacatgtatatgtagaaaacataaaacagaattttatatgatcataaatatttaatatgaagaataatataaaataaaaataattaacaatttattaaaaaaagtaataattttaaaaaatattaggaaacaccacccgtatatttcaatggatattcgtcaaattttttgtctcgaaaaatttacaaaataataaatggaaaaaccaacaagtaggcaagtgaaagtgattaaatttaaaagaaattaaaaattactataaataacacatgaaaaataactcccaaaacaaattaaacttaattttattttgcaattgaaattaaatgaaaaaaataattaaaaaaataattaaaaatttaataaaaaaataaagatgaaaatctattcaatcattaaaataatattttcagtagtaataaggccagattcggagtatcaaactgttgcagaacagttgcaattttttcaaggctcttaatagaatagctctacaacggcagagggcaagtaaacacttaaaaaatatattgctaaaatttacgcaattctaattgcttctgggaatttgaaatactaaaaatttgaacaaatgcaaaaatgaattgaaaaattattactaatataaacaatgtcttgagttaaggattaattatattgaaaaatcagctaaataaattatataatcttctaaaaacaattatcacaatatttaacacattttcaatataagtgaaagaaattattttaaaaaatttctcttccactataatttcattaaaatggttaataatgataaaaatataaacatatttaataaagattaagctacataatctcaggttaggattaacttaataaaaaaaaaaaaattcaatttgcaacttacaaaaaaaaaaaaaatttgaacagcataataataataataaaattatataaaaaacaattaattatgctcgctcgaaagtggaagagttattagacacatgtgaaaatatgctttatggataaattattaatattgcatagcaaaatgaataatattatttcgaaataatttatagaatattattatttaaagtatttattactcatctttgcatatttcaataccataattaacaaattggtttttgtttttaaaataatatttataaatcatttaaatgtggcattttttgtccaaattaatgaacggcaacaatgatcacaataaactttgctgacaanagtaaataaataaatattaatttaattgcataaagcagtaccaggtacataccaacttacaccaaaacaaagggcagaaaccgct

SEQ ID NO: 2979 - DNA, 2084 bp, Heterodera glycines
  unsure (1)..(2084): unsure at all n locations
aaaattaaataaatattaaaatgtttttattntaaaggatatgaaataaaatttataaaaatcnaataaaatggtactagtattttaaaatgaaactcaatgaaaatatatccgaatntaaaaaatagaattacgaatcatttggattttgtttaaattattccttatttttattctaaaacagcagataaaaaataataatttaagagttattgaaaaaactaagtgaatcaaaatcaattatggtttcaataattataatttaaaaaatataaagtaaagtactaaatatgagtgctaatcattttaatcaattttttaattagaaacaacaggatgataataaataataaaggtaacatgtgatttcgtcagaagtgatttcgtcagtgagtgatttcgtcagaagtgatttcgtcagtgagtgatttcgtcagtgagtgattttgtcagcgaccataataattttttttttaaaaacaatttagtttaattaaggctaatagtttattatccgtattaactggttaattttaatttgataaaattgataaaatcagttcagatctcaataaatttaaaatactttatatataaatataacaagtgaactcaaaagttcggttgatattttcgccggccactcttatcagtaaaatattggtttttgtgactcgtctttgctagtttatctcttgtatgttaattaatttctcgagggtcgccattatcattctgcattaacatcgagactctcgtgtgttcgttcatttctcgagactcgccacccatttattcgttttggattaacctttgaattttcacatgaaattgcttaccacaattttgcttttctcttttttgagttattcaatggcattagttagattttctgtcggcaaaacgaaccgtgggcgtcagctgatcacgcatggaggctacgaataccttttcgaagtgaaagttttcaaaaaaacaaaaaagcagttttctaaggctgactcccgcacggaagatggttggagttactggaaatgtcctcgccgtccaccatactgccctgggagggcaaccgtgcagtcaaatttgtttgttgctgatgacggctcaaattacagattaggtcgtgttactgcacaacacaaccacgaaccggtctttggttcattaactgtgggtcaaattttagtggaaaatagggggaaaaattatataggttagagaagccaatgaacgacttcgtgatgaagcacgatctgattttcctacaacaagtcgaaatgttgtgaggcaggtcagagcggatattccagtcgatgttcgggttggcgttgctccatctgcttcaaacatgcaatggaactacaattacaccaaacgaaagcattttgaacaagtcgatttaataaataaataaaataataataataattaaaggaaggcgatattgggcttgatgcaatgcccccaacgaatttattggttccaaatgcactccaaaatcgtgtcatttacaaccaaaatcttcaggggaaaaaaatgctcattttttgttcacagtttggtctcgatgcactcagaaattacggagaaagcgttgcaattgacggcacttttgaagtacgtaagataaaatcaaaatggaaaaatgtttttcagagttgcccgaggggatttggacaactttacacaatgtcggttatcattgagcactgtgctgtcccttgcgcctacgggcttcttcctaacaaaaattcccccacctaccgcattttttttgattccatctgcgcttctgttgggattgggtggtaccctgccagaattatgactgattttgaagccggggcaatcaatgcagccaaaattgtttatccaaatgcaatcgtcagtggctgcctcttccacttgggaaaggctttttttcgaaaaattcaaagtcttcctcatttgttggaccgctacaacaacaatgaggatgtccgaaaagcactgcgttgcgttcaagctcttgcctttgttccattgaattatgtgtacaattactttgccatcgccatgtcggtgttagagccaatcccaaa

SEQ ID NO: 2980 - DNA, 2395 bp, Heterodera glycines
ttttaatagaataaagtatttattcgctcaatataactttttttctatcaatacaatttttacctaattgggcatatcgatggagaaaaaaatatgaacaaaatgtaagggttttaaaaacaaaaaaagataatctaaaaagttatggagtaattaaaatttcgcatttctttttctctcctttgacgtactattttcatgtctctaacacatgtaaaaagatggaattcgtaaattcgaatagtttttgttataagggtacaaaatcacctcaacatttagaatcaatagaaaaattattagttttcgcattttagttaaaaacagcagtttatagacttaagttataacttgataaaatgaaagtatcacaacttttttctgagatgtcaaactgctgagcattcacttagaaaaagattctccttttcaaaaatttttttcagatatcaaatttgttcggtttggttgggaattaagcgagttatggctgatcaaattaaaaaatacaaaaaaggcatgtaaattaaaaattagcgcgcaaaaattcacgacaattacgctctttggcgttatgaacaattttgtctgacactgggcttgaccaaaacacattctttaaaacaattttgtcaaattttttggtaatactgccttttactggtcccattaaaaaaagagaataaaaaggcttttttttacgattattcgttcttttagggggttatcaggccgctgatcacgaatatgatatccatttcgaccaattcctaaacccgaattcgaacataaaatcgaaaattcaaattttcaaaatttggatttatgtttcaaaaagggtttaaatgcacggaagcaaaccgaaagccataattagcaataaaaaatacatataagcatttttaagacgaaaaattcgaaattctttaatttgtgaactttctattttttgttcgaattcgagtccgggcttaggaattagtcgaaatgaatgacatgttcttgattagcgaccccgataacccccgagtagaacgaataatcgtaaaaaaccgcgtttttattctcttttttttattttcaaaaattataatgtcaaaaaacatagttatttccttgggttttcggggtcactgataacgaaattcggcatccatttgacaattcgaaatcccgaaggtgaatttgaacaaaaagtcgaaagccaaatttcgaattctcatttttctctgaaatggtttaaaagaaattttacttaagtatttattgttgcctttcagtttgtttccgtgtttttaaacaaagtttgaaccaaaaatgcgagttcgaaaatgtaaatcttttggttttttaatgaattcgtgttcggagtccggaatagtcaacatggatgctggattcgtaatcagtgacccccgaaaacgcaaagaaatgaattgagcagcgggggaacaaactccaatattacttctgcgcttatgtcttatggaggtcggaattgaacggatggaaagcgatgagaatttggaaaatttaccaaaacaggattggacgataacaccagaaccaattgtcattcgtggagttgggcacctaaccatgtgagaagagtaatttaagacaattaggattaataggacttgttttttcttcgaaggtttggccttaactcgcatttttcaacggaatttcctagcgctctgacaggaaaattggcaccggaagagtttgacgacacattgcgacgtgtgaattacgttcttcagaggaatgtgagcagaaacttgcgctggttgatctgcggattgcttttttgctgctgcagcttcggcatttcgttatggccggtggtctgtctgaacagaagggtaagtggtgaaaaaaaagtttatttcaatttttgtaaaaaccaaaattcaagactatttccgctctcgagaaaactctggaccatgagaaccaacaattgtacgacaagctcggcttgcattggtagcgcacctttaacttttcaatttgtttgctacaaatggcgatttcaggaagttggccaggctgcccgttgagccgtccaatcgcctgacagaatatgtccttttgcttgaaacgctgccaagaattcccctttccatgccggattagcacgtgaaactgtttagatttgactgcgatggctctttctgtccgttttattccaaatgttcccatttttcactgatccctccaaatcatcccggttccagaccatgtactctcaataaatctctctcctacgtcattgtataattacatcccatttgtccttactgagtgagtgcctataccaaccaaaacatccgttgtaaatgaacccataaaaaggacctatttttcgcctttgtccatattatattca

SEQ ID NO: 2981 - DNA, 1088 bp, Heterodera glycines
  unsure (1)..(1088): unsure at all n locations
tttactgatgatgatctcatgtgctgctgctgcctcttccttactggaattgcggccgagtcgcagccaccaaatgactcccaaggaattatgcgaaaatgatggttcggatgaatttgttttttgaattttgaactccaattggaccgtttttagatctctgtacagccattctcgtggatacaattttgggctttcagacgcataaaatgagcttagagttcgttttcttttccatttgtttttgattgattgttcagtcataagccattggcagaagaagaacggaggcaaatcattgaaatgctctccaattttgtggacaatggcaacgcaattgtactgacacagtcacttttgtcgttgagaacggtcacggattttttggcaagcaaatccgaacaagaagtgcaaaacttcaaagaccacgtgagaaaaggactttatggaaaacaaaattttcgttttcggatggctgcttttctcccgcgacatttaatttcggcgaattatttaggtttttttttacctgaagagcagagaaaaggtttcggaattataataatttttagatttcttcctagaaaaaaaaattaaaaatttcacttgaaaaaatttttttcggagcggggggagggttgggacattgtgcatccgtccgcttcttcgtccgctgtttttccgtgtccattgccttcccaatttcgctttgtttagctcctccgttttctgatgatgtatgacgtctcttccggcttcacatttcgcccgtgccacagatacaacgcggagaacagacgcggggctatgctaatagcgaccagaaattggcaaaagggcgacaccatcgaatatcttttcggagtgatcggcgaactgagcaaaacggaggagggggcgattctgcgcaaggacatcaacgacttctcagtgatgtacagcaccaggtaaacgcccgggggcatttggtcggtcgcttttcactcgttgaaaattcggattgtttcccactttttatttaccctttcggaggaatacattgcgtcaagaatgttttcggttttanagagtaccaacgatcttttttg

SEQ ID NO: 2982 - DNA, 1909 bp, Heterodera glycines
actgttattgttgaagcaccaaccactataccacacaatacacatgggtaaacaaaagcaaatttactttatttaatataatttggcaaaatggttaaaaaaattcaaattttgtttaaattttttgcctttcctccacaaaaatgtcattcttagcggtgtatatttaaccccgaccccgagtcggggttaagggtcggggttgtcggggctggaatcgtcggggtcgtggttaacctcgaaaatggcaaaaatgtcggggttcggggtcggggcggggtcgggggcccaaccctaattataactcttgaacttgttgaccgaatccagtaatcttgatatcattcgaaagctcttcacaggctctattaacctacgaataattgcagagtttgtcgaagcataaaaaaagatagagataaaaaacttcgaaaattttgcggtttcatgtgacaaccttttagtgagctgcttaatcacttagaaatagcttagaaataccatctaaacatttaaagttggccagaagaagttgacccctgccgcgttttagagtgtggggtgatcggaagaggcggcgggtcatttcagtacggtatttaattattttaatttattattagctttgatgttcagtatggaatttaataattattttaacaaaagtaagtcaacagtattctaaagaagtgtaacaatccgttcttgtgccgcatcttgtattccgaataaaaagatccgttaaatcacagttttttgttcacggattaacataattatatttttaagtgcaaaatatttaaatttatctttgactctataatattattttctattgtcatagtataacaaacatatcattgctattatttgtttacttacaacaaaacaaatattaattttttttcataagttctggcggtaagcacaattcattctcgtcctatttaaggtcgttgattatgttgaaaatctcattgtttttttcttgttttggaaatttttttaaattttattattctagtattttgattaaaatgttattgcttttttattttaaatgttcaaatttcgtattctctcgacgtaagcaaaaatttgaaataatccggttaaaaaattctttttattatttttatcattaatttgattttattaaaaaaaatgttcgtttattatcattactaaatgtcgatatttaattgataataataaatttgattttgatattcaaaatggaaacataaaaatatttttaggtactcttccgttggcgattagttaactttaacgtatttcgtgtcattatattcttttgattgcatatttttctttattttccccattctgtattcattttcaataaattttcatttattcgtttacattataaatttatttgttgtttttatcttttaaatttgtttatgagttttattaattatgcaattccccgggtcgtttcgccagttgtttataagtcgttaagtttgttaaaatttatttttatttaattttattctttttgaaaatattttttattttattgattatttttattactttttatttaaaatgttcaattttggcattttttggtgtaattaaaaaattgaaatagtccacttcaaaattattttttatggtttttatcattatttttatttatcgataagaaatttttaacttatcatataaggtttaattatgctttttttttgcatattataaaatagcaaatcaatttttaatgaattttattttctttagaaatatattacatttcattataataatggagaaatgtagcatcgtttatacgggcgagtttcaattaagaaatcataaatttatatcaaaaaataataaactagtatactgccatttgtaaataatttatgtctttctt

SEQ ID NO: 2983 - DNA, 1610 bp, Heterodera glycines
caattttgcgcccccccccccctcgaattgagtagagcttccgcaagaaaaacctgattttttgtggatcaagaagccaacaatcacgtaaacaatgatggtaaatgcattacagacaaacgttattgaagaaatattctggcctccattaccctaaatgaaaaccaataggaaaattgtagactatttgttaatgatttaaaatggccatacaattaacagatcgccaattgtgccggtgaccatcaaaagtggctttttggatgttgattcaaagacaagtaaaagattgtgtgatgaaatgcacacgcaaacaaaaatgattgtgccaagatacggaattttcttcactgttcgtggactaaaaaattttcgttaattatttgtctcggtatccgaaaaccccaaagaaactttttcattttttttttgatttccatttttaaaaatcgattgaccgaattatggtaaattaggcccattttagtcgaattttatataaacgccaaaaagggtgttgccggtctcagcaaaaattttgaaaaatttacaatgccaggatgaggacgcacaacagtcggtccaacccagtgaatgccatgattagcgaaattccgctgacagcaaacagtgaaatcgagcaaattttgatggccaatgaaaggggaatgaaattgtggccagaaagtgccacgtaaaggaacagcaaatggccatgctggtggagcagttcaaaaaaggagcaaagtgcgagcagaacattggcagtgccatggagagacctgaaaaatgatgggcaacaacacatttttaagggggtgcaataaaaaaataatttcaatttacttgaaaaaatgcattaaaatttttggccccggggtggggtcagttcgtcgcgaaccgattcagtaccgccaagtttgaaattttataattaattatcggaatagatttttagacatttatttaagttttttggaaattgtgcaagctcatatagcagcagacgtctcgtccctcactttgtacgaaatgttgtccaaatgaccccaaaattggcaaccattccgaatatggcaaccaaattgattgcaattgccccgattatgagtggccaacatggatacacattacggtacaacaaatacaactgtagtaattttttgtagaaatttaaattaaaattccgaaaaaaattaccgtattatttgcgttcattaaattggtcaagtcattctcttccatttcaatgcttttggtaaggtttagctgatttttaaaaatatatttgtgttattgtgtcccaataaatatttgttttaatgctgaatgctaaataacataagtctcactaatttaatattctgaaaatgataattaaatttgaaacggcttttcatttactaagcgttagtaaatttattattcaatttacgttattgactcaacatgaattgacagtacactaccctttttaatgttttacgttaaatgttttattaaatttaaaataaaaaataaattaaatttaaaaaatcgagattttcttaatgcagtgacaaatttaattaactgtttttgtaattcaaaataaaaattctatttaaaat

SEQ ID NO: 2984 - DNA, 979 bp, Heterodera glycines
ttgggaactctgtttatacttcatacaattaaattttgctttttttcttcttttcgtttttgttcaataatatttacatttattcgattattaaattttgaggatttattaaattttgacaaaatttattaactgatttagtcaaattatcttaagcaatcttcacaaaaattctattggaatattttttataaatattagataaaatttttttgatattattcaacttaatataattttaatttcaaaaaatcaatgaataaatggaaatcttggttttaataacaggaaaagcatatgccaaaaaataattaaaataggaaaatgttaatttactaaacaattggcaactcaaaaatcacatctccgaaactgaatcaaatttctttctccatgttcttaatgttgcaattccaattcccaatttttttgcaatttttacgtcgctaatcttcgcatttctttctttaattttgaaatattcttttatttttcttaatttgtcctcgttggaatatggtgcttaaatgaaaatttataaaaataaaaatataaaaaatctgttacttttaacatattgaggcaccaattcttttttccattttcttaatgttgttgtattaatgcccaatttcttcacaaattcattctgttttcgttggccatataagcacttaaattcatcaaactgttcaatgaattcacgttttttctcatcataaaaatgcattttatttaaatttaattgttttttccatttgtatattttttcgcgatttgcgcctaataattttccaattttcctctcaattttgacaattttttttgttcatattttcctttttgcttcagtttatatttaattgcgtcaaatttccgaattatttctcttttctgttgatcatttggttctcctctcgtgttttgatcacttttgataacattctgattggaatattcacccatttgatcaactgat

SEQ ID NO: 2985 - DNA, 7792 bp, Heterodera glycines
tattttttatataaaacccagacaatcctaagaaaaatactttcgcttattcaccaaaatcgcattatcagagcacatttcatcaaccaaattggatgtcaaaaaggggatacaatggaagggataaagcggaagacgggttttgctaaatccgagatgactttttggctggttttgtgctcatcgtttattgtttggcccgtgtgacccgctgatgaagaaacagtaaagtggccgtatttaatgggagtttcactaaagcattttgcaacgccaaaaatttggcttaattgttttagccagtttattacatcttttgtgttatttaattctaagaataataaattccggaaacaatttctcgaaaattcttagaattccattttctttgacaggaaaaaaagtttagtccccaaaattttcataataaaatttcatcactcttttaatgtttgcgcaaaaaaagctaatttaatttgcctgccaatgaatgtcaatttgtctcatgtttcttaaaaaaattaaaaattcaattaactcgagaacaagtagctctaagcaacatttaacaaaataaaattaaataatcaagagaagaaatttcttgttctttaattttaataaaatttaaaacttagagtgttcatcaatttattacatttaaaaaagaaactcagaaacaatgttttatataagaaaatgtgaacaaaaataaaatttttttgttaatacataaataataattttccctgaaaatttatgcagtttcttcactcaaataagtggctttaagtgtttgttgagtctgggccctatgattaatatttacataaattttttccatgaaattttcttataaaaaattatggtttttaaaaaatttgtgttgctttgccagttcccgatgcccattttttggcgatttgcgccgaataattttccaattttcctctcaattttggtgtgccatttttccattgatattgccctttttggttcaactttttttaattgcttcaaatttttgaattgtttttcttttctgttgatcatttggttctccatttgtgtttgattacttttgatattattctgatcattttgcatttgagcaattgattcgataccattttcttacttggcatattgtcccattttttgccgaatatttcatcaaaatttggttggattttgccggattccatcttattaattaagaaaaataaaaaaatattaaaagccacaaattcatgtatagtattcagaatactaatagaatgaatttatttattggctttttaatattaatattcattttattatttattttatctttaataaatctttttccaacattaaaatgtcacgtaattctgagcaatgcaatcaatttttcactcagatcttaacaaatttttttttttttttttgcaaacaaagttaatatgacaaatatttatatttttgaataaaagatttttactaaaatatttttttctgaattttttaaaagtaattggatcgcatttgttttttaacaaaattcttttggaatttcagaaaattttcaaaaatttcttatggcggcagctttggcaccctgccggaacactaatttattttgatattaatattgaattaaaaatccataaaattgctaatttttagtcgaatttctttttttaattaattttaaacttttcggaattgcccatttttatataaacctattaataaattatacaagattttgaataaaaaattaaaatattttaattttaatgctttttgatgcttggcatttttttaaatatatcatttcttctatttagtgatgtcattttgaaaaatttttccgtgcgatctccgggtgaaaaatgcgttaaattttttacattttggtgggaaaacaacagcaaaatgaagcagaaataacgacggacggacattcttttgacaaaataaaatgaaaatggtaatgataattaaaatgaatgaatattccgttgactgatgcgtttttggggagagtaaaacggtgagtgatcactccaactgatcagcagcagagagttagtggtgttccgtggcccatttcgctcactgccattttctcaaagtgactcatcaattttcggcaccatcgattgattacattattctctacaactatttaagcaatcaggcgaatgattttgcaggaaattctactttttttttgcaagtacaacgcccaaaataggtccggtgatcagaacgaaacaccaaaaacccaaaaactcactcaaagcatttcagagctttttgagcagcacaaattattatttttttttgtcttcatggttatgaagaaatttgtgtctaatgaataaacggaatttttaatgaattcaatttaaacgttttattgatagtataaatgatggaacaaaaagtaataaaaataatttaaaatttaaacaataaatgcaagcttttgggtgaattaaattataaaaataagtaatgcttgggattgttaagagagtattaaatcaattcttattaatttccgcctaattacacgcattcttttgccaccttccgcacatttggaggcgaatatgaccaattgcagagagactgtgaaaaaagagaaaataaaaatataaaacaaattcattttaacaaaaattgcacctgaataaatgcagaaacgaaaatgatcaaattcaaaacggagacgcagaaaagtgaccacctgacaaatgagcaaagttacagaggcaatttgataatgagaatcattaggaaattaaattattttattagaaaaagtgaaaatgaaatttttaatttaccaaatgaggaagaaaatcttctcattgaaccaggtgatgcgcagatggcattggacgaacacgttcggagcaaggacagagtgacaaatgatcagacgggggaaaatgggcagatccttaaaagggcaaaagttcagtgattaagagagtatttttcggtgtcttcaacaaaaaacggatttaattaactttctaattaaaatttaaaccaaagtgccgaaagtgtccgaaacaaggcaaaaaattgcatatagagtaaaactactgaaaacttgacaaagtttcgcgctttatctttgaaatttataagaaattttgcttagataaaattatgcgctttgaaaatacataaatttgctgaaatatttgaaataattgctaaacaaaacgattatgtttttaaatcggatttgtccttaaaaataaattaaatattcttaaattagtcattcccttcaatttccaccttaatttcatcaccattgagcaatgcttttcccacttcaatgccccaccagcggtgccctcggccggtcaatgcgttaaccacgacaaattgtgccacggcatttgtcaacaaacaagctaaattttataaacttagatttaaatattttaaattcgaagatttattttttttgcactttcttaaaatcactcaccgttttgaagcaatttgtgccgcgtccattttggcatatagaaaaatgccgcttggataagaatcattaccggcaaaaactgaacaaattactcacagttttgaagcaatttgtcccgcgtccattttggcagatagaaaagtgccgcttggataagaagcattaccggcaaaaactgaacatattaacaaattgaggtaaaactaataaagcaaaattggtaaaacatattattatttattttattcttttaatcatttttacctcgtagaaaaaaattgctgaattgttttggtgattcgattgtgttgttccgtcctcattgagcacttcgcacacattgaacccaaaatcgtcggttttgctttttgatgaatgctaaaattagaataaattaagagcgatgagaatgcccaaaatgcaaaatttgaagcggtgggaaaagccaaaaaaaaaagaaaaaataataaataaaagcggaaacgaatggtaaacgaagctcacatcccattttggaaaaagattaacttactaaacatttcatcggttcatatccgccgacgccaaaactaaaattaatttgagcaattaaaacatttatttttttattttttttttcattgcaaataaataaaatatttttgttaattaatcacataaatgcggtggtcagaactgcgaagaagacgaacattgaaggaaaaaggtgaaaatttagctgatcaattcccatattaaagaaataaaattgagattaactttaatgtcgaaattaatttaaaaataaaatataatggaaaaaatgaatgataagtagagtgccggatttataatttgccggtttggaaataatttaaatccctcattaccccggcgggaggggtccccaattctcggcctattactgtccctgatcagaccctggacttcaatacccaaaataccgattcgcaccatctttgccaccgaaggagtgccggggagggatcccaatttaaaattaaaatttcgttttttttggctaaaaatatttttcagaaaaataatcccggcatttatttgtaataaactgaacggaatagaaaatgcggtcacaaaaacagacaattggacacaaatttaaaggatttgttcagattattaatctgcaggcaccgaaaagcaaatgccagcggacaaagcgaacgaattgcctatctttctctgtgataattccgctagcatttgttttttgcaaatccgttgcttcttccctttggctctcagtgattgagcgtccaccaccaaatcaaagcaatggataaaacccaaaagccccccccccactcattattttttcaattcattcatttattcattcattttttgctgtcagtgtggcctgccattcattgaatttacagcagtcgaagcatttgcattttgctgcgattcgacggaccaaacgatggaaagggaagggacaaagacaaaacggaaaaccgacggggggggggggggggaatgaaaatgtgaggcattcattcatcggatcaattaaaagcaggagattaaagtgaatttacatttaatggcatcatcatttacgtcggattgggccgaagaaatctttgatctttgatgcttaattggccgttatttgaagcaattttaatttcaacgcataagcataaataagcgatcagacccacgccgagtttagggccatgattccgtatgattttgtagtgaatttggaccagaaacttttgattcccaaacggaagaactttactgaattaaaactcagacagaaaaagaattttttgttttttcaaaatttccaattcgatttgctcaaatgttttgttgtccctcaaaaactctccatcaatgtgcttttgctcactgtctttgaagcggccgcacaacgtggacctcattaaaccatgacaacacttcggcacaattttccacttctgccccagtcattgattttgacatcaaagcgtaattgatcaccacattagaagcgactgacaaatgagcatgtttaagtgcattatcccagcaatgatcactgattaaccaagccaaagggcttcactgatcagcggatcagcagtgcccacctcgatgacggatgatttttcaaaatttaaatcatctgggagaaattttaaaaaaatagaaaaggaaaaaattcatcaaaccaaaaaaaaaggaaaaattatttgaaaaataaaagctaaagttttatttttgttattgcttaactcaattgatcgaggtcgagactttttcgaacttattttcttaaatttttagactttataaattgtattttgtcaaccctttcaaagtgtgccaaagtacactttgaatttatcgtcggctttacttacgctttgaaattctcggcgcgcctccgattgcacttgcgtaagcggttgctccgtttcatcgtttgctttcctccctaaccaccgtctccgttgagtaattgccgtcgattaacgagttgtctaccacgtactttggcgattgaatggaataccattttaaatgtttttattttaatttccattttcaattttatttttgtgctttctatttgagagttttgcctctccaaattcacattaattattatttggtaattaattgtgctctattgtgatgccaaaaggaagcggagtatggagaaagtagtataaaggacatgtgagaagcaggggtggagcgcgaccgcgatccgcgactgcgattcgcggcaatttgaatccgcgatgcgcggaatttgtgactccgcggcaattttgggtaaaatttttaattatttaaaagtaagtttttgtttatgaaaaagcaagagattcatggaaaattgataattttccccaaaaaattcatttaaattccaatttttccccagtcgaagccgaccaaaatctttatttttctttagaaaaattggttctaaataactaaataggtcatttccccctacccaacccctaccattcagtcccgtcccaaattttgtatgcatcgggattttaattaattttatataagaaaattttaaaaaagtttttaaaaaatgctttaaaaaattggaaaattctgataaatgcgcgaccgagattagcggcaatttttttgctcggtccgcgaccgcggcaaattgaatctgcgatcctcgcgaccgcgggatttttctgtccgcgctccatttgtgggttcgagtgccaccgggcgagttatttttttttgttctacagtgagcaaaatggcatcgcaatgatctaattaattattatttaattaataccatttgtcattctcaactccccccccccccctatctttgctcatttatttctaattagtattattattatcattatttttcatccatcaattattagtccaccaacgttgtcaaggtttcctgcttccaattgtcaaatgcggccacgtaaaagcgttgtgcttggtcctcattttcaaatgatttttctttctcaatttcttcgatcactttgcgcagagtgttcttttttttgtcaccgtcgccttctttttccaagtatttgatcagtctgtcaaataaacactttttcaattaaatttaattaattttaaacatttttaaatttaatttcatttattttcatttcaaattcactttttcgcttttttctgtgcttctttatagcttttgttcacattttccaattcttttttggccttttccaattgtttctccctttgccttttccgattttcagcgtccaccaattttattttattacccttaatttttttttatttaatcaaattccttttcctcccaatttccatcccacaatacctctagtgaaagtggatttcgttcacccgttcttctgtccattcgctttccccgtctaccgtaattcgtccgccggtgtatggtgctccgactgtacggtagtccctcctcttcgctgcttatggaattttccaatgattgtgccaacaaaaagtcgttctgctgtccttctccctctgtctgccagttatctgcttctgattgttttgtagtattcaacatattaacaaatttgaaaaaggggacaaagaaaaaaaccgtaggaaaactgagaaattcaaaatcgcaggcttttcaaaatttcaaagatccaagtgccaactaaaaaaagtcttcgcgccctaaatttggcgggactgagtggacggggctgagccgcccgtttgtttttttcatccttcctgcacttctgctgatggctgaaataattttta

SEQ ID NO: 2986 - DNA, 4156 bp, Heterodera glycines
  unsure (1)..(4156): unsure at all n locations
atgaaaatgaaaaaaaaattcgaatttcatttcttttattattggaataaaagcttcgaaaaatgttaaactcaaacaattcaattcaattttgaattctcttctattccccaaaattttgacccgacccctctcaaaatgagggcacgcggcgaaagttttatgtgggggtatgtgttaggtcatttcattcatcgccggcggggcattgcgaataaatcgtctttaaatcccccgccccttccccattccatcttttgagagtgaaaattgggagcgatggtcatcgtcgtcgtcctcgtcgttgtcgttctcccaaaatcgtgtcaaattgccgccccgtcccccaaggcgttgcgaatcattacgccccctcggcgggcggggggggggggggcgcatggcgtgcggcatcactttgccgattgtacatgaaattgggggggggggggagcgaaagcgaacaatgaaaatgtggggtggggaagggggatgaacttttcgccacccatccgatgctccaatcgccagcggctggctggatgaacgctgttctaaaatcacagtttctgacagccgcttgcactctctcctttcacgccggagagaaaattgagattagctcaatgagagagagagtgagagtgagagagagagagacagagagagagagagaaaaagtttaataaataagaaacaaaactgagtaagaaagtacatacagacaaaagcagagcgaagagagtgtcactgatacattggaaaagaaggataaatgttcaaagaaaaaacctaaaattttctagaaaaatcggtgagaaatctctagcagctttatcatatatcattaacttatcattgccactgtttttttccatcttgtcagccaccactttctcttattaattcctttccccccgccggcggtcggcagaagggggggggggggggggggacttaaacttacttaatagaggagaaaggtggatgaagaggtcaagcataagttgcaactttaaatggcggcacatccagcgacgaactctctctctccctctctctctattcgtgcggaggttgcgcggcgaacaatgcgccgcgctgcgcaattccaatcggatgttggctggcgggcggatgatcatcctttctcgcttcctgctacggttgctgacaacctccgctgcccttctctttccttccctttcacgccggaggggaattgtgtgtgcgaaatgtgtaccaaaagagaattttgggtgagagcggacggattaataggaggaagaaaagcagcaggtcaagcgtgcttgttgcgcggggttcgtcatgtggaagagttagggaagcgtcaagcggggcggaattgaaaagcgcggagggcagcgacgggtggcaggcacacattcgacagatgaacgcacagctcgcatccccctcctcctcatccatgccccgggggcatgaatttggattgtatgggattttaaatggagaggattgaactcttccatcctttcttcttccccttcctcttcctcgccccaccagtgagggggggaggggggcgttatgcgagcggtgcgcaattgcaccccagcaatcggctggctgatcaccctcacccagccctgaccccgtccgtccgccgcgccttcaatggggatgcccgacgagtgcccgccgtgtgcgcatgtcccgcttcctctgctgctgctgacagccgcggctggctgtcccccgcccatcggcgggcagcagcaaaagcaaaattcggtcggtcgtgcgccggagggcatccccacgcacagcgcaagaaaagtgaagattcactcactcactcattcgcattcattccattcgctggctgctgctctctcccgcgccctcacatccatcgcgaagtttcaccgatcgccaaaatttttggattttggtgcatcagcggttcaggcacaacggcgccggaggggtcacatcgctttaaatcactatttttgtgccgcttttgctgtgccacagtgacagctgcccactcaaaagttcggcacccgcccgccctctcccacaatcaatccgtgctcaacctgcgcaacaacgtcgaaagtgaatttagtaacttttatgtagtacaatttttaactttgcatttaaaacataatgccaaaaacttttaaatattatttgacagccgacggcgtacagtggtgccaaaaacaaaagcaattagcctaagtgacacctgaaattgtgccaaacggacatcacatattcacgacagcaaaaacaaaacggaggtaaaaaattatggaatctcaaataaaattttaaatcattttttgcacaatgaaaatgtattatctatcgtacattatttatttaaaattttacgaaatttgcttaatcaattcaaattccaaaatgaggttcattccgaatcaaatttgggcattcgtcactcttaattcattccattgatttttaaggaaacaaaaaatttttctctaaaatttcttttgtttcggctaacaatttttaataagtggtgagcaaattattaaatatgcgagattagtaggaaattgtctttattaaaaaaatttcgctaattaatacattgataaaatttttaaaaatttgttatttattccaagtaaattgaaaaaatcaaataaaaattttatttctacggggtaacgcaatatgtttctttcatcatttttttctccttaatttttttaatgattttgataatttttttttgccattttttctctttaatttttattaatgaatttgatacgttttttccattttcacttgaattttttaccatttttttgatttttctaatttttttgcacatttttctctaatttttattaatgaatttggtaatttttttttgccattttttctctttaatttttttttttttactaaattttgataattttttttgccattttttctaaaaaaatttccccgtcccctcccttttttctgttcactgattggctgctgttaatttccctcttttttatgtgtgtatgtgtttaacacaacaaatgcgcgaattttttgatgggaggtcgggtgaatgaaatgaaatgagatgaaatgggatgggatgaccttgatgcccaatatttcttctgttgctgttcattattactttcaacagcagatgcaatttttggatcactttcatcagcgaacgcacaaaatttgatcattttaaaaaatgttggcaacgcaaaaattaaataattatttaatataattttctaaaatatttttattgatatattttttgaaattttttttattaactttttttattaaaaaatttacaacacaaaataaatgaattataaacaactatttttgttttattaaagtaatttttatttataatttagcattaggtacaattactatatcttttttccaaacactttatgttattaaattaatttattttaccttttagtaatttgaaaataatgatagttatgaatttttaatttatttttttgttcaattctaaacgaaattatttatataaattatcatttttaaacaacattaataataaattcatttaaattatttcttttagcgccttttttttaaattcataaaaaataaaataatttcaaagcattttatcattttttgtgcccacaaattgtacaattttcatccatcaccactaggggaggaataaaaactaaaaattcatttttatttattttttattttgtggagggccaaatttatttgaccttggggctgccctccccgctgtccctccgcgccccgggccatgcacaaaatgtgaattttgttgctgctcattaatctaaaacggccgcgcaaagtttggcgacggcggtggcgccaaacattttttttttgtataagcataaaaatgttgcgacgacaaaataatttttatttgagtttgtcatattataaaatttttctttataaatcggaaatcaaaaagaataattgtatttttttctataatttagtttataaaagtgtaaattaatttcagcnnatnttataagtntaattccnnatnttnttnnntttnntttttccctttatgggtacttttttttataataaaaattatgattaaata

SEQ ID NO: 2987 - DNA, 950 bp, Heterodera glycines
tttatatatatatatatatatatatatatatatatatatatatatatatatatatatatattcttattaaagtttaaataatcatttattgctgtttagataactttaagctcactttcatgtattttaatctggttcgacccaaaaactcgaaattcgataaattaaatttttgaatttttgttcgagttcaggtcaagggctcggaattggcaaaaatggacgctgtattcgtgatcagcgccccaaaaaccccttaaaacttactttcattaatttataaaacacatttgtaggcatctgaaaatgcattttaaaagtaaatcacctaaactagacaagtaccgatcaatctgctaatgggtcgtacgaatcactttcaatgcttttttgatttccaccaaaatgaaaatgcatgaatcgcaattgcttgaattgaaaatttgcttgatatttcagtttcggaagatcatttaatacaaagttggagagaattagtgaagtggaggagcagctaaagacaatctaacgaaaaataaaattttgtcttaaaccccctcccacccatgtcaaaggcttactatttttatttctcttattaatattcccacacgtatttagtataattgagaattttaaaaaattgatatcaccaaaatcggcggcgtctatcggcacctctgactttttgaaatttacaagccgcaactttttgaaacacaaccaaattttttgaaattttaaaggtaaattgaggacattagggctaccaaatgatacaaagaatgtataattttcaaaagagatttctaaaaattttcaaaattctcaatatgtataaaaaatgaaaaatttgccgaaaattttgactttttttttggagatccccaaaaaaaatttcctcagaaaaaaaatctcaaaatatgtaaaaaaaaatgaaaataactaag

SEQ ID NO: 2988 - DNA, 3822 bp, Heterodera glycines
  unsure (1)..(3822): unsure at all n locations
taaatcacctaaactagacaagtaccgatcaatctcttaccagggcgnacgaatnantttnaatggttttttgatttcttaaaaaangaaaangnangaanngnaanggnnngaanngaaaannngnnnganannnnagnnnnggaagaanatttaatanaaagttggagagaattagtgaagtggaggagnagntaaagaaaatntaangaaaaataaaattttgtnttaaannnnntnnnannnatgtnaaaggnttantatttttatttntnttattaatattcccacacgtatttagtataattgagaattttaaaaaattgatatcaccaaaatcggcggcgtctatcggcacctctgactttttgaaatttacaagccgcaactttttgaaacacaaccaaattttttgaaattttaaaggtaaattgaggacattagggctaccaaatgatacaaagaatgtataattttcaaaagaaatttctaaaaattttcaaaattctcaatatgtataaaaaatgaaaaatttgccgaaaattttgactttttttttggaggatttccaaaaatttccgtaaaaaatcctcaaaatatgtaaaaaaaaatgaaaataactaagttcaattttagctaaaaaattagtaagtgagattcatttgtaaacaagatccctccaacaagaagtgttaaaaggccttacggacatttgcggacaatttcgggaaaaaataaaaaaaatttcgtaaagaaattttaaaaaatttctgaaaatatgaatgggactgaaaactaaataaaactttgtttttgggcttttaggcccaacatcttatttttacatttcttagaaattaatttcactactgctattttaagtgattaaagtaaaattggtccccaacatcggggaggtgtgaatgtcgcctgttacactcaaaacaaatcttgcaggggaatttgctactcgccccctgaattttcttttccttttgttcgggatggagaagaacccaagacacataagtcttgttctacttttcatcagcagggaaagcatttgaggccccaaaaattttcaaaaaggaaatcggaaatctgatgcccaaaaatctcgggaatcggattttagtacagctgatgttcagcatttagaataataggctgttcatttcgaaattataagcaaattttgttcacgattaagcatgtctcagaattttttctaaagatgaaaatagcactctcaccgaatttgagtgtaacaggcgacattcacacctccccgatgttggggaccaattttactttaatcacttaaaatagcagtagtgaaattaatttctaagaaatgtaaaaataagatgttgggcctaaaagcccaaaaacaaagttttatttagttttcagtcccattcatattttcagaaatttttaaaaatttctttacgaaatttttttattttttcccgaaattgtccgcaaatgtccgtaaggccttttaacacttcttgttggagggatcttgtttacaaatgaatctcacttactaattttttagctaaaattgaacttagttattttcatttttttttttacatattttgaggattttttacggaaatttttggaaatttttcaggacttttttgcattttacgtgcttttttgtgttttttcgtgactttattgcctttttgtgactttttggcgattttttatgacttttagtcgactttttgaagaattttagtgacttaaatttccagcatattcatgactataaaaatgtttttttttcactttgtctctcaaaaacgatcaacagcagatgtgacagcacagagagagcgaatcaatggccaaaagcggcggatggatttattcggaagacattaattgatcactaattgtggcacgtctgctgaacattgtgccgaccgtcgtgttgtgatgatcaaaatgaccagccaccgtatataatagataaataccgtattttccatccatttttttttactgtgccctccccccttttctctttttttactattacatttttacaacatttaaaaacttgggaaataactgcggtggttgattttttgtacaaagcagaaagtggcatatattagagaatatccgttatgggcgtcaagctcaaaggttacaaggaaccaaatgttgttttatacttatagacagcaacaaaataaaggatttgactgacaaagacattttctaaccttttacaaatgaaagttgggtaaaaattatccgtccaattgattatttgattgattgatttgtgggtggggggataaggtaaaacgcccggcaaatggtcataattttgcaaaatattctcgttggtggtcctcctctcctctgttgcgttccattccaattcactgtgccattccctttttctgctcgccgtttcttcggtcggtgctatgatgttagtccagggatgggatcgcccaatgtcggtttccaaggacgggtatgccgatttgcaaggacatagtggggaaaattcatgaaatccaaggacatttaaaatttttattttatgcattgaaaaatggttaaaatttattcaaatggcttgtatttttcaccggaattgtttttttccaacaaattctcaactatgagcaaaaaattgacataatgccataatttaatatccaaatatgttataaattcaaaaatttaccaaatttcctttgattattttttccacttttccaaatgctcattttcaaggacgtccttgccattcaaggacgaatcccatccctggttaaaaggccttacggacatttgcggacaatttcgggaaaaaataaaaaaaatttcgtaaagaaattttaaaaaatttctgaaaatatggaatgggactgaaaactaaataaaactttgtttttgggcttttaggcccaacatcttatttttacatttcttagaaattaatttcactactgctattttaagtgattaaagtaaaattggtccccaacatcggggaggtgtgaatgtcgcctgttacactcaaattcggtgagagtgctattttcatctttagaaaaaattctgagacatgcttaatcgtgaacaaaatttgcttataatttcgaaatgaacagcctattattctaaatgctgaacatcagctgtactaaaatccgattcccgacatttttgggcatcagatttccgatttccttttttgaaaattttggggcctcaaatgctttcccttctgatgaaaagtagagcaagacttatgtgtcttgggttcttctccatcccgaacaaaaggaaaagaaaattcagggggcgagtagcaaattcccctacaagatttgtctgtatgtctagagaaatttaaaaaatgtcggtggaaaaatttcacatccccgatcttggggaccaattttacttttttaatcacttaaaataccagtagtgaaattaatttataagaaatgtaaaaataaaatattaggcctaaaaggccaaaaacaaagttttatttagttttcagtcccattccatattttcagaaattttttaaaatttctttacgaatttttttttattttttcccgaaattgtccgcaaatgtccgtccgcaaatgtccgtccgcaaatgtccgtccgcaaatgtccgtccgcaaatgtccgtccgcaaatgtccgtccgcaaatgtcccactgcgtttttagcaactattnttgggggttttttagaaactaaaaactaattattttggcagtttttagcaactataaatccgagccctaatgatca

SEQ ID NO: 2989 - DNA, 2307 bp, Heterodera glycines
tttgtccatcccttttttctctcattttaaagtcatttatttaaattttattttttttcatctaatttattatgtacacaaattcagaaaatgcagaacatttgactttaactcgaaaaaagttttttaaatttttgttataacaaattaagaatcaaattttcatttataaattcgaatgtcatcattaaccacttgttcatcaacagcagaggacgaattttcctctgatgtgtttggacaaggtggaaacggtaggcaaatatttaatttttgggctactgtatacatccaattaaatttaaacattcagcagaagtgaatgatggtgggaccaccagtgtttctgctgacgttaacagcagaaaaacagcaatcggtggtgagaaatttcttttttttgcgtaaattttgaattctgaagtacaattaaatgcactttgaggaagactaattaattgcttcataaatcatagctatttattgataaaaaaggggaaatttttgatttaaaaatttcgaattattttttaattttcagacggaggaatgaagagaaaaatgacggagttgttcattttgactgtagtgaacattacggtaacagtggcactgatcagtttcattgccccggttatataaattatttaattaaatttgcggttattttcaattttcagattgagaatgggcgggtaaatgctgagttggaaagtttgaagaaatttgttggaaaaatggaacagcaacatgggaataatggttggaattatattattaataatttttgtattcaatattattccccaacaaaatcttatggagagttaaattatttatgaaaaaaagtacagggcagatcagaaaattattaatgctaaactgagactctcggactataaatttgagaattaataaataataatataaattaattcattttcatttgaaaaaatgtttagatggtcaacagactgaattttgtgccaaaatggacaccgaaaaagacatggtcaaagccattgaaacaaaactcaacgaattggtggaacagcaaaagaaagaagcaatctttattggcgttttgaaagaccgatttggaaatggtaaaaatgaaaattaaaaataatattaaataaataaattaatttttttgaagaaagggaaatgccaacaaacgaaggtaagaaaaaaaacaaaaaaaactttttaatttttttaaattatttgacatttggaaaatatttggttaaggcaaaaattaaaatctgaaaaacagacaatcatggtcatgtgtttaacaaccaacacaaataaacaaataaacatgaacggttgtaaaaattgataaacctaatattgaattaatttttatgattgaatctttgatcaaataattgtgctaatccgtcgtaacattctttcattcattcagtccattgttttgatcggtattaaaattcttaaaatggattaaatattaattggcatcaattttaaatattaataattgctttatattttaagcaggcgaggaaaagctcgcacaatttcaaaatgatcagaaggaacttttggaaaaatcagtgaaatggaaaaacagaaaaaagaaaaagccaaaagaataaattatcacttattaaaagttatttttgtaaaggatatttattatatgagctaagaatattttatttaattaaaaattttcatttaaaaattgtttagatggccaacagacggaattttatgccaaaataaacaccgacaaagacatggtaatccaatattatttagttgaagtaccggtaaattaagtgggtggttgttgtattaacaataaaaaaaattatttttattctaaataaattattttttggtctgtaagcttcgagaagcgtttgaacatatttgccttgtccgtttctgactgtttaaaaagtagaaattgcgacaaaaaattataaaaaattaattaactatttttggccatctatcgtaccattcattaccataccaatttgttaattgtctttttttgattcatttgagtctttgccattttcagaggtcaaaatggccgaggtttcagcaactgatcgacctggtcttctgcattctgttggctcttatcaaaccgatcttatgcgtttttctttatcctctactgctggccttcattctgcaatacgtcggcttagacaagttataaatttttatgtgtgacattttttatttttaactactcagcacggacgacggcgacgatgcgcattggatcctcaaccattatactgaacttatatatga

SEQ ID NO: 2990 - DNA, 1725 bp, Heterodera glycines
ctctgtttgtggtccattaacccaacaaaagtgcagtaaagcagatgattttatattttcaaattgtcgtaagaagcaaaagattattttaataaataaaaatgcaacaaaaattggaaataattccaaaaagtgcgaaatatataaattatttgcatgtctaagataaagaaaattaaaaattagacattatatttcaaggccatcggaaaaagtattatgtatatttaggtgattttgcttttttagttttcatttatttttgttttctatgccattgaatctgctgctcgctttatttttaaattttaatcatttagtaaataatttcttttccacttttgaaaattgttttttattttgctttttgtcgtttggcgcctccgcctttgcaagaattttcgtttttaatactattaaatatttttattcgattatttaatcattaaatattttttggaaaattgaccaaaataacatttattattatttactggtaaatcgaattattttttgtctggtgattggaatgcataattatttatgtgaatcactttattattctctgaaaaatcaaacccaacatattcatattcatccattcatttagcacaattctcaaatattttttgattaatgatggaaatttaaaaaaagacaattaaattaaaaaatcctttcctaattgagtgtgtttttttaatatattaatttaatgcttttcttactcttactgttgtacatctttccactccatttcttggtattttttccaattaattactaattacgcattaattaattttatgtgccttttgtttttgcccgttgccatgccactctcgcctattacgaacattttgacccgagacggacagatttttgcatgcctgagcctgggaatgatgattattgtgtcgagtcgagctgcttatttggtaaaatgcgataagttaccatatcagtcagatgatcagcctctcatctcgaatttaattctttgtttatattttattacttttttcatcattaattaatcaaataaataaatttaaaaaataattaattaattaattaatttgaacagaaattgcgggaaaaagttggacaaaagtgtcaaagggttgcacttacgacagcataaatcagtgcgttgagcttgaacagaaatgcttgtcaaacggtggcaaacccttgggcgactgttcaatttgcaattccacctggtactgtaacgaaaaaatttcgaaaggtgctaattgaattaattaataaatgatgcattttattttgttaagagattgttgtgtgtttgaatggaacagtgaatgaaggcgaggaaaaggacgaagcatttgccgaaatttggtgaagaaattttgcgggaaggtgtgggtgacgactaattacataatgagcacctaaattacactaattagggacataaaagaggggccgttaatgatttagtccaattagacatagacaaattaaggtgtgaagatgcgagttgtttctcagtgcgttgcgttgggacggacaattcgacgcttttccacaccaaaggctgtcttaacatggacaaattgtgggccgttaaactgccatttcaagaatttgagctagataaatgccaagcgatgaatgggacgacggagcgcaattcttgcgatgggaacagatgcaacgggcgtaatgaaaagcaaagcgtaagccatgctttta

SEQ ID NO: 2991 - DNA, 7879 bp, Heterodera glycines
agatgatgcgggactgcctgctgacgaaccgcttgcgggtgtgcctgtacctgcgggactcgctttgcggttccggtcctggataaccgccagcaaccgattaggctgttgcatttgatcaccagcggttgctgtaccatctgtgccgcggacgccgctgcttccgccaccgtacacgcgacagtacgcgtccgaggcagcttgcgcgcgtgaaaatgagcacagagcagcggctgatgctgacgcagccgccgccacgcggccactgctacattccggcactgagctggatggactgtgatggcgggggcggtgatggtggtggtgccggatcagcgattggaactcgtccgcttcctcctcttccgcgtgttggtggtcgtccgctcgagccaaaagcgccgccgacgattgtccgccactgtctgcgtgctcttcctcctttaacccggtgtggcatatgtcgttgggacacgagcgcaccgaatggccggaaatggttgagacgcgtcgctgttccggcacgtatagtaacgcttgggaagagccttgatgcggtagtagatgcatgcgaccggtaccgcaagacattgtagttggtgtgcgcacaaagcgtggaccaattgttgcggttgaactgcacggcgacgacggactgggcggtgatgagcggcatccaccgccgcgtaccggtgaaccacttccgctgcagctttccaacgacgaagcggcaatcacgcttggcgtcgacggcataaacacaatggcggatgaagcggtggacagtttggcatggcactcaacgctgtcatcgtccttcatcaaaatgccgtcaagatttccaagctgatcatcatgctgttgttgttggataacaacatcaggattgttgtttcggtggtaatagtactgttgatcagcacccttttgatcagtatcggttgtgctgatcagacatggcacgttgctgatcagtcgttgttgatcaatgcaatgttgatgttttgtaccattcatccgttccgttcgtgtgggttcagtgtgatcggacggcgtaaattccggcggtcgggagacggcttcttcttgttgcggcgattgatcggtgctacgattttggacagactgatcagacattggttctgcttttgttgattgtttattgctgtttttgttctggtgaagatgatgatgatgttgctgttgtcgaccgatcaacaacaattttactgtagcggaggacatccaaataccatatcaacacgttggtacagcacacggcacaatgtacagtataatattatgtttaaatgaagaaaattgtgctaaaaatttatatatattatatatataaagcttagaattattttaattgaataggtatgcattcaagaacagcaatgacggaaagtataaaggacagtttaataatttggatactcaaatacaaaaatggaaatcaaaaagttgttttaagggtagtcaaaatggatagaatgccaaagaaaaataaaatttcaaaaaaaccctaaattacctcattaaaaagagggttttcaaatgaatgacagaaaaggtggtcaatgtcttttcaaggacgtcctaaatttggaggacaccaaaaaataccaaaacaacctaagctaataataatgtgtggagaggggggaaaaagtgaagttttttggcacaaaaaatattccgctgggatccaattagcagatatttttattgtgccttaatttgcgcgccaaaaaaatcacttattgatagagaccggcgggaacgggagtcccgtgggagtttacgggagtcccgctcccgactcccgtacttttttgtcgggcgggatttttacgggagcgtgatttttacgggattcccgctcccgctcccggaaatttgacccaaaaaacgggagtaaaaatgcactggtaagaattgagttttttggtaaaataataattttttgttcggatgagcctatttgaattattatggcgatctgtccattcaaattccacgccatttttgttgttgtcacttgtccataaatagacgatcatttcctccctcctggtcttttccctcattcattttattttgttatattcctccgaccaaattgtcttcgctctttatttattgttcgtcaataaacatttatttattgattgtcttccttaaaccctcggaccgaacaattggcgcagtcacaaaaatttggactttgctcacatcttcgggattaaaagcaaaagccgagacggcacaacaaattcaccgaaaagccgggattggctgtgaattttgattttaaagctgagttggcaaaattcttcaacaaagcagtcaaagaaactgctcagtcgtcaaaagcctggtcggcaaattcttcaatttaagcagtcaaagaaactgctcttctaaagccgggacggctcgacatttcttctaaagccgagtcggcacgccaaattcgtcaaaagccgggttggctaaatattaaattgacacctattggtgcaatactacaacgtttattgatttcgggtcgaaacaataatcgtctacaatgacgcaacccgccgcggttcagccaaatctgcagcaattaatcgacgtaattgctcagcaacagacgcaaatcaaccagctgataaatgttcaaagaaacaatcagccaaatccagcaatcatccaaacaataccgtcaatgccggacgtcgcaattttcgaacaatgcgacgaaaagcatcgcatcaccgaatggctggagcgtttcacttttgccattgactcgtgcgcaccgaacgcggccgatgacataaaagtcaaggcactgatgaacaaactgtcggaaactgcgttcagcgagtacagcaaatttgttctcccggccaaggtgacggatttcgactttgatgaaacaatttcgaaattggagaagctgtttgccaaaccacaatcaatatttgtggaccgatttgcatgtctgatggccaccaaagacgatggcgaagaatttcaacaatttgttaacaggcacaaacgacttttgaaagattttcagtttgacaaattgaatgaggaacaattcaaagggctaatgctcctaactgcgctgaagtcttcaaaggacgcagttcttcggcaacgtattctcgccaaacttacaaaggatggcgacgccgtcaaatatgatgaactgattgaggattgcatcaattttttgtctacaatccatgaggcaaaattgatcgaagcaacttccgtgtcatcaaggacagtgaatgcagtgaagccaaaccaaagaagggagagaccaaagccacaatccaagcaaggccaaccaaacgcaactccaactcagcttcaatgttggagatgtgggaaaacgaaccacacccacagagaatgctcgcacaaatcggctaagtgtcccaaatgtcactacaccggccatttggagaaccaatgcgaaaaagtgcaagagtggcgccgcaaaaacttcaaagtgaagaaagttggaacgcttagcattggaatggcactcaaatcaatcaacagtgcttctcttataaagataaaagtcctgctgaacggaaggatcgtgaagtttattctcgactccggggcagagatcaatgtcatcgatgaggaaacttatcgactgatcggacagccaaaaatttgggaatgtgccgaaagaggcagaatgttcgatgggacagaaaaatcttttatcggaaagggagaaggacatttcgaattccaaggcgtaaaagttaaagaaaatttttatgttgccgaaaaaggatcgatgaatctgttgagcatccaaacaatggatgcatttggattgttggatggcatcaaagccaaaatcaactctccgataaatctttgcagcgcaggggaagaattgagaggcaaaacacatgccccaatcaaatccaacaaagttgccggcacaccaaataaggacgccgagaaagaaatcagtcagctaaagcaggagtacaccaatgtttttaaaactgaattgggactctgcacaaaggtcaaagcgcacttagaattgaacgccaacgcacggccaatatacagaaaggcccgtccggtcccgtacaacgccaaagaagcagttgacggagaattggatcgttgggagaaaatgggagtcatcggcaaagttgagcacacagaatgggcagcaccgattttggtcgtcaaaaaggccgatggtagcgctcgactgtgcatcgactattcaaccggactcaacaatgcgctaaaagaccaccagcacccgttaccattaccggaagacatttttgccaccttaaatggaggccagtacttttcgcaaattgatctccgggatgcgtatcttcaagtggagctggacgaagcatcgaaaaagctgtgtgccattgccacccatagaggaaattatgaagtcaaaagacttccctttggcatcaaaacagctcctggcattttccagtcgataatggaccaaatgttggcagattttgacttcgcgacagcctacctagacgacatcatcatcgtcagcaagggccaaaaagaacattctgaacatttgaaaaagatgttctcgcgatttcaagaatggggatttcgcgtcaaacgtgaaaaatgttcgattttccaagatgaaattaaatatctcggacaaataatcgacaaaaacggacgcagacctgaccccagcaaaatcaccgcgatcaatgagatgccagaaccgatggatgtctcttcacttcggtcatatttgggaatggtaaaccattaccaacaattcatcaaaaacatgcgcttcgtcagaaagccgcttgatgatttgctgaaaaaggacgccgaatggaattggagcgataaatgcaaaaatgcatttgacaaaatcaaaaaaattttgtcatcaaaattactgctcacgcactatgaccctcaaaaagagatcgtagtagcagcagacgcatctgatcagggaattggagcagtgatctcgcacaaattcccggacggaacgatgaaagccattgcgcatgcatcatccgccttaactcctgccgagaagaactactcgcaaattgaaaaggaagcactagcaataatttttgcagtgcagaaatttcacaaaatgatctatggacgtaaatttacgctcctaactgatcataagcctcttctcgccatcttcggcaacaaaaaaggagtgcggcaatgcagtgccaatcggctgctccgatggtcactcattctcttggcatacgactttaacattgagtatgtcaataccaacgacttcggccaagctgatgcactttcacggctaattgccaaaggaaaagatgcggaagaccgcgtcatcaaaatacttcggtcgattcggaggtagaatcgattttcattggaactgtcgagaagcttcccatcaaattcgatgacattgtccagtcgtcaaaaagtgatcagaacatcaaaaaggtcatgaaattcattagaaatggctggccacaaaatattggcaacgaaaatgtggaaatcagaattttccaccaaaggaaggaacaactcagcatcacaaagattgtttgatgtatgctgaaagagttgtgattccaacgcaacaccgagccaaaattctgcaactgctccacaaaggacatcctggaatgaaaaggatgaagcagttggctcgtgaatatgcatactggccgaaaatggaccaggaaattgaacaatttgttgaaaattgtcaaccatgccaaaatgaggcaaaggcgccaaccaaaacgaatttgcaatcttggccaaagacaaatggaccgtggcagagagtgcacattgattacgccggaccatttttcggaaaagagtacctgatcattgtcgacgcatattcgaaatacccggaggttttcgaaatgccaacaaaatcgacaagtgccactatcgaaaaacttcgatacctcttcagtcggcacggacttcccgaaactctggtctcggacaacggaacacagttcaccagccatgaatttgcaaaattcacaaatgtcaatggcatcaaacacctgttctcggcaccatacaatccgatgtccaacggccaagcagaacgatttgtggacacattcaaaagaactttccgaaaattaaaaggggagggggctctgagtaaaagcatagtcgagactttcctcgtcagctaccggacaacccccaatgattcgctcgaagacagcaaatccccagcggaaatgtttcttggaaggaaaccacgaacaacgttggatttgttgaaaacaactcccactctgccaaaagagcgaaatgaagagatggaaaaaaggttcaaccgacgttatggcaccaaaattcgagagtttgccgtcggcgacaaagtcttcgccaaacaccgaatttcacaaaattggaaattcggtgaagtgtccaaaaagagaggagtcatttatgacgtggacttccgtgacgggtcgtcaggaagattccatgccaaccaactccgtcctcgacacactcccgacgaagccgaccaattgcaaatctttctcgacacatttgacatcggaaaacccgccgatcgccaaattgccaatgatttggaagctcgagctgagcacaaccaaactgtccaagagcagggactcgagaatgatctaaatcagtccgacaacgacgaatcagtggccgaagaagatgattagcaaattcaaccacgccgatacccgcaacggaacagacgtgccccaatacggtactcgccatgagccgctcaaagggggaggtgttcggatgagcctatttgaattattatggcgatctgtccattcaaattccacgccatttttgttgttgtcacttgcccataaatagacgatcatttcctccctcctggtctttcccctcattcattttattttgttattttcctccgaccaaattgtcttcgctttttatttattcattgtcttccttaaaccctcggaccgaacacaaatattaatctcttcagaaattgtgaaaataaatcattaatggtctcactcatcttaaaaaagacatatttcctcaattttctggtcacatcccctgcaatcttagacgtaaagttgtgttaaaatcacaatccactaaaacttcaaactcttttatcaacagaacggccactaaactcaacaaagatataacagatgctccatctgttgacagtttcaaaaaacgtataagtaaatggatttggttaaacaaaaatttagtctgtaaaagagctgcttggagttgatattaattaatttactaaaatctaatgtgtaagtggtcaccccttcgttggatattttatttcttttgaataaataaataaatacaaaaccaaatattaatctcttcagaaattgtgaaaataaattccatttttttactaatgttcagcctcgcgtaggaatcgaacccacgtctcgccctcagtccgtgggcagctctgccactaaactaccgctctttatttaatgggtcgcaccaatctcagtttgaccgcacagtcagcttcatacttacaatttgtacaaaaatttattagaaatattggggctactttttgttcattttttgtgcataatttatcggaaagcacacagcgtgtgctctgttgaccgccaccgcaacaaaatgtagacgcatacacagcaaaccgtatctttgacaatatgcaaagcaaagcaacaaaatttgtcttggtatcggcaacgaagacacatataaaatacactttgaaaagaaaaaattcttgcaaaaatgaagataagtgcagggcaaagctaaa

SEQ ID NO: 2992 - DNA, 1491 bp, Heterodera glycines
agtttttgaaaaaagtgccgcaaaaatcaacttcgatttttttttctcaaaatttcccatatgcttatttctaacaaaaaattgctcaaattgatcatggaaaatcaaaaatataacatttgagcattttaaacatgttttgaataaatttgtaaaaatgaggctttttgacccaaaatgaggcttttttacctgccaaatgaggcttttgaaaattttaatctggctaccctgatgatatcctcatgggcatcttgcacatgagggtactcttcttaatacaggaagcctatcaattctttgtctcccaaaggaaggtccccaggtgtccgtgggatttccgaatgaaactttgtgggtgaatagagcacctatgggttcttaagaaaaatggtttcaatttctgccaaataagtacgggtgccgagttatgacgtgccaaactttttttatcccaataaattgaataatcaattgctccactttgtgctgttcggtggcgcaaaggttgtgcgctcgctttcactttttgccccacaagttcgaatccctcttacgtaaatttatttttttaattttgccattgaataccctttttgaaatgcaattattttcatttatactataacagtttatttttttaaatacattttttgaacgaaaatgcataaaattatttttaaaaaactatattttctaaatttatatgattccccgttaaaaattctgtaaatcccttaaatgtcatccaattgcttcaaaaaattgtcaaaatataaagattttcgtggagaaaagcaggttactttgatcacgactagcaatctgagttttgtcatctggtcaaattttgtttgaagtgccaaaagataaagataccttccaaaaaataaattgtgatactgttttacttcattgcggttattgtgagattttcttatgttttgctcattttttcacgattaccacatgtgtgaaaatgcataaattttaattttaatattctgtactaaaaaaatgaaaataattgcatttcaaaaagggtattcaatggcaaaattaaaaaaataaatttacgtaagagggattcgaacttgtggggcaaaaagtgaaagcgagcgcacaacctttgcgccaccgaacagcacaaagtggagcaattgattattcaatttattgggataaaaaaagtttggcacgtcataactcggcacccgtacttatttggcagaaattgaaaccatttttcttaagaacccataggtgctctattcacccacaaagtttcattcggaaatcccacggacacctggggaccttcctttgtcagtatagctcatgtgaacggtaacgctgatatgagcccggattcgtgtgatcagcaaccccaaaaaccccttaaaacttattttcatgaatttataaaataaatttataggcatccgaaaatgtatgtggaatctgtcgtgtaaactacacaagtaccaaaaa

SEQ ID NO: 2993 - DNA, 3054 bp, Heterodera glycines
tggtttttacacactcaaattcaaaggtgcccaaattattgcaagtagtgcgcccaaatgcgtgtcactgaattttcattactcataaaaaaggattaatttttagctaatttatttgcccgcacttaaacataaaataattaataagcgctttttttattattgttattgaaaatgacgtccgaaactgtgtcaagtgacgcgtcggcagcgggaggggcggacaaagagaacacaaaaacggacacaaccaccgacccgagttccagcgaaaattcggcgtccatcgaggcggaccacaacaacagcaaattgcgctacgccgacgagaccaccatcatcccgcacgacctcgtggagcggcattttctgcaaaacacttggtatgtgttgtgttgtaaggcgtgcacaacaggtttgagacatcatggtgggaccagggagagccaaaaaaaaaggaaaaaaaatccggaatttttgaatctcgaatgctcaaaaaacttgaaaatggagccatgttcggtaatagcagggctaccccccattttcgaaaaatttaatttgaatttttgactttttgttcgaattcgggacctgggtcggaattgttcgaaatggatacaggattcgtggtcaatgacctcgaaaaaatttttggaaaatagatgggtcgtgagaccaccctgctttactccagggagacccaagagaaaaaagaaaaacacggaattttgaactcgaaaaatggaaagatttcaccatggtactggatttatagaaggaattgaagagacacatgggtgtcagtcagcattttttcccatttctcatggacccgcaaaacctcaaaaatttaagccgaaaaatcaaaaattcattcaccgacaatatcacatttctatttttgtctatttttcaaaaattcttacggcattgtataactaaataaaaatgaacggctgattttttaacgactttttgtaaaaaaaaaaattcaaaattttaaactggcattaaatttgtggaaaaatgggttcacaatgtcgtatccaatttattaatttttcattttttgacagggctctctggtacttgaagggcgatcgcaacaagaattggaccgattgtctgaagaaagtgtccacctttgacaccgtcgaagatttctgggcgtaggttttaaaaaatttttgggggtattttttggacaatttgaaaaacaactaaaaaaatgttttttccccgttattttttcgtgaattttacattaaatagcaatggttaacatgggaatacgtggttgggctgttggtccgaaactaaattgaaagattgacatgaaacagtcaattttgggaaaatttcggaaaaaatttttccactgtccttcttatgggtgtaccccaaaatttcgccgccgaagttttcctttaaaaatttttcaaacttaaaaagtaaaatcttttaaacaccccaaaaaatttttttcgaaaattttgacggcgaattttggggtgcaccctttcatttatgatatttgtaaaatcatttgggccttcttcaaggttgtacaaccacatccagccggcgtccgggctgagctggaacagcgactattacctgttcaaggaaggcatcaaaccgatgtgggaggacaaaggcaatttggagggtggtcgttggcttgtgcaggtgaatacgcgaaacacaacccagtctcggcttagtctcgaagttggctttttgtgttgttggagggagaattggccggagttgcgaccaccacccaccaagcaagtttttcaaattttttgttgaattactaagatttttcaaaaaaaaaccgctgaaaatttctttttttaaattttgaaggaggtgggaatcttgagactttttctgagatttttttttcatacactgattcacctccgctgtttattccccgccccatatcgtttcctccttccgaaagggaggggggacgaaaaaatttcggaaggggtgggaagagggagccccgacatttgcggcccagacatttgcggtccgacttttgcggccccgacatttgcgcctatgtccaaaatcggactcaaaattgaattttttcaacccctgatagcctaataagcattaaaattaagaaaacacggttttatggttcattatgatcaataattttttgtttgaaaatttcagtattttttcaacttttttttgaagatcaaatgatcccgcttctgtcacgtcgatatactcggataatgtttaagactacgaagatccgaaagattgtgctctattatataaatttcatttggcatgagttatttgggccggtgatcacgaatacgtgatcagatttcaattatgacatcgctaagccctcagaatccccgtgtgattggggattctgaggcatcatttgaggggggagggggggggggaagttcgaatccgggcggtgtactttatttatctatttatttttgtgttatttttcagtgcgtttaatttatatttaaagatttgttgtaaattaataataaaagaatttatgtaaaaaataataattatgttttaataaagaatttcatattatttttaaattgaatttataaaaattaatttcatattaatttaaatattcaattcttgtacatttcaaaattctctttttaattaataaaaggaataattaattttattttttaaaatttataataaattgctttcaatttttgtacctcttttatcacttttgtacctcttctaatcactgttgtacctcttctaatcattgttggacctcttctaatcactcttctaatcgctgttgtacctcttctaatcactgttgtaccacttctaatcactgttgtacctcttctaatcactgttgtacctcttctaatcactgttgtacctcttctaatcactgctgcacctcttctaatcactgttggacctcttctaatcactgtttacctcttctattccctgttgtacctcttttgatcactgttgcaacctcttctactccttttgtac

SEQ ID NO: 2994 - DNA, 5098 bp, Heterodera glycines
ttattggtttcgttatgaatttcgggtccaattgaaaaaattccattaggattcagaagaaagaatttgttcaaagttggctgatgagaaaaattttaatggatcaagaaggttatttgttaattgaacgaaattgcagtaaagagtaatggactctgttctggctgtcccttcttcctgccattccaccaaagtgagtcggaatggtccaccacttcgatgatgtcgctcaatttgaaggtcaactcgtcctcatgttgcgcagtataatcgaatgctgccacagcaattaccgtctcatcggatgcattcaacagctcaatctggaattccgggtgattacagcgaaagtattggattgcgctgttttccacacctgatcataattgccggggaacaatccaagggtggggggggggggaaccggaaaaaaattcggggttgagaacccgaagaaaaaaatttttttttctggcccttaaaatttgtgttgagtgcacaactgtaagccccccccccccccacccgtcttgtgtttccgctccgaaaaattaaaaaaaaaaattttcaatgccacactaacaataagtttttctaattttttggtaaaataaaaatgtaacaaatcggattttatgtgccaattttttgagggattgtaactctgtgccgttgtttttgttttttgtacaccttcactttctagtgtttgtccacaaattgtattgtttttcccctccgtctgcacaggtggacaaacagaagcgccagaccaagttggacatgtactggcaggagatgatgatgtgcatcattggggaacagtttgagaaatggagtgaccacatttgcggtgcggtggtcaacattcgtcaaaagggtgacaaagtgaggaaaaaaggggcttttgaaaaaatgcaattttcaattccttccacctatctagtctaaatatcaacaaaaaaaaaaaaattattaaaaatttgaaggaacagagaattttgttcttgtttctgcagcgattttttaggattaaccgacgcattgacggatatttgtttcgaaaattccaagccgaaatccatgtagaaccgaattctaacaacaaaaaaaagtgtaatttttgaatctcgtactttcatggtcaataaattactccttttcgaagattgagtatgggaacaaattaatcctcgcccatctagcaatacccgggtaaattgggaacccggtctcatggtcctggtttttcaaaactgtgctctacaaagctagcacatttaaaaaaaatagaaaaaaataaaaaattttattgttttttttctaggtttcgttgtggacgcgcgacgcgaaggatgacagcgccaacatgcaaattgggcacattctgaaggccaaactgaacattccggacaccgaaaatttgcgctacgaagtgcacgcggagtactcggcacgcacgggcagtgcggtgaagtcgaagtgagcaagcagcgaagcgagcggacgggagggggggggtgcacggactcaccccaaaatttcgccgcaaaatttaaataaaaaaaatttaaaagaaatctttaatgaaaaaatcatagaaatttttacaagaaaatgacaaaaaaatttcttataaaaacccttaagaagattttttcttgaaagatttctaaatttgaaaatttttaaaaacaatttcggcagcttaattttgtcctgttctgagagcgcatggatttccaatgcccaagggattgatggacaacggtcccatagtttagtttaggcaaatcttgggaatttttcaggaaaaaaaatattcgaaaaagtttctggtaacttaactaagaatttccaaaaaatcactgaaaatctttcgaaaattcttttttcttggaattttcttattaaaacatttctagttgggggggggggctgtttccatccaaaaaagcgtccatttttgaacgaaacaaagggaattagtgtggcgatgtcaaacaaaaaaaaatttttttttggcgggttgaggggggggggtcaacttggctcagaccaataaactcagtcatcagcagttgatttttgcaggctcaccattcctccaaaggggactgagaaggctgaatgaatacaatggagaattgatgagcagaggcgatgaatgatgtgaattgatcaccagtgatcagaattttatttatgaaaaatgcccaaataaatattgaacaaaaaaagtgtaatattaccgaaaaaaaaacattttttcgttcgctttttgctattggttaggattatatgcacacaaatttttcaaaaatcaggacaaaaatttctaaaaattcttcaaattcggtagatttaaggtaaaatcggtttgggatatactttagtcaacgccccgtaaaaaaaacggcatgatataccaatcgattcgtcttgacgagctatacacgaaaaaataggtcttcagttgcggaaatgccaaaaaaccggtttttgagccggtttaaaactcgaaaatttgagtgaaaaggggggggggctcctgtccctttaaaatggtcaaattctgacaaatttggtatcattcgaaagctcttgatcagctaagtctaaaaaaccaggtataaattcgaactgatgtcatctaagcactgggacaactgagttccagtgaaaatggacacttcagtaccaaaaaaaattaaaaaaaagttcttatataatgcacgaaaatcgtttagccttgaatatcgagtattgcgctaaaaaaccgccgcacactcgactacggcggccagtaggtggggcgagactacgggctacggaagaagtccgcgcgaccgatgtgaccttagatattactaaataaaacattcgaaaaaaaataaatttatgctaaatgaaaaggaaaatcagaaaaacataaaacagatgatgatgattagggcttggaaaaacatggatataaaatcgcgaaaaatggccataaaatatagatcataaatcgagaaatatggacaacaatcgcgaatatggacatagactccatcctagaagcttcaaaccaagctaaaaccatgtttttcgtgtgtttcaggtcttccacagtccagaaaaaaaaatggatttccatataattccgagccctaatggtgatttgaccaaccaaaaaacaaaatatgatttatcccatttctatgcacagatagaaatgaatcagaaaaatgtaaaaaattatactgtaaatgcaaatgccgttggctaattgcaggaaattggagatttggcatttcgttttagttggccaagaaatttaaaatagtcaaagaaacccaaagagagaaactaaggagacttttgtataatgttgagacaactctttttgaccacttttcttctctaatcactctctccttcccaccttcattcttctgctggctcccggacaatttgacagtaaaatacacaaaaacataagaaaaatgccgtcgccgaagggcacacaacaattgtgccatacttttcgctactaatcgcacatcattcatatctttgaatttttagcgttattcccaaaaactcatcaatacatttgcctattttcctttttttttctttatatagcacaattggtcaccttcggcgacggaattttcttatcctttttgtgtttattttactgtcggattgtcccgtcacgattcattcttctcaaagatgtacgttcttctggcgccaattttttgtacaatctcgtcaactattaaaaaaatattaattaattaattaataggggccggattttatgtttttcggttaccccacatttgcgcctatacccaaaatctggttcaaacgaaaactttcaatcccagatggcctaaacagctttaaataagcaacagaaagtgattgtatctgataattcgctgtcagcaaagtttttaaaaataataattttttcaaataacaaaattgttgtttctaataaagcaaaagattgggttttcttaatttcaatgatgtttaggcgatcagggattgaaaaaaattttagtttgaatccgtttcgaacataggcgcaaatgtctgctgggacacgattttttcaaatatcaaaattaaaaattaaaaatgaaattttcatccatgggattttgcggggtcccattccgaaatcccgcatacctatttacaataaatttcttaaatttaaaaatagttttcatagcaaatttcatccatttgtgaacggtgcctataaagctacttaactcatttgactcaaaacagaaattgattacttcgagcaaaaattctaatcccgcggcggtatccgcaaatttgaaatttccgatttctaattttagcacataaacacccaaaacatttttaattaaatatttgatattttcaaatttactttgctccttttccattttcaattctttttcattttccttgtacacataataaggtaagttccaatttggtaaatatatgccgacactttgttgtgtaatttccattttgtattcgaagaaatagaatttggtataacttaaaaattgaaatttgcctttatttgtcaaaaatcgggatgtgtgagaagtgatttttagcgagaatcgagaaacaagaccgagacatgacccagagaaacgagaccgagacatgacccagagaaacgagaccgagacatgacccagagaaacgagaccgagacctgagcccgagaaacgagaccgagacatgacccagagaaacgagaccgagacctgagcccgagaaacgagaccgagacatgacccagagaaacgagaccgagacctgagcccgagaaacgagaccgagacctgagcccgagaaacgaaaccgagacctgagcccgagaaacgagaccgagacatgacccagagaaacgagaccgagacctgagcccgagaaacgagaccgagacatgacccagagaaacgagaccgagacatgacccagagaaacgagaccgagacctgagcccgagaaacgagaccgagacatgacccagagaaacgagaccgagacgtgagcccgagaaacgagaccgaga

SEQ ID NO: 2995 - DNA, 4076 bp, Heterodera glycines
  unsure (1)..(4076): unsure at all n locations
attttcgctaggttagctggttaatttttttaaaatggctcaaaattaaaatactttttaaagagaaaacttaacaatctccgggccgccctcattttgtcagtgaaccccacccctcctcctccccccgaatatgagttttgtgaaagcaaagggataaggttatgtgttttctatttgtcaatctgatgaatatttgttacttttttgtcataattagcccatgacatttggaattcaaatcaaatttcaatgcctaaaaatactatcatatctaataatttactttaattatttattttacagactgagaaaaagcgcattttggcgctttctgccttcattttgttgttcatcggtctgctgttcattgcggccatgatttggaagcagtgatgatcgaccacacaacccacacacgacaaatttccattggcacgacacaaaaaaaacaacaacaaagcgaataatttaattaacataacatcgttgccattgtgtttaatttgtaatcgttggctaattgctttaatgttctttaatccatcttttttattataatttggttggggaataaacgatgcataattcacatttaattggagttcatgcctcggaaagttaatttgaaaaaatggttaaaactaaaatactttttaaagagaaaactgtgaacaatttccgggccgtcctcattttgtcggcgaaccccaccccccccccccacttttccaataatttttgtgcggtcattacaattcatttatggtaaacgaggacacaaaaataagggaaagaacagagggataaaaatatttgtaactgttactttttataagtacttaaagtttggaattcaaatcgaatttattcgcccgtcgattgatcctcccccattatccgaatctgttctattttacgctaccgtacaattttcaaaaacatttttgcaataaatttatagtacataattagctaattatttcacacaacaactcaattagcaacaagtttttggccatttgaaggtaaaaaataataattaagaattgcttattaaatattaattttctaataaattgtacaaataatataaaatatgttttaaaatgaaaattttcagaaaaatccaacaaaaacaaaacgaaatttttcaattgaaatggcgggggtaaagcaagagcagcagcagaaaaagcaatatgagctccgcaaaaacatgacaatgttggatagagcggttgtggcagttgaaaatgcgcgagacgcagcagcggaaaatggtgggcaaaaaaaatgtgtacatttggaaaaaacggtagaaaattattttttagcttttttaaaatatcaaaaaaaaatgagagagataacctcgacaaaaatggccggttttttagtgatttaacgaatttttctaaaataaaataatataaatttaaaaaaatgaccaatatttttactgcaaaatttttcgaattttcaattctcaacttaaaaaaaaaattggttgaaaaaatcattttaaattggaattttttattcttaaaaaatcttatgagcttttggtttttgtacagctttgttgtacaggactttactaagaaattaaatccttgaaattaatggaaaaaagtagagaatattaattgttttttatataaattttcaaaaaaggaccctctattttgtcacatttaaaattttaattacaataaattgaaaaaaaaattaattggttttttcaaattatgttcgttgattcgccgttccttcatatttatatcattaattccattttcttccccctgtcccctccacttccctttcctctcctcctctctctcttcccgtctccccttttctgtccatctctctctttgctatttaccgcacaattatcttctctcttcccgtcgccccttttctctcctcttctctctctctctcttcccgtctcccccttttatattctctctctctctgctgttatttaccgcacaattaacgtatttttgctagtaattttttgaatatttgtgtttaatctcttacatgctaatcaattgcctgtggcaggcattgaaaaatgttgtattgacccctccccctcccccaccgcatttcctccatcatttgtaacattttattttcatggaaaagaataaaaaataaacagtgcctctacttttgaatttaataaatttctttaatgagcaaatgcccttaattgacccccaatgctaatttggtttaattaattgcataatatgctcccctaatgtattattccctatttgtgtgggatggttaattaaattctattaaatattttgtgttcctagagaaattgtgtttaataactaatactaattatcttaccaattaaacaaacgatgaacaccacgccaaaaaaaccgttctcctcgtccaatggcctaagtataaatagcatgaaaatttaaacaattcaaagcttttccaaactaattattttcagaccaacaacaggcttctcctgaatatttcaacgagattgctcaacggttcgaaaattcggaggaccgcagcgtaaaatcattttgcatgcccaaatctatttggtattatctacaatttttcaggcacgtgcctgggtccaaagaatgctggacgaggtgcaagaaaacaacgagcaggcccgcgtgagaaaattatttttaaaatgatttaatcataaataaattaatttattatgagagggttcaaaattgccaatttcacattttggcataaaaaaggaaattgtcaaattatggtcatcattttcatggccttaaaatttggaatttggcaggtgtttcgatacagctgatcgaatacactcataataataataattattattattatttaattcaccaggtttaattatttatttataacgcagatggaggacaaagaacgcatttcggcgttggaaaagcaaatgcttatggtttcggtcggccttctcatttgcgctggcgccgtgcttttcaagcacttgaagaattgagggctcaaacgaagaattccattggcacgaaaagaaaaatcaacaacaaatgaaataattttaattaacttaacaatcgttgccattggatatttaatttgtaattcgttggctaattgctttaatgttttttaatccatctttttattataatttggttgggaaataaacgatgcataattcacatttaattggagttcaagcctcaaaaattttttgttttcgagcagcactaatgaatttcatttgttatggctagacagtgcggattttctacatttttttatttttcttatcagagatgctaatcaatagcctttcttcatatgttttgaaatcattgtcaaatcttttaaattttcgctaggttagctggttaatttttttaaaatggctcaaaattaaaatactttttaaagagaaaacttaacaatctccgggccgccctcattttgtcagtgaaccccacccctcctcctccccccgaatatgagttttgtgaaagcaaagggataaggttatgtgttttctatttgtcaatctgatgaatatttgttacttttttgtcataattagcccatgacatttggaattcaaatcaaatttcaatgcctaaaaatactatcatatctaataatttactttaattatttattttacagactgagaaaaagcgcattttggcgctttctgccttcattttgttgttcatcggtctgctgttcattgcggccatgatttggaagcagtgatgatcgaccacacaaccacacacgacaaattccattgccacgacacaaaaaaaacaacaacaaagcgaataattttaattaacataacatcgntgccattgtggtttaatttgtaatcgttgggctaatggctttaatgttctttaatccatcttttttattataatttgggttggggaaataacgatgcataattacatttaattgnagttcatgcctcggaaaggtaatttgaaaaaagggttaaaactaaaaaactttttaaaaaaaaaactgggaacaatttc

SEQ ID NO: 2996 - DNA, 1232 bp, Heterodera glycines
catttcctccgtcttttgtacattttcattttttaaattgggaagaaaataaaaaataaataattcttcctctaattttaatatttatttaaaattctatgtctttgaagaagttttgctaataactaataacctatttattattaatatcaaacgctcacttttctgtgcctcaaatggatgtattaatttgcatgaaatttttttaacaattcatctaaaccaaaaaatttacagaccgacagcaggtgtcgccggcttattacaacgaattctgtggccgatttgagaattccgatgatcgtcgagtaatatttttgccaatcgcttttttctattgtcttataaataaatattttcagacccaagcatggatccgtcaacttttgttcgaagtcaaagagaccaaccgaaaagaagtgaggaaattattattgaaatttaaatttcaactttcatttgggttttgttgcaaaaatgtacacaaaaatactaaacccctttgaaaatttgtttaaaaattattcatatttttcccaattgcctttgtttataattggaaataatttctcagctttttttttcaggacaacaaagcgaccaccagcgaaggcactgttttcattttgggcgtttgtttcggcatttccgtcggcttcatcattgacagaatgttcctgcactgagtgatgagagaaggcacgaagaaaagaaccaatggcacgaaaaacgaaaattaaaaaggctaatttaacaacaacaaaaattcgttgccattgaatgcctaatttcgtaatcgttttctaattgtttttaacgcttttaatccatcttattatggtctgagttggggagtaaacgatgcataattaactcattgggatcttatgtcttgggaaatttttagtgccccaagcaggactaatcaattaatcccaatatttgtttcatttttaatggtcagacggtgcctaaagtttattaatttatgcttaaaactttaaaaattatatgaaaatttcttcagagcacatttttaaaattattcttcatgaaaacaggaaatttgaaatttaattttttttttgcaaatttgacgaaaaagtgattggatcaattatctgacaagacaatattaaatattttagaaaaataaataaatttaaattttatggggtgtgacaatttaatttcattcgaaaacgaaattagtagactttttttgaaaaata

SEQ ID NO: 2997 - DNA, 1473 bp, Heterodera glycines
cgctttttcaaaataaaaatgtaataaattttcaatgataaaacggggggtgggaagaaaatcgccgccggggcgatgggatgggatgcccatcaccagcatcatcatcattttcgcctccccccatcatatcgatgtctcgaccgacagaaaaaagggggtgccgccgtcgtcgtcgtcaaattatgcgaggtcgagagcgatgggagaagacaaaatcagtggagaatgaatgtcttaagcaaaaaaggcgctaaaaggcgcgacaaaaaatttttgatgacaaaagacggcatttttcggagataaaaacgcgtaaaattgctcccacaatgaaagtgaaataaatgggctggcaccaaaattaaaaaaaaacactcgcgtaagcagctggcaccacactcaccagccattcattcattgtgccaacctcaaaagatggcacaccaaggcaaataagcgtggccatttggagggatgggatagacagcgggagtgtgaaattaagtattgaaaaaatggagagtgaatagagaaaaaaacaaaatgacatttaaatcagttaaaattaattaattgaatgaaatataaaaaaaaataaaatattatttaaaaaaatagaagtgaaatggaaatataaatgagtattaaatttaaaaaaacgccaaattatggaaaaaaaggtattggaaaaattgaattagttttagaagaatgaagcttaaaaatatttggccattgaacttgattcataacattattcatttttaatttaaaatatgaaaagttaatgaaaaaatttcctatattaaaatatatatttttttttaactttaaaaatggcaccctgaaaattatggaattcttttgttgaaataatttaaaaaatttgaaataaaactttaaggtttggaattttatttggttttaattaatatattttttaataaaatttaatatttaagttttacttactgtttatttcattggaccagattggcggacagatcgacgacataatgcagaacaaaatgccaaacaaaaatgcgctgtaccgtagcatttttttttgtcgttatgtgatgaaagacgtcggtaatgaggttaattgtatgggagttttgaggatggacaaaatgggtaattaggacattttcagctgatacgagaaggatttagatctaaatttttaatgaaattttaatatgaaattaattatgcgtaatttttgtttgattgaatcaattaatataaaaaaattgtggaccattaatacacaaaattgcaaaaaaatgctaggaatttataagataattattccaatgagccgtgaatcaatttcaaatttgatcattattttttattaccccaaaaagtatgtaaataattaattgaaaccaaattttattgaaaaaattaatttttacaaatttttatgagtggctgtgtttagccaaatcaccaccaaatcga

SEQ ID NO: 2998 - DNA, 3594 bp, Heterodera glycines
tcatcattttcgcctccccccatcatatcgatgtcccgtccgacagaaaaaagggggtgccgccgtcgtcgtcgtcaacttatgcgaggtcgagagcgatgggagaagacaaaatcagtggagaatgaatgtcttaagcaaaaaaggcgctaaaaggcgcgacaaaaaatttttgatgacaaaagacggcatttttcggagataaaattgggttataatttaaagttaattcagaaaagaattaagctgataatgagattttattttggtaaaaaaagggtggtataattttgatttaagacggcgacattttttgaataataattgttttttttttggagaatttaaatgataaattatgcagaaattggcattttgagggaattttttttatataaaatgcaaagaagatagtatatttttttgaatatgacaatctattttaaatcataatttaaccgaaaattgaattaaatttatttattttattaaattataagtaaaaaaaaatcaaagttaattaggcatttaattgaaaaatgcgacatatttcaggtgaatgataagaaatcatatggtgtaaaacagtttaaaaaataggaaattcatttatatttaaatttttgtttgtctccagaccaattagggaaccatggaaatgctaagcgaaaatctaatcctgaaatggcataaaattaatgccgcacacacacatcgttttgtttacggagttgcagcacccggatttggaataaaattaatgactctcgcggtttacatttaattgcttctaaatcaatgcaattttcttgggtcgagagagaggctaatggcaggaaaatattgtaagcattgaaattcttaaatttgttgagtaatagaaggaatttaacccaaaatttaagctttcaataacactgaaaaagatgtagaatctcgagattgaatcgatattctgatccatctgggaatttatgaaaactgattgatctcgagtcgaaattttcaaatcaatctcgtggattattgtcacaatttcagggttctgatcactcacagagcagctattactgctgtcccatattttctgatcaatcgattgaactgtgtggatttgtttgatcagcacaagcatcaacagcaagagtgggcggggatgggaagcgggatgattgtgacgcgtacactaatgggtgtcgcggagggtgccgacgaactctcaaccgcaccaccaccaccatcatcatcatcacatcatctccatcagcagcatttcagtgtgctgctactttatttgtgtgtgtgtgtgtgtactcattaaccactgttattatcgataaaaaccggttgctagctgtgagtaaatgaattagcacatcgaccgtccgcccgcctgaccgccacacatcccctgcggggggagtggcgggagatggcggtaaaaatgggagaccgcggaacagtgtgcggacggttggtgtgtgggatggtgtgaaatattattaaacggttgcgcgggactcaattcattcaatttatgtaataattaaatttaaatgaaaattgattggagcggggcggaaagaatatgggaatggtcaaaagtcagcagaaaatgaacaatggacaagaatgttgagaaaaagtgatgattaaatgaggagagttgataaattagtgaaaaaatgcaattaataatttaatatatggcgcgaaacgagaaatttataaataaataaattaaattatttgaataattacaaaaatttttaagattttaattccaatgaactaaggctatgaccataatataaataaatttacattttaatagttaaaaaaaaagcaacagaattaaataaaataaagaaaaaaaaatttaagataaaatttgcaattaaatgctttaatggcttgctatgggcaaatcgatgggcaaaaacgaacattgatgatgattgtgtgggggaatgggtgttgtacgtgggtgtaaaatggcgaaaaaaaacaatttgtgtaaaagtgggaagaaaaatgctaacaataaggaaggaacgaagctgacacgacactcttctgtgaacatgagtcatgtcatcacagaagaagaagaagaagcaatgaacaaaaaaagaaaaaaaaagaaaatgcgaatgcgtaaatgtttaattttatgttcgaaaatgagaaaaaaattttaattaaaaaatttgtagaaatcataaacgatttatgcattaataatcgatgtatgaaagtttggacgcaacagaaaatttgcgtaaaattgaattttcgtaatcggctgatcacggatccgacatacatttcgaccacttcctaaatcctaaccccgattctgacacaacgtcgaaaatatcactaatccggcatttggaataattccaaattcgtaaccagactcggatacaaacatgtaaagcacacctcgatacccttagggaataaattttgacactggattttgatgaaaaattattttagccattttcacagaaatgcttttaattaaacaaaatgtaacatttatttaacccaattttgacccagattttctcatagtgtgtttgcatttgaagcaactcggagcttgattggggtagggagtgagctgctctcccgcttctgcttgctgattttgatgacgggaagaagcggtggaaaagcaatgaaattgaggttggatattttgcagcccccgcctcccccgcgggcaaaaatgggcaggaatttgagaagacgaagatggaaatggacacacacacggcgtgggaaatgaatgagaatgaaattgcaaaaccccaaatgaaggacatttaagagcaatggttgcttgttggtggtggtggcggtgctggtggggaggaagtagcggaaaaggcaattaacaaacggtgggtaaattggggtggttgaaaaacaaaattttctcgaaattttgcactgaaaaattttggaaaaaatgtgagaaacgaaatttattgataattgtgttgatgataactgaattttttcaagataaaaagaaagatacaattaataaaggctaaaaattgaggtgcaaagttttaaccgaaaattttgcaccaaaaattaaaaaaattggaaataccaaaagcaagaaattcgaccaaaacataggtggttaaaacaagttgctgaatgataattgacgaatatttttttttccggttttgttggttaaaaaaaaggataaaaatgttaaaaaaacgcattttaaaatgaaaaatttctcaaaaatagaattcaaataaatagaaaaactttcactgatttaattctcctgtaaaatatttatatattcttacaaaaagaaaatggaagaaagagaataaatctgtttatcaaaatggcaaattgtatacaaaatttctaacaaacatccgccccattcgccgactgtcccctccggcgacgcggaagaaaagtgctcctccttcctccgagcaaaagggggcgggcgggggggtggggggcattttgtggaaggaatgcacaacgcccgccggcgtgggcggggcgggcaaatgacacacatctgctgctatgcct

SEQ ID NO: 2999 - DNA, 1301 bp, Heterodera glycines
ttaatttttattttggttgtggcaagtaagtggtcagccggaatcttcatctagtctcgcagtgacagactcaaaatctttcatctaaattaatttacaattcatcttcacttaatttttcttcggtcgtaccaatttacgaattagcaattttatattcgaaaattttgcagttgataattgttgctataaccaacataaataaatatcagaaacgttacgattgtgatattaaattttgcaattgccttaatgaatatcctaattgctttcaaacaaaagtctgttctccaactcatatcttaaatattttattttttagaatatattatgctggtcagttcatatttttggagaacgttttaaagaaggataaaaataattattttattttaccgtcactagatatgcatatgtattttaaattttttattgttatgtaaacttctaatatatatatttatatacataatcatatgagttggcggttttaagaaacgccctggcggttttaagaaacgcccaaagtggcggttttaagaaacgccctggcggttttaagaaacgccctggcggttttaagaaacgcccaatgtggcggtttttaagaaacgtcccagcaccttgtggaggatgaggggggggatcagagggataggcccagaaatgccggtgatttgaggttggggggcgacttgaaacaaaatggaaacttgaatttttatacaagaaagggataataccgcagattataatttaatcagaattgctttttaattgtttagcattggtttataaaaattaaaattaattaaatgaaattgaataggaaagtttgatggaaacactaaaccaagagttattaagagcttttcaaaaaagtcgaaaatttaattcaagaattaattagactaagtaagtatctaagaaatggttgattttctgcattatcttttcaagatttttcagccgacattaatgcatactttctgaactgacaaatccaaggcttactcaaatccaatttccaccctaaatgaaggggggggggggggtgagggacaaactgcacaaaatgcttattaagcccattcatgaagtgaaaggtggagtgtgaagcaaacgagagaacggggcagagggggcggggggggaggaagaagcgcacattgtgttaatgggatgggtgagggcggggcgtgggcgcgcgcttcatcgactttcatatcccctccggagaggctttacctgccggtgctgctgctttgttggtgatgggggggggagatggaatgggaagg

SEQ ID NO: 3000 - DNA, 1054 bp, Heterodera glycines
tcattagtatgagaaaagtgtggtgcgatttgagagggtgggataaggtgggttttcgaacatattgggctgagggggcttcgatattatgaaatatggccaaccccatggacatagcaacaatattacagactttatgaaatctcttaaaatcttgattcctgaaccgaaattttttaccaacaattatggatccgcgccatctcttacttgacgctcgcgctcccgccggagatccttggaaatcccgattttttttttgactttctccgattgaattttttttttttggacttctccgatttccaacaaagcggtccccgcccccccccccccgcgatttgtcggagacgcacccaatttaaaatttttcaaaaaattgtttgtttgtgataagaagggcaacacaaaaaggaatgaatcatcttcaaaaaaaagataaaagggtaacaggaaaaatccttggctttttctaattgttcaatgaaacggaaatggccaacataaaagaacagaaaaaaatgaaatgattaattgctgacaaaaaatgattaattgctgacaaaaaatgattaattgctgacaaaaaatgattaattgctgacaaaaaatgattaattgctgaacaacaaaagaaccatcaagcaaagatcaataagaaaaaaaatggtggccaagaccaatacggatatattctttgaaaaaaatttatctaaattcaaattcgcaacaaaagttggtctcttcatataggaatgatgccaaattctcgacatgccccgaatattgttcccgttaattatggaagggtgatttaaaacaaaaatgtattaaaattaattacacagagacattacataaagggtcataatttcagtaaaatgcaacaattttgcataaacaataatgctttttgtttcttaacctttgccatcatccctatttaaataaatgatttgtcgggagacggggcaggggaggtagtggtgggggggggggggacaagtcatcactttaagaggggcaaatgtccggtggggaatgagagcccccg

SEQ ID NO: 3001 - DNA, 1101 bp, Heterodera glycines
actagaataaaatatactagagttgtccacccaccttaactttgtactacatattattaaattattagcacacttaaactggtacaaattgaaaattttgaacaatgcaattattatttttatggatttcctttttcttcaatgatgagaagcgtccatttataaagcagtgaatcccccgccaaaacagaggagaaaaggacggggcgggggtaccaatgggacggggacgacggcgaatgggacacattttgcagcagatttgggaccccggtttctgctgcttttggtgcagatggcgccgccaccgccattgccgggggcgatggaagtgtgtgtgccgaaaatgcggctaagcatgtgcccgccgccggaggggaagaaaatgctttttggggtgggcgctttgcggatgggcgaggggcattggaggggtgtggcgattggtagcgctctgttgcccccgcgggggttcaaaagagaacggtgacggggccggggagggcgggggggggggcggagggggggggggtggactggatggcgaagaagacatggttgagcacgatggaggcaccaattttgaggaggaagaaggcaaacaggaagatgaagaggaattggatgggcgcccggcccaaaagcggccccgttatgtggcacctgttgaggaggaggaggaagaagccgggaatggcaccagtgccggcaactgtacggcggaggtcgacgagctgaaggcggtgatcgaaggaatgaaaactgagcttgaagcggccaatgaagaggttggagagttgaaagccgagatgggcaagctgagcgcagaaaacggaacattgaaggcggacatccgttcaatcaaagcaaagatcggaagtatggcaataatcatccgtgggaacagagaggagcgcaatgagatgcacgaggaaatgcaagagatgaaggcggacatggccgagttgagagcggaaaatgcaaatttgaaggccgacttcggcacaatcaaagcgggcattggcggaatgagacaaatgtgcggcgagatgaaagaggagcagggcaagatccaaagaggaaatgcaagagatgcaggtg

SEQ ID NO: 3002 - DNA, 3208 bp, Heterodera glycines
  unsure (1)..(3208): unsure at all n locations
gggagagaaggcaaatttgtggaggagagagcgcttttgtcggtgtctaaagaggggcccccaagggggggagtggatggagaaggacggcataactgctggaaaattcatggcggtggtgacaaaacaaaacaaaacaatgcacatacatatgatgagtgaaagtgctgctgtgctgtgtatgtgtattgaagtgaacaaataaagatgaactttatagtaaaaagtgggaaattaaaattgtaaaaatgaaaatttaaataaataattttaaaaaataaattaattttgggctagggttgatggcttatttatggagaaataaaaaaaaacgtgaaaaatttaatacatacaattggcataatcccatacatagaatttaataagaaaaaattaattgatgtccgttatttttagttaaaaatttcaatttccttttttacctagttttattttaattttttaattttatttttgttacctaagaaaaatgggacaaaaaaatcacaaatgcaaaataaatataaatttatagataaaatattaaatttagctatttttatgcagccacaggtccaaaacaaatccatcagcagcaaattaaaacaatggacacgcacattacccaggggcataataataaacaacacaatgccaataaaatgaaattggcaggttaaaagtttgcctgctgtctgtccaccattgtccattgtccatggatcacatcacaccacaacaagattaatggtcacaatcagcacaccccataaccaccactgactgcactcgcaaatggtcattacgcggggttaattgtccgtccgtgcgcccgccggtccatcaacaattcacccgcccatgcccacacactcaactctcaatccgtaaaacaatgaccgtgaaattggcttggcgcattgtgctggtgggcaaaattttcgattagacaataaaaagaaaaaaaataataaaataaaatgtggaatttttttaagtaaaaagagtaaatgcgttttatgcatattgaaaaatataaccttgatatccttatttaaatatgtgtttattaaaataaattaattctttaaaaatatttttaaaaaatttagacaaaataatttaaaaatatttgttaaaggcaaattaaacaattttattagcttcttaaaaataaagcaaattaatttaaaataacctaataagaataaatgagcaacattgaataacttaactagacaaatgacttaaacaaataccaattaaaaatcgcgtaagcctactcaactcaaccaaattaatcgtcttaattaaattaaattattccataaataaatttagccactaattataagccaattaggtggatggttggcaagcccatgcccaaaagcccaagccgtggtgccctcccctgctcaaaacaaaaaataatcgtcgacgctaaactccgccaatgtcgttggctaaaacaaatatttgtatattatttttggggctgatgataatggtgatgatgatgaagtagcctatttggtggcttttccaatacaaaactgtgctgcttttgccgatgggagggatatcggaacggatggctgtggagataaatgatgatgaacgatggcgcggggcggatgggatatgagggatatgatgaccttgatcccgtcacgaaaaactttatctcatcactcatcaacgttcccagaggggggccgggggggagggggagacagaagaggcaaaattaattggggataaaacaaatattaagaaaacggttggtgtttattattttaattatgcgcataattatgcttaggtatgccgattttgcctggggcaaaggcaggcagtcagatttggtggggtgataagctatgttggtgggcataattagaatcatttaaaataattatgtaaaaattaattgctttatcgtttattggcgcaaaaagccaaaatttaatttaaaattatctaagaaaattaaaaaaacaatacaaaaaaccaacctcatacgagtcaggaagttttccaaaaataacgaaaaaatgaaaatgttacaaaaaatttggttattttttaatggtgggaaaggatgaaaatgcttagattttggtggacgataaacatttttgagcaaaaatgaaattgtttttaagtataagattaatatttttttgaaaaaaatgtagttattgtatttaattcattttcagcgcttgggatccttaaaaatttagtttttttttaaatttcggtatcctccttgggttctttttaaaaatcagggctatttatatattaaaaagcttttttataaaaatatattttaaaaataataattttaaattcactgacaatgaataccaaaatttaaatttaaattcgttttttcctttttttgtcaaatgtaacatgcaataaattttcttgtgaacacactctgttgcgcaatttggtcaacatgaacaaacattgcgcaatctttttcgttcaaaatgttcaaaaaacgtaaaaagcgcattcatctaatctcatatattttcgcgcactaaaaaaaattaataaaaattaaatttttgtaaaattaaaaacgaaaattaataattcaaataataaaattgtgcggcaattggtcggtggcaaattggtcgtatagaaaatgttagcaaattatttacgcgttatgcattatgcattcatctgctccattagatgcatctcttctgctgatcgtagcaaatcgctccgatcgttttatttattgtaaaaagctgccgatggattttggtttgaacaattgtaatataatggaaaagacacaaaatccggacaataaaacagggaattctttattaacaaaatattttcttaattgaaaatacgaataatttatagatttatacgtttatttagatcttataaagagaagaaaaatattttatttatgaatattttggctttaaattaaataaaaaaatcaattggtgattttgtgaataaataaattaataattctccttaaaaacataattgatttgcttaattcattcacataaattcgtcaattaattcaaattcaatttattattaaaatattaaaaataaaaatgcatttttgcattttgatattttttattattttctttgcttttaaaattaaatccgccgaaaatcctgaccanaattttgatgaaat

SEQ ID NO: 3003 - DNA, 2133 bp, Heterodera glycines
  unsure (1)..(2133): unsure at all n locations
ctccctttccagatagtcaataaggaattaaatttaaatatttaatttattaaaattaaatttatttttttgggatttcccaatactcaaattatatttcacactttattagtgaattttatcgaacaaatatatttataatgaacgatttgaacgattgagcgataaaaaatggtgattttgcaatggtttaaatacggcaattttacataggcgggctgacagaaatttaaatgtaaacaatgctgactaataaaaaggtttaaaatcacaaaggttatgaatttggcgtaaaattattttaaacagatgaatcataaaattttaaattttcgtcgctaaggatgaaattagcgacaaaagaatttcaatgaatttatccagtctttcacccggttaatttcgctgcatttaaaccaagtgattccgatattagagaagaaaataaaatggacacgaatttgttgagcctaaaaaccgtattatgacggtttttgacaaaaatttctgaaaatttacttttgaatatttaggtatcataaatcctctttgcgattcctttcgattaatttgaaaaatattctctaaactggatacacaaatttcattctacaggtttaggttagcctggtaaaaactggagaaattcagaaatgtaacttgaaatgccggaggattgagtcccagtgattgaaatgctggagggttgagttccggtgattgaaatgcaggagaatgagtcccagtgactggaatgttggtgggttgagtcccagtgattgaaatgctggtggattgagtcccgttgattggaatgttggtgggttgagtcccagtgattgaaatgcaggagaattgagtctcggtggttgcgataccgaagaatcaggtgaggttaggttccagcgattggaatgatggtgagttgagtcccgctgattggaatgccggagaattgagtcccagtgactggaatgtcggagagctgagtcccggtgattggaatgcaggtgtgttgagtcccggtgattgaaatgctggagggttgagtcccagtgattgaaatgcaggagaattgagtctcggtggttgcgataccgaagaatcaggtgaggttaggtcccagcgattggaatgatggtgagttgagtcccggtgattggaatgctggtggattgagtcccgttgattggaatgttggtgggttgagtcccagtgattgaaatgcaggagaattaagtgttggttgcgataccgaagaatcaggtgaggttaggtcccagcgattggaatgatggtgagttgagtcccgttgattgaaatgctggagaatagagtcccagtgattgaaatgctggagggttgagtcacgttgattggaatgttggtggattgagtcccagtgattgaaatgctggagggttaagtgttggcgattgaaatgttggtgggttgagtcccagtgattggaatgttggtggattgagtcccgttaattggaatgttggtggattgagtcccagtgattgaaatactggagggttaagtgttggcgattgaaatgttggtgggttgagtcccagtgattggaatgttggtggattgagtcccgttgattggaatgttggtggattgagtcccagtgatagaaatgctggagggttaagtgttggcgattgaaatgttggtgggttgagtcccagtgattggaatgttggtggattgagtcccgttgattggaatgttggtggattgagtcacgttgattggaatgttggtggattgagtcacgttgattgaaatactggagggttaagtgttggcgattgaaatgttggtgggttgagtcccagtgattggaatgttggtggattgagtcccgttgattggaatgttggtggattgagtcccagtgatagaaatgctggagggttaagtgttggcgattgaaatgctggtgggttgagtcccagtgattggaatgttggtggattgagtcccgttgattggaatgttggtggattgagtcccagtgatagaaatgctggagggttaagtgttggcgattganatggttggtgggttgagtcccagtgattgaatgctggtgagttgagtcccggtgattggatg

SEQ ID NO: 3004 - DNA, 4258 bp, Heterodera glycines
  unsure (1)..(4258): unsure at all n locations
gtcatctcatagtagggaatgattagcttttcgagtttttctttaaagtgatttgtatacatatttagccatttatgaagggcgttactttatattaacaaattaaagaaattatgggaaattataccgtcaatcgaaaaatttatgtccatatttttgcattttatgtccatacttccgatttccgtaccccgctaggtccaaaanagtatgcatgaaattgcgaaaagtcgaaattttgaactttttattaataaattttttccaggcttgaaaatctttttattttttgtaaggctaatagagcatgttaagagctttcgaataccaagattgttgggtttagatgccaaagaacaaagctatagtggaaaaacatgctggcgcccaaactgagcgcccaaacgcgcgcgccaaaagtgcgtgggtcccccttaattgggtgcccaaattccccctcccctcccccgagaatacaaatgatttatacgtttacgtggaatatttttcagttcatgttcactgtttggctttcacgtaaaagttgttgcattttccaatataaatttggtttatttggcgcttattttaagtgcaaaatattggttttttgatttgtttggatgttcacgtaggaatagaaattgtttgattctaagtttcgcgcacatttcaaaagtttcgcctgccgattcaaccgaagtcgaattcttttttaattttgaattaaataaattacaaaaattttaaaattgttaaacaaaaacacttaaaaaaatttcagtcgcattttttgttcaaatcgaattgctaattgtgataattttgttcaatattatattaatgcgattaattaacttgctcaatgtaatatttccaaattcgcttcactcatttatcatttattcttgtcatttcttctcgctccaccattttttagttcgaattaattgacgtatttttccgcttttttaaatctactacttgtaactcgttattggctagggtaattaggatacgaacacgagcatgattattagcggtgttaattaatagtttattccttactaaaattattaaatatttatactttattttgttttctttaattaatcaattttatagcatttccaattcagcagacatttaatgtttcaaaaaatttgcatttttctcttccacccaatgctgaataatcgttgaaagtttaaaatttccttcttttaccatccaagttcttttaatatttttaaattaatccatcctataaatatacctaaggcggtcatttaaaaaaattttaaaaaaaagataaaacaatgaaaaaattggaccgcagaaagcaaaacccaaatttaatgttaaaatttaacaaatttaatgagtttttcaaaatcaaaaggtagataaaaacccaacacgaacatgaaacccgcaattattactgcccttttaattgcgtttattctgcaccaaattaccgccgtaattgaaaatgaatgtggacaatgcaaacattgtctggataaaaatggtaagcatttggaataggtttttgtaatattatggaatgccaaagattgttttctcaacatgatcactgcttgggctcagaatggcgaaatcgaatggccacgggtgttgggagagaacccaaatttgtggggaaaggaacaaaaagtgttggccgatgcgaaggcaaccgaagacaaacagttccaagacccgaaatttgaacaaaattttaagtgggtttcaccaaatgtatctttatttcctaatctgcatagcattttgttgtgcacccattaatttgccttaatttagggcaatgaatgccattggtatggctcatcgcggtgcctaccattacttcagaggagagccgggaagtgccggtgccttggagcaagtgcggcattttctaaacacaagcataagggcgggattcaatgtgcacaaagactttgctgtggtcaatgttgaaatatgtgagtttttaaaaaagtttcagtatattttaatattttaaaatattaattgccaacttggttattctcggacagtgaactcaaaataaatgaggaagggaagcgggtttacctaattagcatataattccaagaaattgtgatcgaaagttgctaattcaaattagaatctcattaatagtacactgttaattattttgttatttaattctgttgttcagataagaatgaaggtgcagacaaggaccaattcacgggaaagctgctcaattttgtcaagttactaaagagcaaagtgccgaaccttttcatccacaccagtgtcgatcattggtcggcactgatcaacaacgatcatgacgagttcttcgctcaatttccgctttcggtgatcgattatgacagtcaacagagtccggcattgccgcgcccgtggaaagtatggcagcggtggttgcacacaatgactgtgccggtgaatggcatttcgggcaatgtttggctgagtcgagtgaattgcagcgtcaaaatgatgccaaacattttctgatgagcgaaaaacaaagtgatcattggaatcatcctgttgaaaaatttatgaaattttaagtaccaaaaacatttcaaaacaaaggcaataaaataataattttatttttgttaaaattaaagacaatgctaatttttgtatagaatgtataaataaatcaaatgcttgaagtgaattcgtgaaagtttggtggtgcaagcgaaagtgaatttggtcaaaatgatccaaaaatatttaaattattttttaatgccagaattgtttggagaattgcatgagctaattggatttattggataaaatttaacatgagctctagaattttctttgcttttgcacccacaattctttacttaatcactgatttgatttatagaaaatgttacgatagcatttttgccttaaaaataacaaaaataaatgtatataaaaataatgaatgtgagtcacaatttttaaaaaaagtgggagcccagccgcttcatcgaccaaaggaacgacaaatgtccgtatcaacggaacggacaaagtgttcccgctccatccgatggtcagtcaaaatggccgaccattcgacgcgtatttttaaccgcccgcgtccctcctcaattagaactaattgctcctccaggcgaatttttttattgtttttgttgttgttgttgctgctgctgttgtcctttgtccgtccctccacaaactgtcgcacttcgctctccgcgacgaatcgcaccgaacgattcactggactcacacaatcataagaaacaaaaaaattaatatataagaaagaaaatattcagtcaattttcccatgggttgaaaaaggaaacagagaaacaaagaaatgtatgtattctttcgtttttgtttttttcttttcctctttctatttcgcttttactgcgctcttttctttttcttaacattttataatttggtaaaaatttgtgcttacactaattggacaagtcaaatatatttttcgtacatttttctccttttctttaaattttgtgttctttaattgccccatttttagattcatcgtaaaatttttaatgtattcagtcatgtgactaaatggtgccactttatgtgttaatggcaatgccattcttttaatttttctccattaaaattttttattacaatttttttactgctttcgtccgttaccggaaaatgcgtcataagtcaggatttcttgaaaaaacaaacacggtagtattattacctgaaatcataaacgtgggttggtaatttacagaatgtttattttatggatttgggtaatttcaatttttttttgcctttaaaaaacaatcgcaaattcagtatgatgtttttatacaattttgtcctttggtaattcaatataataatgctacacaactttattttagaaaaacttattactgactcattttccgggagccctttcatcagacataaatatatgtatatagcgttattttctgttgtaattcaccaaatccccacatggattctcccggcgaagggtcagggatctctctgaatccgaatattccgtttttaattagcaattaatattttactattttttgatttgtttttcctaattcttttttgcttattttgatatgagtaattgacaactttttttcgccaaaaaagcccacaaaaattaaaagaaacaatgccataataataataatcccttttattcattgta

SEQ ID NO: 3005 - DNA, 1496 bp, Heterodera glycines
  unsure (1)..(1496): unsure at all n locations
cgctcgtttatgtcactggaagacaaagtcagctttttcatttattttggctaataattatantattttcaatttaattttccccacttttcatttctttgccccccccccccctttanaaggacacttcgtcagtcgtgcaatcgtttgatcgcggccaatgccttcttttccggtctttttggcctttcgttgtcaattggttgggcttttgtccttcttggccaaccttttatgtttgaaggtgccaaaaaattaaaaaaaacaatttcgattttcaaacattttcaggcccctgcgttgtcgtccaagtcattcctttgttctgtcgtaattttggcttgagtttgcttttttggattggttttgaccgattggtcattgcgctgtccgccaaatcatttttgtaacatttttattgtatattatattattattatataattattattaatttattaatcactcttttcaattttattttagacatcgtcaccagtcgttctactcttttctgatcattttcggctcgtcacttcacgcgggtttcattgtcatcacggtcattttaatggccattgaatacccgcaacagtgagcaattaattaaaaatcccatatttgatgctaattaaattggcgattagcgtcactctgtgcttaacccacgacgacaattatgttggcccaatgtcgttgcctttgcttctcgtcaatgcggcactcagtgcactgatatttctgctctacattttcttggcggttgtggtcacatacaaaaaggacaattcaggcaataattaatttgccaactaataaattaattggctataatttacctatttaaattttaattgccaatttaacttcccccgttcgtttagtgagttcccaaatcacacggcgccttctccgctctatgatggccattatggttgtggtggtggccggcttcaccatgaacaattttgtaaatgtgttgttcaatttgatggtcataaaaactacagaaattagcaaagtgaatttttgaaaatggcatttttcaatatttggcatttttaattctccattttaggcctatacgtcgatggcattgtcttgccttttggcattggcttacgcgagcaatgcgccgttgttgatcattttcaggtgaacatcaaagcaaagaagcaatgttttcataaatgaataaaaatatttgccggttaagtggcgaatatcgaaaggcgtatttgcgcacttttggcccatttttggagcgatttcctttgatcggcagcgcatttgtacaactgcagccgcttactgtgaacaacaacagcaatagaacgataatgaccaacaaacagcagcgaattcaccgaaacttggccaaagtgacaccaataggtgngccattagtgaaaggggaaaattgagacaatttgggacaactaattgtcgctaattaagtcaattaatgcgccagtcnaagagaaagagagagagag

SEQ ID NO: 3006 - DNA, 4250 bp, Heterodera glycines
  unsure (1)..(4250): unsure at all n locations
aaaaaaatgaaaaatttattgctaaaatgtntaaattaaaanaattaaagttcaaaccgaaaatgcgtgcaaaatgttaggaccaaataattattgttgttttgttatggagttcccttcatgtttatttatcactgtttgtattgtcctaatgcatcaacacaatttgtgctgtcacggcacaagaaatgccgagtcgaacacgccggtgccatgagaaacgcctccctcattaacctctgccaactttgtgcgcataaagtgccctctttggacattgtgcaacacttttccctcacttctgtcgcccaacaaaaagccaaaaatgcccaattccgtggtcatttcaccgaactggggcttcttatgacctcggatcataaaattctaaaaaataataattttttaaaatgaattattgtaaattcagtttttatttattttttcctcgcctttacgcgcattgcgctgagtttttgcatcaaaatgtgtgcctcccgttcttcgtcggtaaattgctgcagtttctccctgagtttttcgtcgaagaagttgtggccacccccctccaggttcggctttatcacatagttttcgggatgaacaatggcatcctatcaaataaaaaaataatcatttattgctaaaatatttatttttatttattcaaattaaattattatttcatttgttttatacgtttatggctttttgcgtgtcttcgtctttgtcagtcaaactccacaggcccgcgaaagtgcttcttaccaacggcacaatttccaattggtcctccaaataatgctccaccatgccgggcttcgccaaaatctttggaaatatttattttttaaataatcttaaaattgttttgtctgccacctgttgcactttcttttgtgtggctaaatcaagagcaattgttggagacatctaaaaagagtaaattatcagaggagaatgtatactgattttttggcatttcttccaaattccatgcccatttaattaatatatatgaaattaattaatttcatttgctttgttatttaattgttaattaaaaataaaataaaaataatataaatatttatttttcaaatgcatacaattgttgttgaacgttcgaacaacaaaagagtttcccaatcatgttcactgtatttcggaggctcattcaatttgtaaacaactcccactgtcagtccctccaattgcaaagaatggtcgtcggcgttaagagtcaatcgaaaagaaaaattaaatattttaattaaaaaccattaattagcattttactttccatctttgtacattttagcgcattcgggcaaagacaagcgtacaatttgcagtgcttctccttcttcttctgccaaattcgtaatgtcgtactcaatgtgacgctggccataacggtttttgcttgttcggctcgcaacgaacaaaatgatggcatttgggtcggcgaaagctttcctaaataaaaaacgaaaaattaaattaattaaagaaaatttctcccaccacgctttgtacaacacttctgccgcaccaaggcccgcctcattgtccggcacttggtcctttgtcgcgtcaatgcccgccctccacaatgtccgccgatgcatttctgtgattcgactcgaaacggaaagcccaccaatttggccggcattcatttcaatctgaaaaataaaaataatttttatttatttttaaactaatttttagttagcccatcatttacctgttttagctcgtacttctgttcatttgtttctttgtctgttatcacatggcacatataatccttaagaaaaatataattcgatacccaaaaaaaaattaattaaataaaatatttttgccaaaactcccaccgatcgtgccaaaaccactgttttcgtttgtttgatgccttcgtcatggacctgtttcagaatgttaagcattcgtctcacattttcgtttgttttcgcgacaggttcgaatgtttccgacaaaaagtcaaaatcatttgaaatgcgaaagtaaagcaaattgaaagcctaaacaaataaggaaaacaattatttaaaataaagtaattagctaaataaaaaacaaataaataaatgattttgctttaatgaccttttgcactttttctgctaatcggaacaaatttcgcggaaatggagtcgggaagagtgaaaatggcgtaatttcggcaacatcactcctaaaatttcatttatttttttccgtaacaaatccaacaaaaagtgattttgttgattatgtaatattttattaataattaaagacccgatttaaaaatagacaaatggtaaaaaagcacaaaaattgaagaataatactgaggaatttttaaatagaacaaaataaaaaattagaaatagatttttggtgttttaggccataacggctagacaaataatcagcaaaatgctgcaaaacggtcccaattaaaatgaccttccgttgtgcacatttggcaaaacagtaagtgaaataatttgggcaaaatcttttgcgtcattagttattgcttggatgtcaagttcttcattgtcttaaaattaaatgatggtttttttatttagagctcgaccaggacttgagtccaggcctgggtttttctgcgcctgggttttcctggatttgctcagaaaatcaaggtcctgatcaaatatgaaacccagatccaggtctagagttggcataaaaatctatattttctggacaacatttagaatttataaaaacaccaatgatttagttcaaattataaaaatgaaatggattaaaatatattattatcgtaattagaaaaagggagatattccaacactattaacataatttaaatctttgattgacttttttattacaaatttcaaaaaagcaaagccaaagcctatgtttttcctagaccttggttaaaatccaggtacatgtctccaggccttgtcgagctctaattatatttgactaattaccctccttttggtcattgggtgccatcgcgacgacacaattcaaaaacaccacaccaaaaatgataagcgacttggtgtcaaacatttattatttatcgtgaaaataaatgtaaaggaaataattttagttaaaaatatattaaataataaaaaaaatgaatatttttccctatttattcgccaatgaggagaactgaaaacaaaattcacatgaaaattttaatttgattgacgaaaattctgtggaattggccaggtgacaggaaggaaatcgaaatcgatataccaaaatgagcaaaacaaaaagaggaaatgtaggaaataatgtctgattttaataataaatatttaatgaaaggttgtcgattagcactgattaaggcaaattacaataaatatttcatcatgatggtgcaacaatttttacaaaaataaacatggtataattttttgactatatgagcaaaggcaaaaatgaaaaactccgaaccccaactctgaccgatttggtccaccccgacccggacttcgactccggcctagctgagcccgaaaaactccgacttttctcacctcgaagggtcggtgccataccctagaaaaaagcaaggagaacgctaaagttgcagaagtgtcatggatgtaacgcagaaatagcgatcaaattttggagtggtggcaagaattatgccggatgcaattttcttaaaacttacaatttgtaggtttttttcgtcaaaggtcacagaaaaaaatgcagttgatgaacaaatcttttcccgagtaatgaatgaactcaaagcctaaattaaaatcaaaaaattcaatgaaaaaagttttcctttctgtccaaggtgatcaatgcctggaactcctacgaggacttcaacactttcgacaatttgccagtgattggcgagcatttgatggacgagtcgttcttccaattgtgcggcttcggcggctatgggccccaagtggcaatcgctgctggccgaatgttcatggaacgcatcttcgactttgcctattcgacggtcaatttgcggaagttttacatgcgtcggataatgcatggcgaacggttgcacgagcagttcagatgtgtatgaagcgaattgttgttggaacggaaatttaggggggaaattttggaattgtttgtcattcatttttttgttttatataaatgaattttttttgccgataatttgttttattttccttatttaattgactttgtgt

SEQ ID NO: 3007 - DNA, 1110 bp, Heterodera glycines
atacgaatattgaaaagaaggcgtaaatggctctgaagcgtccataggccgcagaccacaacgtaaaatgggacaacattcataaaaaaaggttggcctcaaaagggcccattcccaagctaatttcggaatttgctgataaaatcaaatagcctaaattatatacgcattataaaaaggaaatgacagaagactcgaatgttagttatattgcgtgtcacaaaatctcttccggaaaaaattttcaaaaaagtgttccgaaaaaaagagatagtcgtttttacatacgaatattgaaaagaaggcgtaaatggctctgaagcatccataggccgcagaccacaaagtaaaatgggacaacattcataaaaaaggttggcctcaaaagggcccattcccaagctaatttcggaatttgctgataaaatcaaatagcctaaattatatacgcattataaaaaggaaatgacagaagcctcgaatgttagttatattgcgtgtcacaaaatctcttccggaaaaaattttcaaaaaagtgttccgaaaaaaagagatagtcgtttttacatacgaatattgaaaagaaggcgtaaatggctctgaagcgtccataggccgcagaccacaaagtaaaatgggacaacattcataaaaaaggttggcctcaaaagggcccattcccaagctaatttcggaatttgctgataaaatcaaatagcctaaattatatacgcattataaaaaggaaatgacagaagcctcgaatgttagttatattgcgtgtcacaaaatctcttccggaaaaaattttcaaaaaagtgttccgaaaaaaagagatagtcgtttttacatacgaatattgaaaagaaggcgtaaatggctctgaagcgtccataggccgcagaccacaacgtaaaatgggacaacattcataaaaaaaggttggcctcaaaagggcccattcccaagctaatttcggaatttgctgataaaatcaaatagcctaaattatatacgcattataaaaaggaaatgacagaagcctcgaatgttagttatattgcgtgtcacaaaatctcttcctgaaaaaattttcaaaaaagtgttccg

SEQ ID NO: 3008 - DNA, 2051 bp, Heterodera glycines
  unsure (1)..(2051): unsure at all n locations
ctaatttcggaatttgctgataaaatcaaatagcntaaattatatacgcattataaaaaggaaatgacagaagcctcgaatgttagttatattgcgtgtcacaaaatctctttcggaaaaaattttcaaaaaagtgttccgaaaaaaagagatagtcgtttttacatacgattattgaaaagaaggcgtaaatggctctgaatcgtttttacatacgattattgaaaagaaggcgtaaatggctctgaagcgtccataggccgcagaccacaaagtaaaatgggacaacattcataaaaaaggttggcctcaaaagggcccattcccaagctaatttcggaatttgctgataaaatcaaatagcctaaattatatacgcattataaaaaggaaatgacagaagcctcgaatgttagttatattgcgtgtcacaaaatctctttcggaaaaaattttcaaaaaagggttccgaaaaaaagagatagtcgtttttacatacgattattgaaaagaaggcgtaaatggctctgaagcgtccataggccgcagaccacaaagtaaaatgggacaacattcataaaaaaaggttggcctcaaaagggcccattcccaagctaatttcggaatttgctgataaaatcaaatagcctaaattatatacgcattataaaaaggaaatgacagaagcctcgaatgttagttatattgcgtgtcacaaaatctctttcctaaaaaaattttcaaaaaagtgttccgaaaaaaagagatagtcgtttttacatacgattattgaaaagaaggcgtaaatggctctgaatcgtttttacatacgattattgaaaagaaggcgtaaatggctctgaagcgtccataggccggagaccacaacgtaaaatgggacaacattcataaaaaaaggttggcctcaaaagggccattcccaagctaatttcggaatttgctgataaaatcaaatagcctaaattatatacgcattataaaaaggaaatgacagaagcctcgaatgttagttatattgcgtgtcacaaaatctcttccggaaaaaattttcaaaaaagtgttccgaaaaaaagagatagtcgtttttacatacgattattgaaaagaaggcgtaaatggctctgaagcgtccataggccgcagaccacaaagtaaaatgggacaacattcataaaaaaggttggcctcaaaagggcccattcccaagctaatttcggaatttgctgataaaatcaaatagcctaaattatatacgcattataaaaaggaaatgacagaagcctcgaatgttagttatattgcgtgtcacaaaatctcttccggaaaaaattttcaaaaaagtgttccgaaaaaaagagatagtcgtttttacatacgattattgaaaagaaggcgtaaatggctctgaagcgtccataggccgcagaccacaaagtaaaatgggacaacattcataaaaaaaggttggcctcaaaagggcccattcccaagctaatttcggaatttgctgataaaatcaaatagcctaaattatatacgcattataaaaaggaaatgacagaagactcgaatgttagttatattgcgtgtcacaaaatctcttccggaaaaaattttcaaaaaagtgttccgaaaaaaagagatagtcgtttttacatacgaatattgaaaagaaggcgtaaatggctctgaagcatccataggccgcagaccacaacgtaaaatgggacaacattcataaaaaaaggttggcctcaaaagggcccattcccaagctaatttcggaatttgctgataaaatcaaatagcctaaattatatacgcattataaaaaggaaatgacagaagcctcgaatgttagttatattgcgtgtcacaaaatctcttccggaaaaaattttcaaaaaagtgttccgaaaaaagagatagtcgtttttacatacgattatgaaaagaaggcgtaaatggctctgaagcatccataggccgcagaccacaacgtaaaatgggacaacattcataaaaaaagg

SEQ ID NO: 3009 - DNA, 1760 bp, Heterodera glycines
aaaaattttcaaaaaagtgttccgaaaaaaagagatagtcgtttttacatacgattattgaaaagaaggcgtaaatggctctgaatcgtttttacatacgattattgaaaagaaggcgtaaatggctctgaagcgtccataggccggagaccacaacgtaaaatgggacaacattcataaaaaaaggttggcctcacaagggccattcccaagctaatttcggaatttgctgataaaatcaaatagcctaaattatatacgcattataaaaaggaaatgacagaagcctcgaatgttagttatattgcgtgtcacaaaatctcttccggaaaaaattttcaaaaaagtgttccgaaaaaaagagatagtcgtttttacatacgattattgaaaagaaggcgtaaatggctctgaagcgtccataggccggagaccacaacgtaaaatgggacaacattcataaaaaaaaggttggcctcaaaagggccattcccaagctaatttcggaatttgctgataaaatcaaatagcctaaattatatacgcattataaaaaggaaatgacagaagcctcgaatgttagttgtattgcgtgtcacaaaatctctttcggaaaaaattttcaaaaaagtgttccgaaaaaaagagatagtcgtttttacatacgattattgaaaagaaggcgtaaatggctctgaagcgtccataggccggagaccacaactatatacgcattataaaaaggaaatgacagaagcctcgaatgttagttatattgcgtgtcacaaaatctctttcggaaaaaattttcaaaaaagtgttccgaaaaaaagagatagtcgtttttacatacgattattgaaaagaaggcgtaaatggctctgaagcgtccataggccggagaccacaactatatacgcattataaaaaggaaatgacagaagcctcgaatgttagttatattgcgtgtcacaaaatctcttcctgaaaaaattttcaaaaaagtgttccgaaaaaaagagatagtcgtttttacatacgaatattgaaaagaaggcgtaaatggctctgaagcgtccataggccgcagaccacaaagtaaaatgggacaacattcataaaaaaaggttggcctcaaaagggcccattcccaagctaatttcggaatttgctgataaaatcaaatagcctaaattatatacgcattataaaaaggaaatgacagaagcctcgaatgttagttatattgcgtgtcacaaaatctctttcctaaaaaaattttcaaaaaagtgttccgaaaaaaagagatagtcgtttttacatacgattattgaaaagaaggcgtaaatggctctgaagcgtccataggccgcagaccacaacgtaaaatgggacaacattcataaaaaaaggttggcctcaaaagggccattcccaagctaatttcggaatttgctgataaaatcaaatagcctaaattatatacgcattataaaaaggaaatgacagaagcctcgaatgttagttatattgcgtgtcacaaaatctcttcctgaaaaaattttcaaaaaagtgttccgaaaaaaagagatagtcgtttttacatacgaatattgaaaagaaggcgtaaatggctctgaagcgttacataggccgcagaccacaaagtaaaatgggacaacattcataaaaaaaggttggcctcaaaagggcccattcccaagctaatttcggaatttgctgataaaatcaaatagcct

SEQ ID NO: 3010 - DNA, 2803 bp, Heterodera glycines
  unsure (1)..(2803): unsure at all n locations
taaaaattactttttttggtatttttaggcaacatcccctaacttatttntttctttataaattttcaaaatatgtaactaaatgaaaatatgtacaaaaatatttgccgaaattttggatttttttttgaggatttccaaaaatttccgtaaaaaatactcaaaatatgtaaaaaaaatgaaaatatatatgaaaaaaatcccgaaatatgtaaatatgtataaaaaccccgaaatatgtaaaaatatgtaaataaaagtcccggtttttgttcgcaaacacaaaaaagatgtatttttcttgctatttagagcatggaaaagccagggaaaaaatatgtatttacataaaattgacagccctagtaatgacaaaatttatccaaaaaagtaaaaaaataggccaaatcagtattgagctaaataatttttaaaatcacaaattcttgtcaaggaaaaaataaattttggggattgatttttgagaaaatttttcatttcttaggcgtgcattttacagaaatttttgggtcgattcttaggggtttattttttgaaaaaattttaggtcggattcctaggggataacaacaaatttttattcacaagcaaaaatgttgaaaatagttttttttttaattttatagttttttttgttgctaaaaataaaaaaacttttaggccacggagagctcaggaaaaaaatagtgaaaaaacgttaattattagcactagtaattattagtaactatttgctaatataatggttagcatttgcaaatttcgtattttttaatatgttagagacatgaaattattgtgccgtcatttctcaacaattgcccatctctttgctttgtctttttcaattttggcgatctcttcattgaatttccggccgatgacaatgccacggcatcggatggacaagcggtggccaaatggctgttcactccacacccaaacaatgtgccaaaggtgctggttgcagatgcatgacgtgaatttggcgtcgaagttggacgccttcaaagcggtgcttactaatttatttatttggcgtttttacggtctttggagtcgctgaaaaaaacccttattttttcactattttggtgttttgtcactttttcccactatttcgacattgtttggaaaattctcaacacctctaagaatcgacaaaaaattcacccctaagaatcaacctaaaattaaaaaagacacccttaagaattggaaaattttcaaaatgtaatttttgactgcgtggcgcaagtgtccggttttgctaggcggcccaatgccgcggcgcaaaagtcacaccacatctctcatcaaagtagccatcattatgggttctcgtatcgccccaacccaaaaagtggcattaatttattatttaataagtttttccacattttaggcattttccaatgcttcttctcccgtcaattttatcgctgtcatttggtttccgtcgtcttttgctgcttctgttgtgccctttgatctgatcaacgaattgactcgggaacaattggcattgaaaggaactgagtttagcagatgttttctgctggtccgttgtccaattgcgcgagacgcgagcaaatggtcaaaatgggaaaaggaagcgattaattggcgaattggtgatcagtggaacagaattgacattcaaattaatgatcaggatggaatcgaagatggatcagcgaatgctttttcaaaaatccaaaataaatttgaaaaaagaatgcttttattccaaataatgttttaattttgaattactcaatctcaagttgattgaagcgtattttgctgggcagcgattggtcgggcaatggaaatcccacaaaattggcaccaataaacacaaacaattttgccaccgctgcgtcactgtccttggaaactatgactgaaccccaaattgtcaattcgcgtttgccatcgaaatgcttgtccaccagagaattgaaacgtggcgaaatcagtgccaatttgagtccaagttgagcgtggtcaaaaagggggaaaatatccatccaaacgtcaaagcagacccagctgaaactgtgaaaatggtttagctaaataaatgaagaatttgtgacttttaaaattgtttaccgtcggttcattttcaggcaattagcacaatttgccttatttcaaatgtggtcacacaaagggcagaataattatgttggaaatatttttgcacaatgagagaccaatcgaaaaacaaacatttttatagccatgaaattgaatttttttaaaataaagataacgctggtcaagaataagatttcggggttaaaaatcagaaattgcaaaaaattatgccattttgaattgatgaacgaacgtactcaagaaaaactgacagtggaggaaggtttaggcttttcgaagttggtttgcacattttttactgcaaaaaaaaatccaaattgatcgtaccaacaaaaaagtatatttaatgatcacgtcaatttcaaattccataattgaaataaatcaatcacttttcagcaattcaatcacttctgctgctgatcactttagccaaaagttgcgtcgagaagcctaaaaacagaaagcaatttattttggatttttgaaaaagcattcgctgatccatcttcgattccatcctgatcattaatttgaatgtcaattctgttccactgatcaccaattcgcaattaatcgcttcttttcccatttgaccatttgctcgcgtctcgcgcaattggacaacggaccagcagaaacatctgctaaactc

SEQ ID NO: 3011 - DNA, 5391 bp, Heterodera glycines
accaaatgacagcgataaaattgacgggagaagaagcatgggaaaatgccctaaaatctgggaaaacttattaaataataaattaatgccacttttggggttggggcgatacgagaacccctaatgatggctactttgatgagagatgtggtgtgacttttgcgccgcggcattgggccgcctagcaaaacccgacacttgcgccacgcagttcgaaaaatttaaacgtagaaatgcgtttttgagctcctttcttcaaatcaattgagcaaaaaaaatagttaaaacctaaaattcccagccctactaatacaataattaacgtttttttcactatttttttcctgagctctccgtggcctaaaacgtacgaaaacctatttttattttaagcttaaaagatttttcaagttttttcggttgttggtaagctatatttcgaattattgatactattttctagtttttttatttttagcatcaaaaaaactataaaatttttgcttgtgaataaaaatttgttgttatcccctaggaatccgacctaaaattttttcaaaaagtaaacccctaagaatcgacccaaaaatttctgtaaaatgcacgcctaagaaatgaaaaattttctcaaaaatcaatccccaaaatttattttttccttgacaagaatttgtgatttaaaaattatttagctcaatactgatttggcctattttttttacttttttgaataaattttgtcattactagggctgtcaattttatgtaaatacatatttttttcctggcttttccatgctctaaatagcaagaaaaatacatcttttttgtgtttgcgaacaaaaaccgggacttttatttacatatttttacatatttcggggtttttatacatatttacatatttcgggatttttttcatatatattttcattttttttacatattttgagtattttttacggaaatttttggaaatcctcaaaaaaaaaatccaaaatttcggcaaatatttgtacatattttcatttttttacatattttgaaaatttataaagaaaaaataagtttgaaaatgttgcctaaaaataccaaaaaaagtaatttttatgtcattttgtggccatttcatattttacggggattttctttcccaaaaaataccattaaaaaaattttatttacatatttggagttttttgtacatattttgggatttttcttacatatttatgtacatatttggaccactttttgtacatatttttggcagccctagccattacacccctaaatatgaaagtttttagcaactatttacccatttttagcaactattttatggggtttttagaaactaaaaactaattattttggcagtttttatcaactataaatataagccctaataaagacactttgttttctttttaaatctttggcattttgttttttacgccaacaattttctccgtttttttaccatccatgacttaacttcaaaaaattatccttaaacaattttaatggtttttttcatgttctaaaacagggattgcacagaattccgacttacagacattttggggtcggaattccgatttccaaaatttgaaaaatgtcggaattttttaactttttttttggattttgccttcaaaaggattattgtaaaattataaatttattaatttagtataggtatactttttactttattcacagctattgtatttcaatttcaattctttttattccaattttccgcactttcgcaaatgccaaaatcgaagcgcgacagagttggtcagcaatttattattcttcagccaaatttgtccataattttcttcaatttgttttttccttcagtttctctcacaaaagtgaagaagaagagccgcgagggcaaagaaaacattttgaaagaggcgggaaaaaaatttgtttttttttgaaaattccaacaaaaatttaggtcagagaatgcgtggagcagtacaaacatttgtttgtcttctcgacggagaatttgcgctctgcaaggctggcggaggtaaaaattaaaaaaaaaagcattttttccataaatttttgggacggacggtcataaataccacgtttcgttgagtttaaaaaaagttatggccaaaaatttcggaaaatcagtttttttaaatgttttttgtcataacttttaaaattttgctgacagatagagaacactagagctatcgaatggtagataatacattggttcaatttggactaaggaaagtgggtacttgtgggttttcggcctacaccacaaaatcgctgcgaaccctccccccctcttttacaccggccctccccttcgctgcgaaccctcccctcccccctcttttacaccggccccccttcgctgcgaaccctccccccccccaaaaaaatgtatgttggtaatactgacttttactggtcccataaaaaaggaataaaaaggggttttttttttacaatttttcgttctactcgagggttatcggagctcacgcatatgacatcagagttatcatatgacataatctaatctgtgattttttgtcaagtctttgatttacctttttaaaattttgtggtgtaggcccaaacccacaaataccggaaagtgttatattaaaaaaaccccggactgtcgtccaattgtcccccttttcataaatgccacagtttttgaaaatcagtaaagtttcgaatgccgttttttgcggtggaattcgttggttttatgctaccccatgaaaaacagcttacaattagtaatttcataagggaatataaaatgataatccacgaatttttcgcattcattaaagcccttgaaattttcattttctttggaaaatccgaaataaaaaaaacatttttttaaattttttttttcacaaaggtccgccaacatttcaagcagaattcgcggattttcttcgccaaaaacaatttgatggccgtggcgttgggcaaatcggcacaggacgaacaggttggagagggaaaccaacctaaaaactgtgacttttacaagccatggcaaaacgctcaatttcaacccaaccccgacacactgacaaaaaaaaaattcctaaattttttggtttgaacaactcataatttgggagtcaattttatgcagccataaaaggcttttattggcagattttttttttttttggtttatctgacgctgacccacaaaatgtccagcccacgaaatgtccaagtctcgaatttgagttttttattattcagatgggcctaaggttaggcaaggggtaatataaagggtatattcgtattcagcgaccccgaaaaccctaaaaatcctaaattagactcattttgtttttataaattttgaaaaattttgacacatgccagaaaaaattaattagcattttgtttaaaattcgtgcctctcccgccctccctctaaactaatggtcgtgcatctgtttaatgccaaaatttttcaaaataaattacgcaaaaaattcccactttctcttaaggacattttcatattgggcaataaattgaaagttttaacaaaaagagtgatttttgaatgataaaaaaaataatagcaattttcagaaatttcctccccccccccttcggaagtaaatttaaatttaaaaaaaaataacgcactccccaatttaggcaaaggaattgcacaaagtgagcgcacttttgcggggccaaagtggactgatgttcaccaatgcgaaggcaaacgaagtgcaaaggtcggcgggggataattccaattttttcgtaaatttatttctttccttttttggcgggtgctcatttggtggaaaatttttttaaaggttctacgaattcgaagcacctcccttttttccattttgtttgcatttgccgtcccaatttttaaaacagaaaattttttcacttttttttttactttgcgacgctttttttaattcattttttttaatttcaaaggcacttacacagaagagacagtaaatttatagtcagtcgtatgtcctcataattctatgattattcatcttgtagcaaaatttaaaaaatttctgagtaaaaaattttcaaattttttagttttccaatttcgttccggcgaatggaatgcttttgggcccaaaaagcggcaaaaattaaaaaaatcaaaaaaattaaattttctaaggtttttcgcagagcacaccgaggctgagtttgcccaggcgggtgccatctccccaacggacatttcgctgccggccgggccaatgccggcggaatttcacttgcacggcgccatggaatcgcagctgcgcaagttgggcatgcccacacggctggaaaatggtgggcattttgggagaaacgaaaaatggaggcgaaatttaattgcaatggcccaaggttttgaaggtgttcaattgcaatttttactctattgagctttaagcacctaaaaaaagcagccagggagaagggatggagatccccccccccccgaaatttaaaaattttctaggagtaatagcatttttttttaaattaatcaattttttcttaacaaaatcattaaaaattcagaaatttttcttccgtttatttttcgaatttttcagcaagggcaaaaaaaataggaattttgtagcggttttgcgccaaaaaaatgacagatttttgacactttagagtcaaattttcaaaaaaacttgataaattggggtcaggcggtgccgatgaaaatttttggaatttttaatcgagaaacgggcctgatgtgggacttgatcttatttaataaaattagcagtttttccatcccctctctcggagcaattttttggaaaatattgaaaaaaaaattagtgattagttatagattttttcaaaaatagttgaaaacttaaaaactttcttgagatttacttataagaaattttttttaaaattattattgggggtggagagaaacgtagtgcatccgagtctaattgagtcagccccaatcgtaaaagggcatttcaaacgacaaaaaaagggtccggaaaatgccacctaattcggcaaaaggggcgggccgtaaagcctcgtaaaatcctgaaaattaatttaatcaagtaggcaaatttaatagtcgtagaattggcagaaataaaaaatgaattagcatttaacaccttttttcaaaatttggggatggggacgccgataaaccaacggaaaaatggcgaagatttggaggccgcggcaacggattttcaatggaattggcgacgaaagatgaacatgatcaatcagaaaaaccttctcaaaacattttttgtaatttatacaccgctggacacattacaaatcgta

SEQ ID NO: 3012 - DNA, 4866 bp, Heterodera glycines
ttgaacagccaaaatttcagcttggaaccaaaaagaatgtcacaataattgacgtgttggacagtctttgcccaatttgggcattcttttttgattatgattacggcaaaaaatatggaaacaacttggaagctttattcaaagtttcagtgaagccaatgtttatagacaacgaaccgatttggcacaaaattatgaatgtttttcaaaaaattaaaaaatacaacatgaaaaagtcgtccgacgattcagaagtggcggagtcgtcgagcaacgaagcgatttggaaacaacaaattgcgcaatatgttaaaattgctgacagcgatgaaaattatgaatataaagaactacttaatgaagccttaattgaaaaaggtaaagaacgcgaaggaaacagagccaaaattgagttggcccgaaaagcatttgacaatttgctgaaatcgatgacggaaacggcgaaaatgcaatcgggtgaaggatttggcaaaaacaaaccagttttgcgttggctattcctttgaaaactgagttattctctagcgtttgaagcagaattcaccattgacgaaatccagaaaataattagtataatataaaactttttttcataatttatttttcccttttccttggtgtaagcccgggtcccggccatgggtctgaaaatcaggtcgggcccgggtcagcaattaaaatataaaactatacctgtatcttctctgttttgcttttcattggatatccttttgtttttgttgctgtagttcatcctttctttctcttttttggtataaatttttaattatgaatttacaaaaagttcgctgaaatttagtgatattactaggtcgttgcataaaaaagggcgcttttttagaaaaaaaattttataaataaaatatcaaaaataacaatcataacaactgtaaatacaatatcactcaacaaaatagtttccctggaccctaacaacctttctccaacgagaaggaagtttcctaatgccgcgacggaaaaaatctgtgccgatctttgaggtcaggtactgccccaccgcctcctcgacctcggcgtcttcagtgaagcgcctaccccgtaaaaagtttttgagagaaagaaaaaggtggtaatccgagggggctaggtcagggctataaggcgggtggggcaacacattccaattcaatgtctgggaaatgtactgggttgtcaaatgagaacggtgtggcggagcattgtcatggtgaaagagtaggggaccgtcaaattggccctgctggcgccggatgcggtaagcgatatccaccgcccgcagttggtttatgtatctattactgtccaaaatagtgccaggtgccagcagttcccagtacagtgggccatgtactgaccaaaagatacacaacatgcgctttttttggtgcaggttgggtcgggggaccaaaattgggtcttcctccttctttctccaaacaattttctgtgctgtgccatcgtaacagatgtagctttcgtcgcatgtcaccagccggttcagcacataacctctccggtgtcttgcgatgttcgaaagacacaggtttagccgccgctgtttctgctgatcagtcagacggtgtgccacccatttgctcctcatcggccgacgaccagatttccgaagccagcgccatgttgttgttttatggcaatgtcccaccgacaattctgcgcaggaactttccgggtgtcgtcgcaaccgttgtgccaaaacgtttttgtccactgtcgacggccttccagacccaagtttgcgtttggtgctgtttctccccgcccggaattgttggaaccatttttgcgcttgacgaggagagatcacatccgcgccgagaaattcattcacttttcgcgccgcaggcgccgctttttcgccttttttaaattgctggtgtaatagcttatgtgcgtgctccttattagcgttcatttttttagctataaaaaatttgcaaattgagatatgaacaaaatcaatatactattttgtagacaacaattagcttaacaaaacggtatataaaacattttattatgttaacaacaaaattttttataagccattataaaaaagcgcccttttttatgcaacgacctagtatttgttttggtccgcaccatttgcgccatctaattcaagaaattttttaagggcaaaataaaaaattggcgttgtgttacagtcccagtgatttaaaacatcagtcaaaggccattgttatattacaatacagtaacaaaaaggaaggggaagagcatgtgatatgcatactctcctcctcctccccccatcccccggcggtttttaacccatccctcggatttttcttccttcgttcgctttcttttcccttcttttgatttggcctcattttctccttttgttatttgaggaaaatcaatggcaacggacgaattgtcacgctttttcgcttctctcttacgcactcagaatgtcggtttgccattctgattttgtcagaaatgttaatcgggcgtgttaacccaaaacatgcgggttttttggaattatatttttctatttttacgggcattcccttactatgttttttgactatcaccaggaaggccattttttacaaattcgttcaaaatttttgctcaacagctgatcgatgatcactgtctgtatgcgttcctcaacagacagtccccccacagaattgtctcccccttctgatgctgtccccggttttggttgttatcatttatcaatcactcattcattcattcgactcgcacccattggaacaattcactcaaaaaaattaaaggaagaaattattcaaaatgatatgaatggtttaacattcgtaggattttttatcagtgtataattgcacttgttaaattcgtttgatttccttatatttaatcgccattgattatttatgattttagctttttttcttcatgttttcggatgtttccgttcaaaaggttaaattattgtcccattgaagaggaggaaggagagaattcgcagtcaattcatggccggattgatggcacatgccaagttgggacggactgttgcgacacgcgagagtgtgcaggagttcatgcaacccaaagcggactcggcgtgtctttcaaatgcgagaaggacccggaaatgtcgtcgatgagagaggaccgggcccggtgggaccacgtgggggacgtggaccaggcaagcagccaatgctaattgattattggctcattatcgtcgttttgttgtccagttcttctcctacatttacgagtattaccaacaaaagggcctccggtgcatcgcccttcgttactttttctctcttttccgtttcgctttcgtcgtctttttctccacctttttgttacaatgtgtcgattacggggtcattttcaacacgagaaatgccacttttgatggcattccgttgccggagaagaaacaaattcaggttttgcggtccatcatcggctcttttcggcttacgcttctttcttaggatgtgttcatttctcagtgccaccgtcacttcaatccgctagtcaaaattgcgcttttgctggcccttctcttttgggtcggtcaattcgctcgcatttgctgtcgtctcgtccacctttgtgagaccaggaatttcttcgccactcaacttcaaatcaatgacagcgacttgcaaaacctttcttggaacgacgtcgtgcataatttgtgtcgagctcaggaacgaattcatttaatgcaagtgattttgagacattttgagtaataagcgacagagaaatacgaacagaaaaaaaggttttgtttaagaaaaataacatttaataatatcacttcgagtggtctcattatcgcaaatatcccatttatccgcacattcgatcatttttaccaattttatgtgttcagtgttaatcgcgactccatctcttcgctcgacatttaccagcgcattctccgccatcgcaattatttcgttgccttagtgcacaaagtgagtcgccctttttcactgtccaattgtccgccactttttccttaccctttccccccccccttttcagtcgcttttaccgcctcaaattcggctgcccttcgttggctctgtgcattacctttcgtccggccttcgctttaacatcgaatggcttctcttctggggtccgtggtccccgtggaagtcgtcgtacgcattaaaagacgaatttaaggaaagggacaatttggaaaggattggtaggggaaaggcggcgacgaaattgcaattgctcacccgccaaattcagctcgaaatatgcaaatgaatctgctggtgatgagtgtcgtcaacttggtctttcttccgtttgtcgtcgtttaccaagtgttgttcagctttttctcttactccgaacattttcaacgggatcgccacattttgggcatgcgcaaatactccaattacggacggtataatttacttttcccaggggcgtatctagaaagatttttcgggggggggggacccgacctgaagacttttttttttttgctattaaccaataactttttttccactgctgggtaacaactgcactttttcactaaaaatgaccaaattttggccgttttaaggcaaaaaacttgtaaaaatagtggaaaatgtaggtccggcggtgccgataggcgccgccgggaaaaatttttggaaatttgagtgctacttgttacgaaatttgcctattaaactttttaattttcgtttgggggggaattcgaaaaaaatttccattatttgctggaaaatttttaaaaattttcattttcggggggggggggggggg

SEQ ID NO: 3013 - DNA, 3705 bp, Heterodera glycines
ttcccccccccccccccctagatacgcccttgacttttccatatttaactgattgcattcgagtttttagcgagaaattgcgccatttcaatgaaatggacagcgaattggacgcccgcctaaatcgcagttacgaattcgccgttcgttacaccgaccaattcgtttcgacacagtccaaaatcattgccaaaaacattgcttttgttgccgctgccgttttcgtcgtcctttgctctctcacggcttacgacgaagacactttgaaggtgtaaatgggttgtaattatgatttctcatttgttactcatcccatctcattcagattgagcatgtcaccactctgatcaccatctccggcgccatcgttttggcctgtcgcgtgttcattcccaacgaacatttggttttttgccagcaccaactgatgcgccaaattgtggccaacattcattacgcgccgaagtcgtggctccaaaaggcccattccatggaaatttacacggaattcacgcaaatattccgactaaaggccgaacttctggtggaggaattgctcagtccgctgtttactcctttcattctctatttttagtgagtttttcgcctcacttatcacaatttactcctcttctttaaagcattcgtcctcggatgatggaaatcgtcgaattcttccacaaatgtacagtccgagtcgatggtatttaattctttacttaaaacccaccaaatttttatttctttttgagggctcggcgacgtttgttcattcgctcaaatggacatttgccgcgatggcgaaattcggctgatgtcacttaacaatgagtcggtggttgtccacgacagttcaaataacggtaagacaaaaacaaaatcatagacaaaatgtatacacttttccgtgacatgaaaagttccaataaaagtacacacaatttaccattcgcagcagcaaagcaaaagcgaagcggcaattcgtacggcaaagtggagctgtcgctgctgaacttcgccgttcaacaccccgactggacaccgcccaaagaatgtgccgaattcattgacaatgtgaaggcattggtcagtcctttctttcatttggcttttctccccattggtaatgccattgttttgtttgaaggtttcgcatgagatttacatcgccagtcggtcgtacgaaaatggcggcgacggtgccaatgccaacacttcgtccgttttggacgcgcaaaccctcgcgttgctccaggcgtcgacccacgcgtccctccaccaaatggaacagtctctgcagcaatgcgctgtcccgtcctccgccattttgtcttccgattgcctccgtccttctccctctcagaacatggcgatgtccacggcccaaggcgaccatgacgaggtggatgagctttatcaaaacggtcaattgttattgtcgctcctcttaagagaagggacgcgtcgtcgcctccccctccgccgctcgcggcttcgatccgtccaaatgcgatggcggcgtcgtcctcgcgcattggccattctctgctgggcgagggcgcgctccgtccgtcgcccttctcccaattggccacttcctccttcattcagccgtcccctttggcggccattgttcagccgcgcaccatccaaggtgatcaacacattcattcactcttcgttttatgtgttggccatttcagagagtaatttccgtgccttggaaatgtcaatgcatgcccttctcatcaaccaaatgctcttcgccaattcgttcgcttctccggcccttcgttcctcccggcatcacccctttggctacggttccatcccttttggcagtgtttcccgtcgcggacccgtggacagtatcgtggacagcaacatttttggagtgcccgccggggccagtcaaatccaactgatggacgaattggaaaatgaatttgacccattgtcaaataatcgtagggtgtgaaatgtaataaattgggtttctccaatcaaccgtcagaccattttttcattcttctcctcttgcgttgaatgaatttcacatactcaaaaacagctttatttgcattactatacttgttttttggactatgattttcaaatttaaaagcctcaaatcccttccgcaaggttttgaattgtattgtttatattaaaaataaaaatactcatttgacgggaacggcctcatttctgatatttcttgtagattcaaaccaactcatcattcgttttcattcagttatctatcaaatgttgaagctcatgtacaaataaatcattcattttgtttgacagcttaaagaaattcgaataaattttgtcaaaaaataatataacagatttaatcaaaagaaacaattgaaattgccgaagtgttatgagatctttgaaattgtctctcgcaagtcatttaacaattcagcattgtccccgttcttaatttttaaaattattttgtttgctgagtcccaactttttaccgcttcgttccgtccaatgaattctttgatttccgcaattgcaattgcccgggttgcctcgttcctttctttgaccaccgctccctcttttaatgcgcgggcgtaattcgccatcagtttgacaatttcctcatttataagcgtcttttgccgggtgtcgtcgccattcccttgcgactcaaccgaaaaagcattggcaaagccaaaaggaagaaatgggccctgaattgaaaataggcgtaatgattaacattgaaagtgtgcaaacaaaagcaccgctttctcctccgaaagaatcatttgtcggacgacgtcccttttgggggaccaaagcgtttgggccatcaaaagtccgtcgagtcgggaggagttcaaataagtgccgatcagaagcaaaagggcgaaattgtcgtcaccggcggagaaattttcatagcgttggagaaggtcctcaaagcttaaaatggtaattggcaaaatgacaaaataaaaactgaaacaaaaataatacaatggcataaattggtcaaggaaggcaattggctgacggagacggagggccaatggccccctttttcgggcatcgataagaaaatcattgaccaaaatggaaacgcaattgcgaatttgatcatcgtagagaaaaacttcggggcctgagaaaaaataaataaattgagaaaggaaaaaattgaggaaaagaaaccaatcaaataaatctcggctaaacgacagaaaaattcgttgacgcaaacggaagaacggaaaaaggcgggacggagaagaaaaagagaaacagtccaaagcaaagcgagacgaacaatctccacgtcatcggatgttgcaatggcacaactaaaagcgaatgggagtgaaaagggggggggggagggccaattcttaaaaattggcttattgttaacatttcattaataaattgctatgagttcagaggaggcacccatcggcaccaattttgaaagaaagagggcaagaaaaacacccattggcaaaagccaaaaatagattaaattcaaacaaaagttcactcactttcgctgctgaacgacgtccaaaacccttctgatcgggctcaaagtccacgcgccgtccgaaaaagggtcgacgaaacgccgcgcgaattgccaaccgacgcgccgactctcaacactttgactgaaacaaagagacgcaaaatgaaaggaaa

SEQ ID NO: 3014 - DNA, 685 bp, Heterodera glycines
ttctcctctctctgtgccatttgatcaatatgccgtgcaaaaagacttttgcccttctgtttttgttcagtcgtttttggttctaaaaaagaaaatagaaatgacaaaccaattacttaattacttaaccatcgtttgggtcggaaggtgcggccaatttcgcatgttctgtcaagtcaatcaccgccgggaaacctttctccgaattttcctcgtcaaaagaggtcgactcaaacggaacacatctctcggggagttcaaaaaagcccatgaaacgttcctgaacaaagcgaattcgttaaaacgtgcccaccccatgccgataattacggaacggcacaaacattcccttcccatggagtacagtcaatcataagtattcatcctacctgaacagcacccaaacgcatcggttggtccgaatcctcctccgtcttttgctcgtcctctcccctcccgacaacgtccaattcaaagcgcactttttccttcgtttggtgttcattttttggttttccgattctaaacaattgtgttgccatagcaaagtgaatgagtttaaccttaaaaagggtaaatgttacggtcacaaaatcaaattattaattatatcatagatatttgaaaagtaaatatttaacaggtagcaaaaaagacaacatcaaatgggaagaatttattttta

SEQ ID NO: 3015 - DNA, 4062 bp, Heterodera glycines
  unsure (1)..(4062): unsure at all n locations
gaattccgagagaattgatggccattcatttagcagngatattgaaggcggaggcaaaatgtggcgcctattggccgtgccgatgccattggcgaattaaggcaataaataacatttttaaatttattttgagtgttattaatgcaaattttaatttttttttagcctgaagcggggaaaaaggtgcgaattcaattcaaaagtttgagcaatttgtttgaatgcacatacaactgctcatcggcgtatgtcgaggtcaaataccgagacgacaaaagggcccaaggcaaaaagacaaataattaattactgattaattgcaaaaggatcgtttataaggtgccaaactttgctgtccccgtgcactcactgatctgaacggaaatcaatacaaaaattggattgcggcggaaaagccggacacggacatagtcatttccgcgcacctttcaccaaattggaccgtaccgtctaccgtattcgagctgacgtatgaatcaggcaaggaaattgtaaaatatattttatttgttttttaattcttttttaaatatttattattttaatttgactttattttaaaatgctttgcatatctaatggataattgttcaaaaaatattaaggcaacgtcagaatctttttttcgagcaaatgcgtaaaaatcgaaaatttgtttgccgagaaaaggaaccccggcaccggcactttgtattgttatgacgggatcaataagaaacgttatgcctgctcctgtaacggtgataagaaatgcctcactgaagaaaaatatgaacacgacagctttatttgcccaataataaaggtgatgaggtaataataattaaataaaaactcaatattaaaggtatttaattaattaatcagacaccggcatagaaaaattttaactatttcattaacaaattattatccattcaacattcgcaagtttatgaagttttaggctaaaatataattaaaaatataaacgaacgatgtactgaaataaggacaagagagaagataattgataaaaagcccatctattctatataagttcaaggtcaatggaattcaaatcaaaggaagccgacaaacaatgtacactgacccaaaacattatcattacaattcgactcaaattcatgttaattgctttgtgagttgggtcttaattaatacatcatttctaaaaccctgtctaataattgactaattttacagaaggcccaaggaggtaccgtaagcttttggggctacagtaacccggagaccagagaaatcattcgggtggacgaagtccactgtttgactgataaagctgctggagtgccaaaacagttcaaaagtttgcaagccgaagaacagccgccgatgaaattgagtccaacgcgtccatttttggccaataatgcttcatcacttatgcatgtgttcgtgccatttggtgaccatccatgagagaaaaggggagatcagtgatcagtgggcgatctttattctgcacctgatcagttggccaattccaatcagcaaatttttattttatttttatttttttgaatttttaggggtgtcattcttttgaatccatttctattcagtactatatgcattttgagatttgaattgcgaggatttgtgtgaaattccgagagaattgatggccaattattcagcagtgttattgaaggcggaggcaaaatgtggcgggaattggccgtgccgatgccattggcgaattaaggcaataaaaaacatttttgatattttaaaattattttgagtgttattaatgcaaattttaattgctttcagcctgaagcgggaaaaaaggcgcgattcaaaagtttgagcaatttgttttaatgcacacacaactgttcatcggcgtatgtcgaggtcaaataccgagccgacaaaagagcccaaggcaaacagacaaataattaactaattaattttgagtaattagcgaaatgatggctcattagggtgccaaactagcccccgttttggcacttgtcctcatggcctttgcatgagtctgaacaaatggaaagtcacttaattatatttaattgatttgcctttgcaataaattcggttaattatggccgcacctttgaaagagattcgttcgcgttggccaatcgtttgttggtaaaagcgaggcaaagtgatcagctttttcaaaaatatttcaaatatttggtttaaatcgacaaaaactggactgaccaggattttgattgtcttaaaaagtgatcaatcactattcatctgatcacttgtggtgggtcgttcatgtagacttcttttgctcaacaatttgcacacgtggctcttcttcatcttcttcttcatcccgctcctcctctcctcctcctccacctcctcttcttcccgctcctcctcatccgttgcgctaatgtgtgtgccgtaattagccgtgccattgttgtcttcgtccaccaacgccatgttacgctgggacggcatttccccagcaaaatgttttggatggagaattggacacgcttttttggtcggcacgggatggagccgcttattgcaaattattactagtaaattcgaaaaaattttgactcactaaatttgtccaaaacttatttcaaactccataaattctgaattttcacagaataatagaaaaatgtttgagctatcttttcgtaaatcctccaaaaaaaaggtcaaatgtctcacatgttttaagacaatgatgatatcggtattcggcttggtcgtcttgaaaatttctcaacccatcgatcaacgccacaattgtcgagcggctgggtcgccttgagcagcttatacagaaacggtcaatgacaacacaaaaaataatcgatccggggactcaatgtccttctccacctcctcacccagtgttctctgtggtcaaccgccgcctcacatcggaatggtcaaccaactggtcaacaatgccgtgttggactcggaggagattatcgcaaaatcgaagagagcagtgttggagaaagttccagaacaaatcggttccgttgaacttgtgcgaaaggtcgctaccgaatatggaatgatggacgaggtgatttttgaagagatccatcgacatccaaaattacaattgccttcgggcgaaaaccgaattgtcaaggttccatttgtagacaaaaaaaccgaaagattttccttaaaaactttcggaaaaccctcacaaaattcaatcaattcccaaaaaatgtctcgttcaggcgggatatcacccggcctgaactcaatttgctttatgagcttcgccgtaaggcctatgccatgaaccaaagtgaaaatatgtttaaatatgtcgtcgttgacctctccattattactttgaaaactccgcaccctcttcgcccaaaagaactcaataatgttacccgagcaaaccaaactataaaaatggaaaatccttagacaaaaatccatgggtttcctgcctattaataaatagggatgggattcttagttttttaactatttttttctgcggctttaactcggcgagaaatgcacgaaaacacattatttttcgaaaatttttcatttttagtgccactattcatcactatgaatcagagatgggccaaattgaaaaataaaaagcgaaatttgcgaaactgaaaaatgcgaaatgaaaaaaaagcgaaatgcgaaaagccaaaatatgtgaaaatgcgaaaagcgaaattttttctacaactttttaatagttaaaatcataaaacaaaaatcattttttaaaattttattccaaatttaaaaattgtaaggaagaagctggctgggcggttaaaacgcggaaagcgggggttgataagatccataaaagaaagggcggatgtgcctcggtagcttaatggtagagctgcccacggaaagggtgcatgagtgggttcgattcccacccgaggtttaacattttgcccatttacttattgggaacaccggatgggtgccccaccgcgccagcagcaattaactaattggaccgatggaccggtcccg

SEQ ID NO: 3016 - DNA, 1720 bp, Heterodera glycines
ttcatcttcttcttcatcccgctcctcctctcctcctcctctacctcctcttcttcccgctcctcctcatccgttgcgctaatgtgtgtgccgtaattagccgtgccattgttgtcttcgtccaccaacgccatgttacgctgggacggcatttccccagcaaaatgttttggatggagaattggacacgcttttttggtcggcacgggatggagccgcttattgcaaattattactagtaaattcaaaaaaaattttgactcactaaatttgtccaaaacttatttcaaactccataaaattttctgaattttcacagaataatagaaaaatgtttgagctatcttttcgtaaatcctccaaaaaaaaaggtcaaatgtctcacatgttttaagacaatgatgatatcggtattcggcttggtcgtcttgaaaatttctcaacccatcgatcaacgccacaattgtcgagcggctgggtcgccttgagcagcttatacagaaacggtcaatgacaacacaaaaaataatcgatccggggactcaatgtccttctccacctcctcacccagtgttctctgtggtcaaccgccgcctcacatcggaatggtcaaccaactggtcaacaatgccgtgttggactcggaggagattatcgcaaaatcgaagagagcagtgttggagaaagttccagaacaaatcggttccgttgaacttgtgcgaaaggtcgctaccgaatatggaatgatggacgaggtgatttttgaagagatccatcgacatccaaaattacaattgccttcgggcaaaaaccgaattgtcaaggttccatttgtagacaaaaaaaccgaaagattttccttaaaaactttcggaaaaccctcacaaaattcaatcaattcccaaaaaatgtctcgttcaggcgggatatcacccggcctgaactcaatttgctttatgagcttcgccgtaaggcctatgccatgaaccaaagtgaaaatatgtttaaatatgtcgtcgttgacctctccattattactttgaaaactccgcaccctcttcgcccaaaagaactcaataatgttacccgagcaaaccaaactataaaaatggaaaatccttagacaaaaatccatgggtttcctgcctattaataaatagggatgggattcttagtccataaaagaaagggcggatgtgcctcggtagcttaatggtagagctgcccacggaaagggtgcatgagtgggttcgattcccacccgaggtttaacattttgcccatttcttattaaatcaataaaacgcttttttgaggcgctcttttccaaaaaaactttttggtaagagggggcatgcggctccggcaggcgctgccgggaaaatttttgaaaatttgattaaaatttgttgacagattttcaccaaaaaatcatcaaattttgtgatttttgtatcatttttctaatttttgccactattttggtatttttgaaaaacttcccaaaattgcaataaaaacgaaaaatacaccccctaagaatcaacctaaaaaattttcaaaaatacacccctaagaatcgacctaaaaattttcaaaaatacatcccaaagaattggataattttcagccaaaaattgagcaaaaaaatctttattcactgattgcagttacaaatgagatacattcctttttttgggcccattcttaggggggtatt

SEQ ID NO: 3017 - DNA, 1468 bp, Heterodera glycines
attaatacagggtttctttatgttcttgtttctaagaaatgttctgatttgggggtaatgccttattttcatctaaaagaagaaaatttctgaaaaatttggctaagttctaacaaaattcatataaatttttaaaattttccccggtggcgcctatcggcaccgccggcccccaaaattcctatattttttcttaaaaattatcccaagctcgcgaattttgctcattttttgtacaaaatttgttaaaattgcattcaaattttcaaaaaattttgaactctctcctcgcacattcatcaagttttttttttgaaaaatgtgccgcaagaaaaaaaatttaaaaaatctgagttccaattttgagtaaatcacgataatttaatatagttaaaaaacgaaaatttatcgaaatttttttggtgaatatctgttagaaataaatttaaaattcgcccctatcggcacgcccccccccaaaaaaaatttttgttcttaaaaaaaattacccaaaaatccctaaattttggttactttttagtcgaaatctgtgcaatttatgttaaaagaaatagtatcgaggcgatcaacaaataaaggaatgtggagccaaagaaatcattcttaaaaaatatttttttgtgagatttttggacctaattcaaagcaaacccccgcccccgtccccgcgggggcggaattatcgtgcccccgcccccgcccccgtgactctgacccccgtatcccccgcccccgtgaaaagccacccccgccccacggggctcgaaccctagaaaaaagtggcgcagtgccatttgaagaaattttagctcaaattgtgacatatatgcccccaatataattctggcacgaagtttttgcaattatgtgcttcctttgttttttttttaaatttaaatctaggcctcaaaaccgaaaagtaccggaaaataagacagagaaattagagaaagaaaacagagaaagaaagagagcaaagcgagacagagaaattgacgagagagaacagaagaatagaaaaaatatgaggtaaggctgagaaaatgagaaaaatagagataaaaatgaaataaaaatagaaatattaaaaaaaacagaaagagagagagcattggaaagagaattgaaggaaaaacgaaaagtgattgaaaagaaaaaaacggataggcaaagaaaataaatagaaaaattcatatttcttctctaaattttgtttttctcaatcaaaaaaattatatcagaatcgaaaaatttaaacgtagaaatgcgttttttgagctcctttcttcaaatcaattgagcaaaaaaatagttaaaacctaaaattcccagccctacttatcagacactatctctgggacaaaattccaaagcgaaattattaaattactttttaaaaaaccaatccaaattataaatatatatcgtccaccgaatttacagttca

SEQ ID NO: 3018 - DNA, 2254 bp, Heterodera glycines
gatttataactttataaaattaaaaacattggaatttaaggaaaaatttataaatttttaactaactttttaaaaaatcggagttttaaggttaaaatcggcgaagtattgtcagaaagtttcagcatattttcgggagtgccccagggaagtgtcttagttaaatcagcaacaataaaaatgggggaaagtccgaggaaaataactgacgacaacaatataaaaagtgcactgccaacagaatgaattgaagggaagacgggggaacattttctgctgggaagggatggcaaaatatagattaggcgagagactacaatgacagacaatgagacaaaaattaagaagggacaacataattactaaataaaatgccaataatcaaacattaacacacaaattcaaggtttatattttctgtttattttttgttttattgcaccagcggtaacgccggaaaaaagtttagaaaatttcaagaaaatccaataaaaatttaaaatgtttttccttttgtgtcggttcacaaatgctctgaattcctcgtctttcagtttggatgctctcaggcaatcatatctgtcaattaaaaagaaataacaaaattggggaaaatgatgcgaatgagacaaatgatgagggaaggtcaaaaagcggggtatttatggacggagggagagacagagataagggagacgaggaaaacatacaaaataaataaagttagggcggacattcgggtaccggactaacagtagagttcaaaaagagctttcaaattaactattaaatttatggagaaggcaaatttaaagttttatatgattttttgaaatttaattactggcccctaagggtcatatgagaggagggtctggggttcaaattcgcttggctgcggattattttttatgacagccaatgaccgttcgtgctttatttgcgcacatttatttggtaatgacacacaatgtcaattgttaactttttgggttcatttgccaataaataaattactcaatggaagcacataactagggaaccgatttctagtgaaaaaactttttttgctcaattgttttgaagaaaggagctcaaaaaacgcatttctgcgttaaaatttttcatttggacgtcatttttcgtaattagaaatcactattttagcgtttcgtcacttaaaatagtgaaaattcacttttttggcattttgtcactattttttcactttttcgacattttttggaaaatccttaacaaaaatgcaataaaaacaaaaaaatacacccctaagaaccgaccaaattttttttgtgtgtcattaccagggatgtgatctgttcttatttataagaaatgttctgatttggagggttcaaatcttacaaaataaaaatgttcttatttgtaagaaatgttctgatttcgggctattgttcttattttgttcttatttcttaaatatattcaaaattttgaaattttatggcagaatgtcactattttatcaagaaaatataaggtttgcgcaaaatttggttattttttgacaaaaaactgttagcaaatcgcattaaaaattacaaaatttttccgggcggcgcctatgggccccacccggaccctctccccccttgttccccaaaagtagttattttttcttctaattttcaaaattattcccttttcggtgagaattcaatcacaattttaacaattaaaatgagaaaatattgttatttttggactaaatttgttcacaaagtgcactaaaaatttcaaaaattttccccggcggcgcctatcggcaccgccggcacccaaaaccttatttttataaaaagttggctcaaaatcgcaaaaaattggccttttttggtgaaaatctgttaacaaatcagaattaaattacaaaaaatttttccggccgcgcctatcggcaccgccggaccccctcccctcacacttcccaaaagttttttggaaaaatgcgccgcaaaaaattgttaaaaatctgatttttttatcccgaatgcactaaaattttatgatttgctaatttcctccccaaaattgttaaaaccgttaatgggagacaaaaatatactatttgatacatttttgatcgaataaattgtaaaaataactgatttgaagcaattttgcaaaatgtccttatttttaaccaaaaatcttattttttggccttgatgttcttattttgaaaaattttcgatctgaaccctgacttaaa

SEQ ID NO: 3019 - DNA, 679 bp, Heterodera glycines
  unsure (1)..(679): unsure at all n locations
aacgacaatgtcttcaatggaatgctaccgctgtcacgagacgggtcacattggtcgcgactgtcctaacagtggcgggggtggacgtggtggaggttagtaaacgaaggcaaacggtagttgaagacaacgtgcgttccccttaggaggcgatagcgtctgctacaactgcaacgagccgggtcacttctcgcgcgaatgtccgcagggacgcggagggggcggcggcggatcgcgcggtggttttgcattttcatggcagaggatcaattcaaaattaatcgcaattcgtgtcgtaggtggtggaggcgacatcgtctgctacaactgcaacgagtcggggcatttctcgcgtgactgtacgcagccgcgtggcggtggtggcggagggtcgcgcgggggttcgttttttatttcaacatcggaatcatttttaaaccgcatagaaatattaaggaggcggggacagtgtctgcttcaactgcaacaaaccgggacatttctctcgcgagtgtccgaacggtcgcagcggtggtggtggaggcggcggctcgcgtggtattagctcattttccattccctgnngtacttttactgttcatttcctttaggtggcggtggcggcagtgtttgttacnaactgcacaagnctggtcacttctcgcgcgangtgcccgga

SEQ ID NO: 3020 - DNA, 934 bp, Heterodera glycines
accctattccctctctcccaaattcatgcagacgtccttttcatcctcactcaccttctcacccatctcgaccataaaattcgcccaaccaacaaattggccctgtgctattgaacataaacgcacaaagacacgtatttccagctgagcaatgggctgacgctttgttgtgatttcaatgcgttatttgtaattcctaaccacctaaatattccatttgaaaattcatcggcagcgattcattcattcaaaagcacatgaaaactaaacgccagcgatgacgaatgatgacacatcttagacttcgtcaagccaaaactgtcctcgtttggctattcctttcccgatacactcacaaaaaccgcaaatttgcccgttcgttagtccaccaatcgactccctttctttccttactctaaagtccacccattaaataataataaaaataatcattcgcgcctacacataaaaatgcctagcaccagcactcgaaccgacgtcgattttgtagagatagtccatctgttggctcagactttccaactttccattttcaacaattttcttcatacttttttcaccaaaacaagaaggttttgaacagaacaatgataataaatacaatcgtttttaagacgatcaattaaatggacggcaacggaagtcaaaattcggcagaaaacatttggccattggcacatgtcgacaatgccgaattggatgatggcacatcgtcaaaggcgaattcgactgaattttgtgaggaaacaacggaagagggaggcgaggaaaaaggggaggacaattcttcggatgggccaaacgaagaaccccagtcagaagatggatctggcaatgaggacgaaggtttcacttttgccaaaagcattctcgacattggttttgacataaatacaagaaagaaattaggaat

SEQ ID NO: 3021 - DNA, 3739 bp, Heterodera glycines
atggaagaatgtgaatagaggaagccaagggatgttagaagatattccattcttcagcttcgtcccaccctccgttctcgcccctccgcttggcttttctcgtcgtccagtcatttctcgcgtcgtcgtcgaggcgtcctattccgtgggcgtttcccgtcatcgttcgtcttcctcaccgcccccaccattttctgaacaccaattgaagctgcaaggccgaggaataaaagcccaaaaggtcttgccctgtcctttcgattcatttttcgtcttacaattagttaatgaccctgtgccccccccccccggtttgctaatcacttctttccgtcttaagcattcatttggcatcccttcactgatcgatgccatccgagtaaaaccaattccgccgccgcctccatcaacgaattcgaacacgaacccatttatatcaaaagacagaaaaagagcgacagccagagacgaagttgaccagcagcgaggtacttgtgattttatactgtagtgttatttatttttcaacagaccaccgaagggtgctgaccacctccaacatgggcagtagcagtgccatcgcctattccgacccgtgggcgcgcaacgcctcgccgccgcgtcggcacggacaacgcgggcggacgacgcatcggacgcactctccgcactcttctgcgtcatcagcagacgaagtcggggattttttgatttaactaacaataagtgttaattaccctctcattctttatcagtttcggtctcgtcatcgtaacacaaatgctttttccgctggtgagtccgtttcccgtcgccatcgctcgcgctcgtcctccccccggaacaaacggagaactacgacggtggtggagaaaaagggacaatgggaaaacaccacaaaaaggaggagggaacaacggacaccaccagcgagtaggagagactgaaagggacactcactcgctcattcatcctttttacctttccaggctcctttgatgaccaattcgccgttgactcaaacagtcgccaccgccctcgaagtccccccaacagttcgccgtctcgtcgcaagtcgccctcagctgatcgccgttaccatcaccacaggcacaatcgtcgctcctctccgtcctcttatcacagtttgggtgcccttttgacgacgagttcttcaacggcggaatggtcgcgacagcacaagggaccgcgaacaccaccggaacccccacaaaacagaaagcgctggggcaagagcagcagaagtgcgtcaccgttgacgccttcgggaaggtcgtccgtaagcagagcaacctcatctgatagggacgaagaaacgaaaggcggcagaagacgaacaaaaaagcggtgagttttgacagggccaattatttttttcgatgataaactttcaaccccttttttaaactctagggaatatatttctggttccgtcgacaatggcaccgcggatgctgctgctgttcagcatcggtttagtgatggcatttccgtctcgtcaatgccccgtgctctgatcaatcgtcaaccgccggtgatcagtgcttcgacgaaaaaaacgggccgcaaacgcatgtcagcttcgtcgagtgcctttgttcccgaagacgaggaagacgcaccggccgcctatcgcttgccatcgaatgcgatgggtgacgcacggggacagaagcggaaaaggtggggaaatgaatgatcgagtcgcactgtgtagggctttgtgtttcttctttctgtccatatgccgtgcttctcccacctgtccaggtccgtctcttcatccagcagttcttcctccgtctcctcctccgattcttcttcttcctccggctcttccagctcgtcatccgcttcatcacatactccactgaaaaacgcaaaaccaaatgcatcagaacatccatcaaaaaggacgccgaatgagagggagaaaagcaacgacatgagcggaagtggtggcacgaccattagctgctcaactgtggaccaattggcgctcaaagtgacaaaggcggagcaacaggaagtaaatgcgcaaaatgtggcgcaaatggatgacgaaagtggacacaaagtggcacaaaaggcagaaatgcatttgaataacaaaaattttagcaattgagcaaaaatattgcgacaggagaaagaaaaaacgtcaaaactgaaaaagctccctgcaattcttcccgtttggccgatggggacaaaaagacgagcaaaacgaaagatgaaagaaaaggttggggcggaaaatgaaagcaaaatgaatgccacaaaaaacacacatttatcgatgcagatgaaccaatggatgaaaagagtggtgccgcgccgtcctccgtcgatcatagcaaaaagcgtagggaacagttgctgagacagctccaatcggtggaagaagccattgcccggaaaaggtgggcagcgaggaccaattagaattttctgtgatttttgtcgtttaaggcagcgcggggaggggacgagttgaagtgaattggtcccatggaaaatcgactaattattcgaatttgttaaaactgatatttatttgggttttctatttgaagggattttgtgatattagtttcgtctcattgacttcaattttgatgtcgtacgtagtgtttgttggtggtctgtcattcatggcaagccaattttggctcgccaaatgtctttaatatttggcaatttctatgttttgttcccaacttataacaataatatgtttaattaagtatacatttttgcttgaataaatcatgattttgacactgatattctggcaaagattgttgtaaaaataatttattttcgaagaaagaacattaattgatcggctcacaatcaaaaatagcacacaatactctttggatggtcgcttttgtgaaggcgaattccgaacgtttcttccatctccgaagacccatcgccatttgcaccaaaattaaccaaagaacctcgattttagaatttggtcagttaaagcgaaaaaagtcctcacctcccgcacttaaacttcggtgttcgatcgttccaatgtcggaaaagtgcctaaaattcgctggtgatttaaaggtcataatgaaaagctgccactttttgtgtcgcttggcataatgccggcgatggccttcagcagcgtaaaatgagggcagactcggcactgtgccacgccttccgtccattttcagttggggataaaactcctccaaaatgtgggcagaacgtgcgaaaaaatcgtagagacaggcgaaaagggagattttgccgttaaattaatattgcctttccgttacccaccaaaataattgtccatttgtgcgtcgattggtccctcgcgccgttcgtttggcctcgtcagcgaaaacattctttcgcgctgtctttgctcatcccaaaattcgaccatcgaagagacaatttgtcaaaaatgataaacatttttattaaatgtttttttttctcacttcgcgtgccgaatttggcggtgccgtacgaatgccgagcgctccgaccgaacgtcgaccatcgcaaattggtcggcccggcgttggaaataacggcggaaaacgcattcgaattgatcagacaatgctaaaggctccaacggaggcgaaaaggtggctaacgaacaaagaaaacgaatattaattaccgaggtaataagcctaattggctgtcatttgggggggggggggagcgtact

SEQ ID NO: 3022 - DNA, 3292 bp, Heterodera glycines
cttccgattttttctattttccgaccacagtagaaaaaatccaacgcgcccgaaaatgactaatgcttggttgtctaatcaaatggaagtgccttttttgccggttttttcgcacatttgggcacccatcgacgtgacttcgacccttttgcagtcattatcataattgtttattattgaaatatattttcaattaaattaaataaggcagctaataaaaggggaactttttaatgatttacaaataaatggtatgaaatggcagcagcacactttttgcgagtgcattttttttgtgtccgcccaatggcatttttcccaggccgccctctcaaatgataagtaaaataatccaaaagtgggaaatgaccaaaaaccatcagcccaatcccaaagactatcagcaggcacaaaacagcaggtggcaaagattaaatttgaaaagaatggacggagaaaagcgaatggagaagatttaaataaagccaaagaatggaagtgaaacgccgaggttccttcgctttctccggatttgaaaaatgagaaacaaatgtagaaataaaataaatattaaaaataaatacaaaaatataaaccaaaaaagggcattcaaatgttacttccccatttaacccgacaaaacatcacaaatgctcttcactctcttctttcgtcctttctgtcgtcatctttttgtcgtcgcatgaagaaaagcatcgatggaatgcgtctgcatgtactgctctgtcttctcgtcgtcctcatcgcccgccaccgtccacaactcctccatcgcccactgtcccgcggctgcaatggcttcgtctgcgtccattctcggccgtttcgctttgggctgttcccgccttcgctttccggcactgtcatcggcgccatcgcccaaactgaacagttccaacagttcgtcggttgccatgccggccaatgatcggttgtcagcgccaacaagggcctgttaaattgagtaaattaatctaagaaatccatcatagtcagctctcacatttgccgtgtcgcttttgaaccgttgcagtcgcatcactttctcctcgacagtgcctcgagtgatcagtcggtatacattcactgttcgtttttggcccaatcggtgcgcccgatcgatggcctgcaagtcgcgaaaggggttccagtcatggtcgacgaagatgaccacgtccgcaccggtcaagttcagtccgactccgccgatctgaaggggacaaaatgttgtggaaaacataaccaaccagacttaacgtatttgaataaatatttttcgtcctcacatgagtggtgagcaacagcaggtcaatggacgggtcggtgttgaatcggtcgacgacactttgtctgtcctttgccggaacggtcgagtcgaggcgaagccaagaaatctccgctccgaaagcgccgcggtccaaaaagtgaatgatcaactaaaagtggagaaaagggacatgtttaactgattgccatgcaaaaaatgcaacacgcctcgagagttgcacgccattggcagaagaccaacgcacgatgggcaccgccggaaacggacggaaagagaagcggaggggcaacgggcggaggaacggcaaaggaagtcgaaggcgcttctgaaaaagtgggccattgaaagaaaccaccgccccccccttccccgatcaatcacttttttgatcatttgcattgtcctcggtatcgcctcccattgccactgtccgatcgccaatttggcattggataagcaaatcacggaaggccaccatttttcccgactgatcaacactcttggaacagaattaaattgcgaattattatttatcggttagtctctgctcactaattttttcatttcttccataattcgttggcgtttttccatttctgccgcctcggagtttccggcacaaatttgatcaatcaaattggcattgatcagtgagggatggtccacaattttgcgcagcatgtgcaatgcttgaagaggcgaaaaccaacgattgcgatcggaagctgctgaatgtgaagaatctgttttctaattgactgtatattttgggtttacccttccaaatgagggaaggaaatccccaaattaacgattaattgatcaaatgcttttcgttggcaaattcacccacaatttggctgttgtccaacggcacaattgtccaccaccaactgataaagtgccttttgcaagtcgctcaactcgcactgttggtcttgcacaatcttttcaggcagttccgtcagaacatcagtctgaaaaagcgagcgtacaatggcaattcaccggatgtttggccattttctgatcactttaagtcggcgcatcacaaagggaaggcattggcgatggagcagttgaagtgctttttccccatcctgcaaataaacgcaattccttcccccattgaccagttcgtcactttgcactgctgctccgtggcgcgtgcatttcgacatgccaaaatgtgccgcataaatttcgcttggaaaacggcacgggtggacagataaccgggcatcaaaaagctagaaaccaaattaaaaagatggccagcgaaattgtttaatgactggaaaagtgcccataaatcagccggcgaattttgcacgggagtgcccgatagaatgaggcgatgcgcggcacggacagagcagcaaaagtcgaacagttgcgagttggggttgcggatgcaatggccttcgtccaacaccaaataattccaacggtgcccttcggaagtgaccgtggaaagcctgagaaaaatgaaaaatatgggaaaagtttcaattattcttaaaatgctctactctttgtgttgtacctgttcgacttcaattcctcgtacgaaaccaccaaaacaaaggccgacttttgaagttcagcggctgcgacggctttgaattgggagagtttgtaaattttcatattggcacatggaaagtgggagtgccattctgcattaataatttgcaagcaaatggggaattattccgtgagaatggaaccgattcaccgttacaccaatggtcaattagtgtccgtggaccccccccctctgtcccacaaaatttttggaaaaagcgcgccacaaaaaaagcgtttttaaagcagaaaaaagtcgtcgtaaatgaggaaaatgatcagcggaaataaaaaaatattggaaaaaatccattccggtgaaaaatacaagccatttgaataaatattaaccattttgcattgcatataataaaattttaaatgtccttgaatttc

SEQ ID NO: 3023 - DNA, 2228 bp, Heterodera glycines
gggggggggggggtcgcaaattttttaaattttcttaacaaattcattaaaaagtccaaaaattttccaggaaagtagctcgaaatcgcaaaaattggccattttttttgcaaatctgttaacaaagcacacccaaaacccgaattttttttggaaaaagcgcgccgaaaaaacggttttgaaaagcaaaaaaagaaaaaggccatcgggcggccgaccccccccttcgcaaaaattgtttccgacccaccccctttttaatgtatgatgtggcaccttccaattggtagtgcctaagttgggtgttcagccatggaatttggtcaacgccaattcggggcaaatttgccggggcacacaaaacatcgaccaaagaaaaggcaccggcgtaggcattggccaactgtgaattgccatcggaaggatcggcgagttcagccaagaaatgggagtaacgctgaaaaagagagaaaccatttaaaatcgaaatgaatatttagggggaggagggagggaaacaaacattttccaatggcaaaagcgtaatcagctgacggagggcaaaagcggcagaattgcgaaccgaaaaaatgagatggaaatgaaaacggaaaaaaaagaaaccaaaacctcgacaatttggtcgcttattgcacaaagtgcgatcggagtcagcagagaaacgacaccgaaagcaaaaaacgaatttaaatttacgaattaaaaaaaatgcctaaaagttttggcgcgccaatggctgccaaacggaccaaaagctcaatgacaccgcaacgagcaaaattggaattggagagggggcctaaaagagagaaaaatagcaaaaccaaaaagaagaaacctgagataaagtcggaaaaacgctggtaacaaagtttgaggattggacagagttcggcggatgcaaattcagacaaaaagcgagaaacctttgggaaaggaccaaatttcaatggctggcgattcttgtggataatattttaacaattaatatatgatttttaaaaacgattattgcaaaaagaaaaaagggcactcggaagcgaacagcgggattcgcggaggacaaaaggacgaagcaattctgaatgtgcggggcaatcctttcgcgaatgattcgacgtcggagaacggacgaacgcaaagcggggaaaatgacacgaagggcatccatttggagcaaaataacctgggaagggacaattaaaacccaaaaaatgtttttattagattttgtgtttctagaaaacagcccaatccttggggcggcgtcgttccgaaaatggcacctccgtctctttgtttcccatttgcccatccgttggcatttcgcgcaatgctttcagggagcaaaacggcccatggactaattcggcacagttctgctcgatgccatctccaaacacggcagtgatgtgacgcagaatgagctcacaattgcgcgctttgatcgcgtccgagctaagggaagaagtgccttgggccgactgttgttgttgtttctgttcttcggactccaaatgatccaaactgaggacgcgattctgttggtcagaagcagccctgaaaagagaagagaaatttgccatagcgactcaaaggatgaaaacaaaaacaaaaaaacaaataacttaacattgactcattttgggcactgcccacagttcggcacattgggccaagccgaggcaaagttggcgcatcactttggcatgcggacacggctcacgtcgagcggtggaacggaggagggcaacaaaggcgggcgccagcagagaagcggcgagagacctggaaatttcctgaaaatttaaatgaataaggtaaaagaaatggaaaaatagtaaaaaaagaatatgcccgatttcattgcacatttcccaccgattccaatgcgtccatcaacggtttgaccagtggggtgagttgagccggcaacggaactgtgccattgctggcgaaatggaaaagggcggaggcaaacagtgcagtgacacgactaaaaagaattttcgaatgaaaaaaaggaggaattatgtgccttcccctccctcactttgtgtacgttcgaatggccaattttgtgcgtgcgatttgttcgacaattattttgtgccgtgcggaaatgcctggcggtcgtctgctcggcttaagcgctgctcacagttgagaaaggtagcactaaattgaatctattcggataaaaaatg

SEQ ID NO: 3024 - DNA, 3752 bp, Heterodera glycines
ttctttaaaaatgaaatttcatgaatgaaaatttttaacactttttcttgttctccatgttaaataaatcgccaaaaaaagaaaaaattttcaagaaattttctttcattaaatgattttatttttatctgctccaaaaattcttggtggcaaagttacttaaaattcaaaaaattaattgacaatattcacaaaaaatagcgaactgtggacggcacgcgtgccatcattgacctgttttgggacgagccaaaggaatggaacggtgaccagctggggtatacggtaaactgcactattgtagctactgtgccagccggccaacagcaaggcaccagtgatgtgcaatcaggtaagatatttaatttaatttaatttaatttaatttaataatttaataagtaaatttttaaattaaattaaattaattttattttaattttaatttaattatatttaatttaacaaagttttaaaataatttgtttttttaattaaattccaataatgatttttaaataatatttgcgcttttcccagtcaatgcaacgcttcgtcgcggcacaaatcgtgcttacaccttctcagtccgatccggcaaaatttcatgcctgatttttgcgatgaatgatcaacgccttgttggccctccatcatcgccagcggccgaaattgatggaagcggttggttaggagaattaatattttaattaagagttaatatattttaactaaaagatatttaagtaattttaatatccaatattttgctaatcaaaaataaatatttcaattaagagatatttatttatccaatattttgctaattgacaataaatatttcaattacgagatatataattagcaaaaaacttccttgctaatggagccaataacaacacaaaactgagaaatgtgcaaattttaataaactttttgtataatttctattaaaaaaaaaaatattatggtccgttggcattccaatgctaaatatgttgccaaatatgttttatataacattttgccagagttcaagccgttgatccgtttgttcgccatcgattccactgacaatcttgtggccatccaaaattggaccattgagtcggtggtaaagccgtctggcggcagcaaagcacgctttttggccaagaacagaaagcgacgacaaattgcgcatacggtaacaaaaaaaaaattttaaaaaatgcttggcattttgtattgaataccaattttaaaaaaatacacaaaatgacaattttttttttacactagattcaatatcaagctatgacctatgtgggaggtgaactgtatgcaattcggaaggagcctgaaatgtctcagttggccttggttaagctggacatcaatcaagtggataccgtaatcttcaaggtccacatgagtgtagtacatgatttttttgaatattcttttaaaatatatttttatttatttatttaataatttattttgactaactaaggcttcattattgggcgaattttctcaaattgatgcaatggcagctgattgggtagcaaatcggcttctgttagtgagcaaacgtgaactgatgacagtaaattttatacacataaatgaaggctaattaattttgtaaatttattaaatttgaattccgataaatttcaataatattttcactatgctgtgttgtagatacaccttgatcagctgcaagattcgcccagcactgtgctgttgaagaagctgttccaactgtcactgggcgctcaggatgccaaacagctcgtttttgacccattcacgaagttggaaaaccttatatttgaagacatttttgaaattttaaagtcttaaaattttgcctaactctgatcagcaaagactatataataagtagggcagcaacttttagtgaaaaaactctttttttgctcaattgttttgaagaaaggagctcaaaaaacgcatttctgcgttaaaattttttcatttggacgtcacttttcgtcactagaaatcactatttttggggttttgtcactaaaatagttaaaaatcactatttttggcgttttgtcactatttcgacattttttggaaaattccttaacaaaaatgcaataaaaccaaaaaatacacccctaagaatcgacctaaaaaaatttcaaaaaaatacacccctaagaatcaaactaaaaatttttcaaaatatactcctatgaaatgaaaaaaattttctcaaaaatttactttcttggcaaaaattttaattttaaaaattttttaggaactatttttgggtttttggtctaaaaatcccagtcctactcatttgcactgcaatcagtgaataaaaattattttggcttattttttggctgaaaattatgtcactattcgtcactattttggactttttgtcactatttcttcactattttgggatttttactcactattttagttaactatttcgggatttttcgtcactaaaagttgctgcgctaataataagatagaaaaaaaccatttaagtgatcagctcgattaaataatagaccctgatcctatcattttctctttcctagtgatcagaattagttcaatgctaattaatcaatccctgataaatccaagagtaatcaatcagttacaattaattcttgatcattttcccattagcacagcctatttgttgaccaagaatggttcactgttttcgcttgatctgaacaaaggcatcgagagcaacttagaactgacaaccggttgcctcaggcaaaaggtaattattttaatgaatgatttgatgaaggcacaacacacaacactcactaattagcctaattacataaatttgttcgcttaattaagacgatcacttcaattgtgggcgaattcatatggaacaaagcaacatctccacaactgtacgcactgacatggaatgggctgatcgagctgaagctgaactcggacaacaattgccctgacatcaacgtcaattggtcactttttgggggtgaggcattttaaaataattaaagattttataatttgttaactctaaaccaactaattatcaaatagcttaaaaaaagtataatttaaaaatctaaaccaattaaatgacaaattcccgatcagttttattcgaaaaattttttttgataaaataaacagtcaaataataatttttgagagtaaaaataacatagaaaagcaaaagcaacaaacatacaaaattgtaaactgaactgacacgggaaaatatccctgccatggatttggcctgttgataaagataatctgatcttgggagattattcggccataattttcgactaccgataatattgataaaaatatttaattaatattcggcatttaccgctcaacccaaacagaaagtggcctgaaagcaatttcgttgttcactgttgcggacaaagtgttggtgtttgccaccccaactgatctgctggtgtacgatcggcaagcggctgcggtgtcccaattccccagtccaagcccaccaattcgtcaactgttggccgtctcacagtcatcccaaccattccctgatcgctactgtttccagctgccacccacaaatcagatcaacttcaatgtgaaaaatgaaggtataaatgtgccatttatcaggaaaatgcgtcagtcagtgctactataatccaagaataatgtagtccacaaaaaacaaaaaagcgtggtttggtgcctccggcggg

SEQ ID NO: 3025 - DNA, 1456 bp, Heterodera glycines
actatttttaattaaaaaatgtcgagtgtggaagggtcttgatgggtggggggaccaaaaatttctaactttatgtagtcaaattaattttttaatatttttatgaaaatttgactaattttgatcaggccgaactggcgcggtggttgaagtgcatgagctgcagcagaaggatgcggcccagcaacagcagcagcccaacgaatgtgtgaatgtgtcacaaccgatcacacaatatgatgtgcactttcgaaaacatggcacggacaaacaccaacaggtgggcatttatttatttcaaatttcgtgaaaactgtacaggaagtttgacagaatgccaaagaatttcctttaaagtttttcaacataattgaaaaagactaaattaaatttaaaattaaagaatcattttaacaacggacattcgtgaaaatgaaaaatattagatttacaaataatccaaatttgtagaggaaggttggcagaatgccaacaaattttcctttaatattttaaatataattaagaaaaatttaaaaaataataaattttattttattactctaaaaattgtctgcacttttaaaggagaagatcaagaatgcccattcgagcagcaatcgtattgtggtggacaacggtgtgctggaaaagtacacagagtaagtttcaaaaaaaataaattaaaaatttcaaaaaataccgtacttttattgattagctacgatgttacggtaagctggctgaaccattactgtccagcgcaaggccaatcggaggccaaaccgttgcacaccggttttggctatccgtccgcgcccaaggacccaaaagcgttggcactgacgccggacacggtgctgctcagctggaccttgcctgatctgttgagtgcgccggctgctgaaattcgttaccgagtaaaatttattatttttttctgaataaattaaaatatattttaaaatattatttaataaaatgattttaattatattttatcattaattaaaaatagaaaattaaaatatacttttcttttaataattctaaaatattttaaattatatttaaatttaaaaagtttcattttaaaattttttaatatatattttaagcacttatggtaaaatataaacgaaattttattataattttaaaagaaattttaaatgattttgttaagcacttaaataaataattgttttaattttttattatgtatgtaatttaaaaaaaggatttattttttgcaatttaaaatagggttcgagccccgtggggcgggggtggcttttcacgggggcgggggatgcgggggtcagagtcacgggggcgggggcacgataattccgcccccgcggggacgggggcgggggtttgatttgaattaactccaaaaattttacaaaaaattaattttttatcaatgatgtgatggctccacattccttta

SEQ ID NO: 3026 - DNA, 2432 bp, Heterodera glycines
  unsure (1)..(2432): unsure at all n locations
gaaaactgatggatctgttaatagatttgtccaaaaaatgataggtttttgcaatttatagagaatttttttaataagatttacgaatttttgggccctgcgattccgataggcagcgccaggcgaattttaaaattaaaaaaaatcaattaaaaaagaaaatgtcatcctgaatcgaactcacgacagaaaataatgtcaaggttgattcactaaccactacgccacacacgctacacactaatgaccaataataaaattaactttaattcataaaaaattttgtcaaaatggttaaaaaaaatcaaaattgtctaagttttttgggctcgaaccataatttaaaatttgaaatgtcatagaaatctattaaatgaaattaggaccgaaagtttaaaaatccatttccccccccccccaattaagattagccaacagagtcctacagttgccaacccagtcccggttgctgttcgaccagcggaaggcaccggcgggcatttttcaaccgcattagccgaagtggtgccatgcgaggcaaacccatgccttgccaaagtgccaaaccttcgtccgtccaccgactaccacttttgggtgtgttcaattttgttagggctgagatttcataaaaaaatttcctattttttttttcaaaaatccgaaaaaatgctgaaattttgtgtgccctactaaaatgcctactccggaaaggtcgttgcgctgcacatcaatcgactcaatgctgacgatcctgaagcaacatcaggggagagccaggcacacacgcgagacattcctggcactttacgccttgaaaatgtgaccagtaagtctttaatataacccaagaatcagacccgagaccgggatactgtaccagttttagacccgggttaattggtgaagaaattggaaaaaatctttgggactgggactccgtttctagactgggtgttattagtgaaaaaatcggaaaaccccggcgaaaatccgggaatgtgagaacttttcccgatcaaaaaacctggggctttgcccctgatcccgatcagttttttattaaggaaaaatttccaggtgattcaatgttcctccgctggaatacattgatggccggtgtggatgtctcatcatcccaattagtccaaatttccatccaatatcgtcaggttcttatgaaatttatgaatttaccacttttttaatttaaatgatttttaaattattaatatttattttaaattatttttttcagagcggtgtggacgcctcgtggacggatgtgcgcaattcgaccttttcgctcacggatttgccccaacgttttgtgtatgttgatcaacttcatccggccactgcctatgactatcgatatgccgctgaatacaccacaatatttggtataaattttttttaaattaaaaaatggataatttatttaatttaatttaatttttaaaaattaaaataccaaccgttttatttttatggaaaaaatctagagctcgacattttgatggaatttttcaaaaatttctctgggaaggtggccatggtctccgctgtacccgcattaattaattagttaattaattattggttacacagatggcattggcactatgccaaccgctggaagtggtgccgtagatggtgcacagcagcaacagcagccgacagtcccttccggcgacgccaaagagtctcagcaacaacagcaatgggacggcaagaagtcaatgcttgccgaaacgttctatcagcagagtcaacaagcacgtacaaaagcgggcacaccgtccgcaccgttggaagtcaaactgaacaatgagcaatgctacagtaacggtgagtacggtggtgggttccgaagggagtaaacaaatttgtattattgtgtctgtgtctgatcataagttaaatattcagctataatttgggacaaattgtgtccttttttttaatttagttcaattttttaagaattattaattaatttttgtgattaaatattttaaaataaatttatttaatttttgtgcattatatttccaatggttaaaattgtaagagcttaccaatgcataatgaaatgtcatttacaatctgccattaattatcctaattaagtgggtcttttgtttaccgttttatttttctctctattctggtcgatcattatttttanagaaaatttttgtaaaaaaaattcatttttaatacctgacaaaaaacagatgttaccacaaaacaaccaccacagcaacagcaacaacaaactgattggacaacaatgacaacacccacaacaacaacaatgaaatgtgaagctgggtggacagcgcgacggcccgagcccaagcgagacggaggcgaaccaacacaaaaacacgcggaggaacaccggcaaaacggaaaacgaagcgcca

SEQ ID NO: 3027 - DNA, 4901 bp, Heterodera glycines
aaatgtgaagctggttggacagtgcgatggtccgagcccaattttgacggtggtgaaccaatacaaaattatgcggtggaataccggtaaaacgtaaaacgaagcgccaaatttttaaatttttgaaaaatttaaagtgccgacactcagacggagtgggaaattgcggaacgcggcttgccacctgaccgcctgttttggcgcgttgcatgggctgaaacgcattcacggcgtggcaaaacgccaagtgatgaagagcttgtccaggggtaggttcaagtccaattgcatttttttacgattttcaaaaaaatctggaaatttgaaaaagaactctttagaattttttacatagcgtaaaaatgagaattttttttcgtaaaaaacgaagatatttttgcatattttcatgtagtcaaaaaattctttttttttttaatttttagacagttccgtgtgcgtgccgccaacgcggaaggcttcggcgactttggctacacaccgttgagcgacaaaagcgcttcaggcaatggccccggcggcatcagcttttggttgcttatactgatgatactgttctcgctgatgttgttctcatgctgtatcgcgtgcggatactgtaagaataaacaaaatactgtaattaaaattcggcaacatttacctaagcgcgttatgcctgattttctgcatttttaattttaattaacaaatttataagaaattttataaattttcgtaaaaattcacctattttattaaaaaaaaaataataatttttctcggtcaattagtcactaatgatctgtcccgccatctaatcatataattttttcaaaatatacaaaataaactaatgattaattaattagctaatttttggattaaaatttaattaaaacaccaattaaattttgatgcattaattactaatttttatacaatttctttcaccattttagtgcgttggaaggtggccgaacgcagacgtatacgtgaaaaattgcataaaccaatctgtttggaaagcattggacaacaaatccaattcccacaatcatcacacaaattctcacaggaagtgctaaacgaattaaaaagtaaaaaataaaaggaattttttaaaatttaaaaaaaaattcgcattattagcactgcctcggcttaaaccggaaagtgtgaaggcaaccaaagagttgggcatgggcagttttggcagagtttgcgaggtgatggcattatttttcatgaatatttaaagaaaattgaatatttactttaaataaatttttaaaatttgtattatttatttattttaaaactaaaaaaaaaaattataattcaaaaattaaaaaatatttaaatgcattaatttttattatacagaaataatttgtttgtttaaatatttattaattaataaagataatttaagttcaaagaaaaaaatattgtaaatttcctcaaaattttgatttttcaattaattaattgtaattattatttattaaaatattaaaacaattaaattaaatacataatattttataaccttttaatttagggtcttatgctcacaaataatatcccaccaacatccgtacgggtggcaatcaaatatttgaaggacaattgtgaggaaaatagagtcaaatttctcaaggaggccattttgatgaagtgagggggggggaggccgtgaaatttttgaattttaaattttcaagaaattttgaccatcccaacattgtcaagctgcttggtgtgtccatggagggtgaacagtttctggtgttggagctgatggacggcggagacatgcgcaatttcttacaaaaatcgtaaatttgtacaaaaaaaattaattaataaattatttttaaatgaatttatttaggttatgaaaattgaaacttaaataaaaatggtttaaaacagtaataaacttcgcgtttcttaaatcataaatttggaaaatttaaatcaaaaatatttttttgtgaaaaaatttttcattgttttcatgcaccttggtggaatttaagtatcgcatcagcacgtttttatattgtaatagttaaatttttataagttaaaaaaaagagaataatttctacaaaataaaattgtttttttaaaaaaaataccgttcccctaatcctcctaccaaaggcgtccccaccgtactcggccgtcgcgcgtgtcactgcgcgaactgatcgcaatgattgttgacgtgggccgaggctgtgtgtacctggagaagtacaagcatgtgcatcgcgatttggccgcccgcaactgcttgatctcctcagccacctcactgcaacgggtcaccaaaattgcggactttggccatgcacgggaattgttcgtcgacgactattaccgcttcaggggaggggttcgtaaaaaaataaaaaatatgtctcgatttcaaagtccattttcccgtgatcccgatcggacttttttgaaaaagtgctgtgatcgtggtccagaaaaaattgggttttgaatcccgggtctggattcatatcctgttaaaaccgagatttgaatcccagtaacccaaccccgatccattgccaatcccgctctcgactttttcaaattccgggctctagtactcataatatatttattttcaggatttgcttccgctccgctggctatccccggaagtgatcaaccagggcttgttcacatccaaaagtgacatgtgggcatttggcgtcttactatgggaaattgtaatttttaattttttcgaatttttaaactaatatatttttttaatttttaggtgacacttggtgaacaaccatattcgcatatgtcaaatgcacaggtcttcagagataaacctcatttcattatcttttaatccttttcattaaaatccgttttcggatcttccataatccgatcattaatttcttgatttcaaatcactttccatgaaattttcacatgatcgaaattgatccaaaaatgtcttaggtgttggccaggctaagcagcggcatggcattggaccgaccgccggattgtccaaatgaactgtacgatgtgatgaagcaggcatggacagtctgtaccgaaaagaggccacagtttgcggacatacagccccggcttgagacaatgcggggcctaccagcatttcaagtgggtttaattagctgataaatcacggctatatggatcaagcaaaaacaaacttcgtttagctaattgatcgatcaagaaattttcaaaaaaaaaattcaaaaaatttttataaaatgaatttaaggaaaaaagaatgaaaaataaattcagagattttttcaaaaatattatgaattactaaattttctctaaaatttttcaataatcgatggaaaaaatattaatgattttctgatttgatcatcaactaaatccattttaaatgttcagtctcgagacccattcccgccatcatcattatgcggcgacaatagcttttttgacgcttcacaaaattcgagcacctcaaaaggagaacagtcgtctaccacgacaacaacaaacggtgatggtgaagagtcgtacacaacagcatgccaatttgacaaaagtggaggtgattcaaaatgtcaaaattaaaaaaaatatatattttggaaaaatctattaaattaataatattttaaataatttcatcaattaattcttattcattttttattgtttgattttttgtgcttgatcattttttgatttgattctgtattaaaccgagctgattagatgataattttttaagttatgaattaaattgaaaaaataaataaaataaaatattttctcaaaaagattagttagttctccttttcctaaaagaattacatttttttaattttggcgttttacagaaagtttctccgttcgacggaatgccaaacgatcgcgccgcaaaatgccaagtcggtccagcgttgaagcaagtactggcgccgctggcacggctggtggtggtggtccatccgcttcatattcatttgggacaacaagcaccggtgtggattcatcagagtatgaattgccgaggtcaggggctcagcttatgttgacgttgccaggatcacggtgaaaatgaaaatcatagattaataaaaaaaaattaaaattcttgagccaggaaataataaaattgccgatttcgttacaaagaattttctaaattagccaaattatttttaaaaatatatttctagattattaatttttttatattgattttaattgcattataagtatggaaaaaaaattctataaaatatttcattttgtatattttttttattaattaatttaccaaagtattttgaaatattttattcttaaaatttttttagcatttagattattttaaattgtttattttattatcaaatttaaatgtgcaattcaattaaatttaggccaacaaatcaccgacgatccgcaaccacaggatttcatcaaaatgacgcatttgtggccgattcatccgtggatgaaagcgccaacggtagcaccggcggggaccaacaacgcttcacccggtccatctctttggctggcacttcacgtgccgccgctgatgagccactgacgacgccattccgacaatttggggcctcatcttctcggatcagtcgagtctaagagtctaagctcaaatacaaataattaaaattccggaacatttttcgaaaattgcgagatttatccgcggttccgattcgcccttatccatatttttagtgcgtcatatgtctccactgccaaaaattttaaatgattttaggatgcaattttatggtttcaaggcatattatacactgttcattttgtgtctatcatttaatttacatccaattgttata

SEQ ID NO: 3028 - DNA, 6750 bp, Heterodera glycines
  unsure (1)..(6750): unsure at all n locations
agttgagaagaattttaacccnntccttacatatcgctcgatcaaatattaactcgaaacgatttttgttgatatcaaaaataaatcggcaaacgagcctaactttacggtacgcttgaacccacgcttccattcccatttctttcgttgcatcaagaattgtacggtcctcctctaccatatttttaatttcttcgttcaattttgctctgatcatttcttcgagtatgtccaaatcgggaccacttaaatttgaaaaatattcatccaatttatgttggtatgattcattgtcatcagctgacattctcaacggaattttgctcgtctccgcgcgcttctcacgcgctaaaagaccttgagtcacaccaaaaaggtcacaaccattgtttcaatgtccgtcaataaggcttctagaagtttttcttcatctcgaatacttcgtttctctctcgtttttcgttttatgtattcttctctagccccacgacgagcagagtttgtagcatgcgaaaaataattctgtgcggttcttaccttttttgctaacggttcacttccttcgcccaagagcctatacagacttttacccaagtcaattggatttgtgacattcgatggcggtacttcaatacgcaccgtatttcctgtttgccattcaacttctacaaattgctgttcaacagtaccaatcgaaggccaagtatgaggatatacaataacagcgagtccaacttcccattcggagttgaattgtagttttcgtggtaaacgaacccggaatgaatttgtcttgttaccttcaacatttgtatttgaaggaagaacaatgtaaaaagaattggatggcattttttttaaaagataaagcgcaataaagtttttatatatttttctcggagatagaactcaatggaacccagctattgaatttaatactgtatcctttccattttaccagaacgtattcaataccattttgttttttcttcttcaaaattgttcaatatcatatagtgattctttgtttttgagaattttgcataaatcattggaataaaaccatccctttataatttcgttgctatcgtcacttaatctgtaaacaacgggcgagcgttctgtatgtacttctgctaccgtaaatatttcatcggcaaatcgtggtaaataacccttttggaatacatgtttgtatttttctattctcacacggtcgcccactttgaatttaggactcttttttggaaattttttcgcttcattatataacttttgtctcagttcctctgcattttcaaaatttacgtcagcaggtcgcattccaatggaggagtttatagactgattaatgcccttaacaatgtcctgaactatctcaatccatttgtaagtgtctctttcggtgaagtaacgatataaacgttcttttatactacgattggcacgctcagccataccagcgtggaatcgaggggaagtcagcatgcaaaaatgtttaacatcttttgtatcaaaatatttttttactgaatgagctgtaaattctttcccttgatcagtcaaaattttccatggaatgtacttgcttctcataaagatattatcaaatgctttaattatgtttatacttgtttttgactttacaggctcaacaaatatttgtctacttagagtgttaatgcaaactaacaaatatttgaatccacgattatgttttgcaagtctatcaagaatggccaaatctgcctgccattcggtatgtaatccaggagctaatgttggtaagtgtctgtagcgacgcttggcttgccgatgtaacgtataagttcgttgtgtgtacaagaaattttgaacatctgctctcgtgatttttctttgccgttttttcgcctctctcaacaatggttcaaggctcgtgaatgcgactggtgaatttatgtctttatacaaaaactcgagtaatcgctgtttcttcaaatccataacaaaggcttaaattttatcatagcctttttataaactcccgtgccaatttgaccttcagaaaagagacgtttactcaaaagcggattttgtttggctctagcaacaaactctttgagtgctgttggttctttggcatttgcacgcttgtctttgtttaacaaatgcgcaacaatatcttctatattactcgttctaagaacatggccatttgttttgataatctgtccatcctcattgattcccaaggcctcagagtttttataaatgtaatttataatatccccttggtcaaatgtttctgcatcttcaaaaacttcattttcttcatcttttcttgttttaccaagtttgatattacgacgtctacgagcaaccggtcttcttaccagattaaaaggttttggcatagcctctgtcatttcctgtaggttttgcaatttaacatcaacagggcgttcctcctcatctttatttaattttttgaggcgtttaaattcttgttcatatttaaatgccctctcatcatcgttaatttcatcatcatttttaatttgcttaattcgtgatctaactaatccaagaggacttccatcttgaggtgacgtcagactctgataaatctcctaaggaacgagcaaataccgctttgtgtattgcatttttaaaattatttattgttttttgtggcgttatttataatttgcaattaaatttgaaaccaagggcaaaacaattgaagagagcaatccagctatggctggaattcccgcaccgtgttgcaataatattcgttttgcggaacgagaacaacgtgttctggctagatgacgcaaaatctgagcatgtgttttcaatttttttaaatgttcaggctttagaggaacccgtccttttaaaatattaagacaaatctctacgatacataaaagctgttcatctgatgctctctgtataagttgtttggaattttttgcattacaaatactctctaaaaaatttgtattctttgtaattaaattggaaacattcatttttgaacgtaaacaattatcttttcatcatatatatgtgttctcaaccgtaaaatttcaagactttctggatgcatgtcaactaggagataaccaaaattttttgaacatgcgttacggtatgactccataaaatgagctgtccttgaaggaaaaagatgtgtggctaaagtacgaatttgaagctcaccggttgggttccgcattaacaccaaataatgtgaatttccacgcgcgacacgcaactctttattaaagaggtgttgagtaactagaattatgctaactccccaattatgtgaaccgcgagtaaagagtgtgtctaaatattgctgtctcataccaaccaataaatcgtccaacaccagcaacaatttttcctttttggcatttcctttaatgtagtcttcagcaggaactccattgtgaacagtgactgttatattgtcaattctcccattgcgttgtaaatttaaaatattcggattcagctccccgtaacaatacaatacacgctcaattggtactgaaataattttgtccaagttacgtaataatctcattatccattccgactttccacttcccgtacttcctgacacaatcattgtgaatggatgacgaaactgtacatccgtatgatcaaaagtttcctccatttttaattacatttagatttaaaactctatatataacttttaattctgttaatttaaaaaaaaatggatttaattctcgccactgattggatgaataacgcttacccggaaatggaacaggacaaggctaacatgtcaccaaaggaagaccctagttggattagtctcattgatgaagaggaaaagcgggagcctatagctattgtgcaaatcgatgaggaagaggagaaacaaagaaaaagtttgtcttttagtgttattttttttaattaaaatttagatcctcccggaaattgcgactgtcgagagaagcgtcgttgctttattccgcttgttgaccacttgtgcaagaaatttgagtgttccgcccacgagttacacgtactcttcaaagacttggggaagcgtcgcgccatcgttgaacacctacgctcttctcaattgtgcacctcccacctgcgtccatcgatacggaatttcccagttcgctgcaacgatctctccattttggatgctcactcagtccctgcataccgtggttacctcggaatcacggtgtttattctttttatttttttatttctcaaaatattttaggttcgaatgcactattacatcaaacacggtattcgattgcgtcattcaaatttgccttgtgttgttgaatttggcggtggagatcataagactttcttcccattagaagctttgaatattgttatttagatgttttctgtatcaaattgtactgttgtttttaaaataaatgctcaaccactaacaattgaacaatttttgactattgcacaacatggagccaatactgagtacaacccacgccgtttccacgccatcatcatgcgaatccgttcatcaaacaaaaaaacagtggctgctctaatttttcagtcggcacgtgtcgtcctaaccggcgtaccccacccagacagagcaagagtgtttgcgaaacgagttttgcgaagaatacaacatacacaaaacaccatcttcgatatccatgagatgcgtgtggtcaacattgtgggtgtgaaaacctttccacaacgaatctatgtggagcgcctcgtaacaagactgggtggtgtttacgatccaagtattttcccagcacttcgatgcaaattggaaaatgatgcaacgtgtctcatctatatctcgggaaaaatcattataactggtgtcaattcaattgataatttacacaatttatttcaatatctctcaagtgtgattcccaaattttttcgttgagattataattttttattcattgattataaattttcaaaaccatccagaataacccggtcgagttgggtcagggtcaatcaatgttctctttcttcgttcagctgtaggttgtattggtggatgtgatacatcctccacatatccaaatggtcgtgtttgcattcccggtcgaacacggcccttggcgtagaaaggtctgtagtctttgtgggcctcgcaggtgtatacgtcagaacggacatttcggtcaatttgcggaaaagttactcggatgcaacgatgggctccacctcctccgtacacgtagagatcatcgttgtcgatgacgtcatcactaaaatttaaaattattagttgtgaaaattaaaaaaaaaaaaactgacataggtccgtcaatgttatatgtagccagtgtcagatccttcattgcttcaaaattcagtaattgttgagtggcgtacgataatctgaagcttcgtatttttaggttggcccgctcatcagttccgtctcgtgctgtgtgccgaattccataattttttggaccaccagctacaaattccacaattcgacgatcaacatgctcacgcttcatttgtccaagtgcctcgccttccggaacacaccgcccacccatcttgttcacgtagtagattgagtcagtgtctaaaattatctaacatttttttttctattgtattcgcaaaccacaataaagaagctcagccccttccagtgcaatcactttttccatgtatgaatagagatgaagtctcgcgtacgatgtgacgtatattgcgactggaagacagtttgtgaggggtgcctttgcaaactcgggacgcttcctgacaacaactcggtccatatgctcggagacgtggacaaagtccagtttgtctaatgttggatcgtccaagagttgatggaattccgctggagtgcgcgtgtactttatctgcgtgaaacccacgcgctgtgccatttttcccctaaacattttttttttgttcaaatagaagtttaaaaacgtataccacagagaatttgccaatgttttggcaatgaggcggagccctgggttgggtgtcattttcgttgagtctagttggatgccttccgtgcgcatgaaattatccacgaattctttacgttgttcatctgtctcacacccttccggccacccagtcgcttggactttgagaccaacgaatgtattgacatatttgctgaacaagtcgtcgtcccactcgtcatagttccaaaccttttttttatatatatttttttttcgttatttttaatgtacctcaaagagatcaaccacaatatagccgagttgaagtgccttgttcaattccatgtgcgtgtatgcgcacacccaagaacgcttttcgtcaccatgttgacatggacgttgctggcgtctgtccgcacaccaagcacagagtggaaaggtgaaacgtccatctttggtgcgatagcccagcaacgggacacgaattaggcgcggtgcgagcactcgtacaagtaaaagtccccggaacatgttatttgacgaacatgtccagggaagtggggccgtgggtggatgaagcaatacctcacgcgtgagaacacgtggattctccactgggaaaggattcaccttctaaattcaaatttaaattgaaatttattgagaaaaagcaccatgacgtagggatataggctaactatatcaatgcacaatatctcttcatcgtctgagcacacatgatgaagtttgaagggctccgtacgaccaccacggagtgcat

SEQ ID NO: 3029 - DNA, 1733 bp, Heterodera glycines
gtggtccttctaattaagcctcggcaaaacttttaaaaaattttagtttagctttcaaaaaagttacggccagaagaaattcaaaaaaccaaatttttccaacttttttcggccatcaaattggttcaaaattaacaaaattttttggaattttgcaggctagtagatcatctgaagagctttcgaatgataccaacaatgttggatttggacgagaaagaaaaaagtatagtggaaaaacatgtgctggcgcccaaccgtgcgcgcccaactgaggtagaccgggcgtttgttgtgcattagttaaattgtttttgattttccatgatcaaatcgttatgtagtttaaccctccgaatacaaacaaacaaatttaatttgcaggaggacaacctgttcgagcagttcatcctgtccactcaaattagctactgttactatgccgactcgcatcgcattctgggcaacacctttggcatggctcgtgctgcaaggtgaataaaatttcggagggtggaacccaaaaatattctcttttttttttcttttttcttttttgctctgttaaattttattctccgtatgaaaaaaggcaggaatttgtagtcttctttttcacgaaaaatgaataatttttgtctttttggtgtcagaattttcaaaaaaaaggggtagtaagagcggggttcgggcgttgccgcgcctggaaaatttttttttggaaaccaagcatgtttatgttaacaagggaacattccgagctgtgagtgggaaaatgcatataagctatataccattggatagagcggggtcgacttgtattgtgaatttttaattttagcggtgcattccgcctgcttcaaaagttacagggcctcgaaactcgaaaattcgtgcttctgtgctcattttcaacttttttcactttatatcgatttttctccactttacaatgacagtacacatttattttaaacaaagaaataattttaatgcatttttcatatttaaaaatgtatttttaaaatctttaatttgttaaaaatttaattaaatttatttatttttatgttggattcgaacccggacccccaaaattgtacttacctcgactcgttctgccatcagcattctattctgctcgcgtaaacttgcgatttcactctcaagttggcgagcgtgcgaaaaacccttaatcattttatattttatataaaaaaaatattaatttttcgtttaagctcatttatcattggcaataacaggtgataactgtataaacaagacatgataaatggctttaaaatacccagtaagtggaaagaatgaatggatgggataacccagcctcatccaagacaatagctattctcatcgattttactattataccaatgaggaacttatacagtttacagggtactttttacatacattttcagatgcctataaatgtgtttcaaaaattaatgaaaataagtgttaagggttctcgaggtcgatgatcacgaatccggactcagatcagcgctaccgttcatcacatgagctgtacatggacaaagaattgataggcttcctgtaccaataataccctcattggcaagatgcccatgaggataccatccatacaattttcgaattttatgcttcctgtaccaaggttaccctcgtgggtaagatgccaatgaggatatcatcctatatattttaaattttattattgttcgagt

SEQ ID NO: 3030 - DNA, 4652 bp, Heterodera glycines
gaactgtcgaaacggtggagggcggtggcctcgtcgtgctgctcatccaatcggtcacctcactgaaacagttgttcaccatgagcatggtacattaaaaagccaaaaaatcatacgaattttagttaaaaaaaaattgtcttggaatgtttcttttttctgagaattttaaaatttctatgattgaggggcatagaaagtgcccgactagaaattttttagaaaatccgggcacccataactctactaaaatcagaaaaattggagctaaatttttggactaaaaaatcatgttgctctgtttttcatgtcccttaaagtaaaatttggtgcacacttctgaacattatatgacgatttgtgggtgccaaaaaaatttttttttaatgccaacaaaatagcgccacaagggatttgtctgtccattatttatttattttgattgccatgcctttgcgcaggacgtgcacaaacgctaccggacggaggcgcacgcggacgttgtcgggcggttcaacgaacgcttcatcctttcgttggccagctgtgccaactgtgtggtgatggacgactgtctgaacgtgttgcccatttcctcctccgtcctcaacatggccaatttgccgcccgtcgtcgcccagcaaaaagtctgtcttattttatcttaccttgaaaatatgccgggttttgagaggagtcagtgccggttttttttttgccaggttttgagagtccgtgacaggttttttgccggctttttcaacacatgtgtcggatttttgggctttgagtcttacgtttcaaatatacccatttgcacttatagaattcaatggcggatttctgtccatcgattcctctagaattatccatagtaaaaaatattaaatcgcttcttttcatacataaaaaaggggggtgggtcggaaaattttttgcgaaggggggtcgggccgcccgatgacctttttttgtttttcaaaaaccgtttttttcggcgcaagtttttccaaaaaattttcgggaacaggggggccggcggtgccgttaggcgccgccggagaaaatttttaagttttgggtgtgctttgttaacagattttcaccaaaaattgccaattttttaagaaaaatttggattttggggtccggcggtgccgctaggtgccgccggagaaattttttttccgatttttaatgaatttgttaagaaaattttcaaaatttgcgagctgcgaaccctctcctcccacctcttttacacggaccccccccccctaaaaaatgtgcttctttttgcatcccttactaaattaggtaagtaagttcataacggcaatcaaacccaaaaaattcacagagtgccgcgggcggcgatgtgtcgtcggagttggcacggctccaacagtcgctggccgacacaaaacccatcggcccgttgctgcaccggtgccgcacactgtgccaggccaaggcgctgctccgcctactcgacctggtcaccgacaaaatgtccaactcaatgtgcgcaatcaccgcggcgcgtgggcgcggcaaatcagcggccatgggcctggcggttgcgggcgcggtcggctgcaatttgacgaatatttttgtgacgagtccaacaccggagaatgtgcgcacactgttcgaatttgtgttgcgcggctttgacgccatcggataccaagtgagttctttatttgttttttggcccagttttgggcgggggatggatgagataggcatccaaattgtttgaaaaaccttttaatttttatttgtaattagtgacaatttggtaggggtttcagtcttgcggcacgagggacatagaccacaggattttggagggattgtccggatttttttgtggccgatacgaatttttggatggtttttacgtacaagtcccaacccccattaaaacctgtacgggacaccctcgtttcagcgccgctcgtttcggcgccagcccagtttttggactataacttttttctttgtcaaccaaatctaacattattggtatcattcgaaagctctaagtgttctctattagcctgctaagtttcaaaaaatttcgttaatgctcaaaaaaattatgactagaagaattcaaaaaaccaggccacatgtgtacttttggccataactttgttcaaaattgatcaaattttttggaattatgcaaaataatagagcatcggaagggctctcgaatgataccaacaatgttagatttggtggaaaaagaaaaaagttatagtccaaaaactgggctggcgccgaaacgagcggcgccgaaacgatgtggacccgattttcatagcctcaaaaatttttttgagtttatgactttaattttgcaaattatttacataacgccaaaatgtcatggctaacaatgcgcgttaattcaaaaaaaaacatgaaaatgtctttcagcttcgggtctattatttttgcttcatctcaaaaattagtaatatttaaaagcttttgaaagaagagcaaatttttctcggagttttcagtgtcatatcatgtcgaaaaggttatggcgaatctttgaaaaatttccattgcttcaaagacatttggattgttttctctcaacgtacaatggacaaaataaaaacaaacatacatatttataaatgtattatttatctgcataaaacaaaaatgattcctaagagccgattcgatcgctttttctttgcccttccctctttttctcccatttctctcttttctaatggtgcgccggctcggcccaatgtccgccccaactcgtgtgcccgtacttcatcttggaatacacctcctccagcccgatgattaccaccgcaatgcaaaggccctctttgatgcccggcttgagcagctaaattggggagagaatggagaagcaaattttaagtggcgcaccggcatcaacggacgggaaaaaagaaaaaactatggcaaaaactctaaaaatgcttgaaattgaaaatttaatgggattctggatggtactaacagaatatgtgtgctttgtggttgtcaaattcccttcccctccccaaaaaaaattttttttcgaaattttgcacgagggcgccaggcccaattaggcacattgaattaaagcatgaaacaaagaattaagaaattcatacaccgtaattgcaaaaatatcttattaattagcctttaaatgatgttaattggcccttaaatgaccacttttccctcctctcccgtcgtgttataccttccacgcatagccaactttggtgtattgttttgtcacattcgagcacgggttgtccgggttgtacatccagtagatgttactgaacaaaaactacatttttttgttatttcaatttttgtcccataattccgaccaaagaatgctcaataatgtccatttaccgaatccacgggtccttgagacccatgcgctccaatcgtttggcatatgccaccaaatgaggactccgctgccaatcgttgtatatcgaccagtgcctaaaacaacaacaatttcgtggaatgccattgataaagcgaaaacaataccgatgaaacacaccattttcgattttttgaacccgttgcgcaaaattcgtttgctttttgaccaaatttgtgcccatcaaaaagaattggctcaatgccccgtgcccctccccgtagaaggggtaaaatttctaaacagacaagaaacccgaatctgaaaattgtttttcttttgaatacccgccaagccacggaaatcctaaatcattgggaatcaccaaaaatgaacaatttttcggaacactaccaatacgaaggccaatgtcttagaatcagttaaatgggtgacttacggcactttgaacggctccccgtgaccatgtctgggcaagtcctcctcatacattgtggacaattaatttgttgttgtttccgttgggtgttgctttctgtgattatcctttttttgcacaatgacaaattgtctaaaaatgttttaatggcgcaaaacatggaagtcgaaagaaagcattttttcgatagaaaataaaatgaaaataacaaaaagtgttaagcaaatcatgtttgtggaggtctttttattcagtttatcacaccaatcatcctttggagacaattttaataggaaaattcaattaaattatttgttttttccgaaaataatttatagttttgacatttggcagaatcgacacagtttgacacggcagttcggtgttttgtccccgcgcactttttcatcaatggcatccgccgacaccgcctgaattaaaaaaggcaattaaaaggccaattttccaaggaatgcaatttaaaaaactcaaattttttagtgttgggctgtgaaaattggaagccacgaaatatgttttttttagtcggatgacgctcaaaaacccaaatgtttctttcaatttttgtttttggcgttgggattcgtaagtaaaataatttttgtttatttatttttccatttttattatatgattggaaaaacagtcaccagctcgcgctatttgttcaacggaatgtatcaatttgtcggacaatttgcactgtttttggagttggcgcaatgcgtcaagtcggtgtaatcgccgcaatgaaagcgt

SEQ ID NO: 3031 - DNA, 2653 bp, Heterodera glycines
ggtttcactaagaaattgctcacatttgaaatttttcccccttcgttacaacccctcccccacgagacccccgccccctcctttacagccgcccccttaagaacgaggtaggagggggggatgggcacatcccttgttcacatatgattatgacccaaattttgcaatattccgaatgaaaaattcgaattatgatacacattttttaggagcccactttaaattaattcatccatcattatttggtcacctcgccgaagattgcgcgttgagtgcgtagccaatatttctaaaaatttatcgaaattcagtgaaacaaaaatcaaaaattttatttttttcacctggtgataatcctcagcctgatgaaactggtccaatttcttcaggtaagtctgcactcgtcctccgtattttgcgttcgctttttccattgccttctccgccgtttggtgctgcgattcgtccacctgcaaaaaagaaaaacgttgaatttttttttaattcaaaaaatgaaaaaaaaaaattttcattggaaattataataaaaaaacttaatggtaaaaaaacctccaagaaagttaaaattttcgtaaaaaacttttttcgtggggggggggtctgacgagttgccgccgcatttatttaccatacccaaaggatggccgaagcgtactgttttttatgccgttgagttgggtcgtggtggtcgaaaaaccaatccaaaattagctcataagagcaacaggaggggtcgaactggagttcggtgacctctaaaaacactaataactgatttgagtcgaaaatttataaataattaaataaaaattcacaatcagtaatattaaacggagggaccggtgtggtcgccgatgttggcataagttggcgccggggaagtgccacccgcgtagccgacccgcgtatgcagaacaccggccatgctggcaaaagacgactccacgccctaaaagcagcaacgaaattggtgccaaaaagatgggcaatttaatcacccagaagcattgcatgcctgaaaaggggtcaatgtttgattttgttgttgctatatcagccccaccccccaatttttgagaaagtacaaatttagaaatttttcaaaatcgtagcattttttataaaacaaaaaatggaaattttttcctagcgatttcaatatttttatggtgaattagtttttctaaaaattcgctgaaatttttttacatttttgaccatttaaatatatttttttggtggcacccattcatcactcaccaacataagctcgttgtagcatcggagaggtcacaattcgtgtaaacagctgaatatttaaatggcattaataaaaaaaaagtgtggaaaataagataaacggaataaatccgagtgattcaaataaacaattagcaaaagagagcgaatttatagtaaaattataaatttaaaattaatgttaacaataacaataaaaaagtgtgttccgttggtgccccatttttattagactgattgtgagaagagctgaagcatttcgcgctcaattggatgcaatttctcatcagtggccggcacaatgagcacatgcaatggcaaaccttcaacaacaaaaaaaaatcgttttattccctaaaacaaatctttaaatcaaaaaaagaaaattttgtctttattttggaagtgaggcaatgaattgggtatggtaaaaaaccaaagggtacgagataaatagcaatggcacataaaattgaaaattgtatgtaaatagaaaatgaaatgtcacaatcagccaaaaaacttacccaaatcggcggatgccatttgaccgaggggacagtgcaaaatctaaaataaaatttaaattcatagaaaacgacacaaaaaacaaaaaattgtgcaaatgctttgtgttcacccgctggtcggcccatccaacgcgtgccatgccaaccaccattgtgcgctcgtcgatgtcgacggcgttgtgccgctgggaacagcaatgttcgtcggcatcgttttcccttttttgttgttggtctttgctattgcacttgctccgttcagccgcagcactgagaatttgctgtgccgccattggacacgtcaaaaaatgagggggttcaaagatgcggttgcccctaaatattttccttttttcaaaaattttggtgacggatcgaacaaacaatttttcgcgacattttggcatgggaatttgtatcaaatattaaaaaaacgcttgaatctttcataaaaatgtgaatttcttggacaaaaatgcatgcgagtcacggcattgtgtggcttttgcgggtttccgtccaaaacaccgaacccaaaacaaatccgttgatgggactcattgaccggatttaaatttaaaaattgcatttttccccattgtcaaaaaacataaaatattatgttggagtacttgatcaaattttctgccgtttgttccttcactttgatatctgacaaaaaatatttacaattaattattgacgaatttttggtaacaaataaacaacgaaccgagcaggcaaagtgtgtgcattccattccgacgattcagcaaaatcctaaaaaaatattccaaaattgtaaaatggttgatttgcataatattgtaataatgtaacac

SEQ ID NO: 3032 - DNA, 2283 bp, Heterodera glycines
tgcgtctatgtacagcttcccaaaatgtttgactttttgtagagactcgatctgctcctgttgcatgctttccatctcctttttatggaattgttgctgctgctgaagcaacattaattgccggtactgatgttgctgctggtggtttttgacaaaaaaggctcgagaggctgttcgttggtgggctaagataattgtgataagaaaagaataaaggtgaccaaattgattgaccttgacgctattccttacctgcggaccaatgcgcaactccaatctggtgtcttttctttggtatagctttgaaccgacggttattctgtcgcattttttaaaaaataatttaataactaaataaacagcaaattaaataaattgaggaccaaaatgttgagtaaatgaggaaagtgggttatggatccatctgcgcagagaactgctaccaaatcgccattgcgtgacttaagtctttcaccacttcccgccttcttcactcagttggagcaaagatttatgtttgaatatttaaaaataatttaatgggcaatattccttggatggatcaaattttggcatcaatccttccttcgttttcttgtcatcgtttcatttgtgatgcagttaattcttgcacactcttcgcacatctcgaacccaaccgccactcttccattatccagccggcgtaccttctctttgttgtgaaatagtttgtcccagtcatctaaaaacatcaataaattgaagctaaaaatagtaatttttaacctgaacagagtcttatcgccaacatgaattgacccctcgtaattttccaaagaaaacggtcatcaactcgtggtttattagcttctttcaacccatcctcgggagtttcgtgttgtacaaattgttctgaggtttgatgatgttttgcaagactgatttgattgctcgtgaaaaattcggcttaaatacctttgcaaagtgggcgtggcctaattgtccgggagtataaaagaccctgcaatttgtcagctatgtctcattcgttctgctacaatggtcctcgtcatcgaattttgtgcccaaattctcggctgttccccgaaatcactccgcgataagctcaatcatcctgaggaccgagtgaaggcactgaaggagctggtcggaaaaaaggttcggacgacataccaggaccggaatggaatgcagaaaacattttttgtcgacggaatatcggaccatggagcggctttgaccccagcatacggcagactcagacaaccgtacaacattaacattgctgcccatttctacgctcgccaccgtatcaagctgcatttcccatacgtgccgtgtgttgtggagaaatactccgggtgtggcgaagacagatactacccaatggagctactcgaaattgtggatgaagactacaccaacaaagagcgatggcttggcaaattgtttaccgaaattgaggacgacttcattcctgtcaaacgccgtggtcgagttgacgaaaacgaagaaattgacgctggtcgttttgaatgcagtcaaccgtcttacgtttattggtaaacacatgtatgttaccttaattatgcacttttctacctaaaaacgacaaattcgtttttaagtttatacaaattgcaacttccgctccttaataatttacaaattgtgtcttctttctcttaattctgcacttttctacctaaaaatgacattcccaaatgcttaataatttacaaattgtaacttccattgcttaattctgcatgcatgttaatgtccttaattatgcacttttctacctaaaaatgacaagttcgtgcacataataaaaattgtatcttccactctttaataatttacaaattgtaacttctttctcttaattctgcatttttctacctaaaaatgacgttcccaaatgcttaataatttacaaattgtgtcttccattgcttaattctgcatgtatttttattaaaaacgcaaataaaatgacaaaattacacaatttttggtataaaacatgaaaaacaaaggtggtacatgcgtgtgtacgtgtgtatggggtgtgtgtgtgtgagagggatacaatgaatgataaacgataaatttacaaagtgtgtccaaaattgagaacatcataattagggcccactatccctttgcctacatatgggcgataacatttttggagggggcctgaagtgacgtgtccgccacccctaatgtccggtctcaaaaagattgggaacatgacatttatagactcatact

SEQ ID NO: 3033 - DNA, 5537 bp, Heterodera glycines
cttaattatttacaattgtaacttctttctcttaattctgcacttttctacctaaaaatgacgttcccaaatgcttaataattttcaaattttatcttccgttgcttaattctgcatgcatgttaatgtccttaattatgcacttttctacctaaaaatgacaagttcgtgcacataataaaaattgtatcttccactccttaataatttacaaattgtaacttctttctcttaattctgcatttttctacctaaaaatgacattcccaattgcttaataatttacaaattgtgtcttccattgcttaattatgcatgaatttttattaaaaacgcaaataaaatgacaaaattacacaatttgaggtataaaatagagaaaataaagtgggtacatgtgtgggtacgtgtgtgtgtgtgtgtgtgtgtgtgtgtgtgtgagagatacaatgaatggtgaacaaaaacataacaattacaaagtgtgtccaaaattaagaacatcataattagggcccactatccctttgcctacatacggacggtaacatttttggagggggcctgaagtgacgtgtccgccacccctaatgtcaggtctcaagaagtttgggtaaatcacatttattggttcatattctcctgtttgtgcataccgcaacacctcttctttgaatgtgtcgtagcagagggattggttctgcatcacgtcgtagttgagtgtgatgcccctcagcttcagcacaaattcttcctgtccattacgccgaagtttaagcccatactgaaatcataaattgcaattatgaatcattaaaaggataaatttacctgcttcgctccgccactacagtactccacaatctcatggttaggatactcatcggtgaattgtcccaagtgtggccctgtctccagcggattcaagccgattgggtggacaaaaatcagcgagtcggtgtccgtgtacaacagtcggcatccaggtgttctcatcaccttctgcatcgctttcaaaagtagaaggcgggcctttgatgttgtccagagtgagatgactgaaaaatcccaaaaaattatacaaaaattctttaaaagtctcaccagtgttggagcactcgtgctcctccacccactccttcttctggacgtaactgatcaaaatatggtctgcatccaactcgtcgatggaagtgacgtcaactgagcggttgtccaagtattcggccagcaccacaggatcgtcggtgatcagcgtttgcgcgaggccaaagtttcgcaatgagaagcggccccacaagttgttaagacatagtttggccaacgaccgcttgcccttgttgactttcatgttgtctttgtcgattgaaatgccgaatttttcagcacactctctgatgaactgctgctccaactctgtatttcccttgatgctggcgtcaaacccgctcgcttcaattttctgcgacatgaactcggcgatgtagggcctaaacagtttgtcgtcgccatgcttgtacttcaacagtcggaacactttggtcacacggtagccctcttcaagcgcagcatccaattcaatggatgtacatgttgtgacccatccgcgttgttggtcgtcgtgttcacattggtagtcaaaatccacgcctccctttgggtagtcaagagcacactgcatacaaagcgggaagcagagtcgttcgttgactttaaccggcaacactggcacatcgcacttccgtggcgggatcacccacaccttgagcagagacaatttgtatgggttgtcccgtgcagttgtccattccacattttcattcaagatgagcacttttggatgctcaattggataagtggtggagaaactgaaaataaaaaaatttaatgtgggaaaattagtgttgtataacaactcacttgacatacgggtagagggaagtgaagtcaaagtacgagattttttctccctctcccgccttgtggtacagcttcagcggcccagttcttccgcccatgaacgcctcgcgaatgtccaatggcccgtcatccacgtaatcagcaaaactttcgcgcatgtccgggtcacggtgcagcattctttcaatttgacactcccagtacacgtccacacgagaaacttggctttcgatgaattccagccgcttctggtcccgctcccgcacctctccagccgtctttccgttcggcattagcatgttgtcactggggaagcattccttgcagccgtgccatacacatccgttgacttcgattgctcttctttcttcctccacccagccatccacggaatattggccaattttcttctctccgcctgccgaatgcgccgtctgcaccacaacaccatgctcctccgcataccaatgaaagaagcgaagtgccagcaacgactggttttgggcgttgtcgtagccgcgttccgggacgatagccaaatgcttcttcggcagatggttggtgcgaaaatgcttcatacatgcgccggcgatcgtcatgcactccctaagcacatcaatgccgtcgtgatgctcatagaaggccgcacgctccgcaacgattccttcattccgtttcgtcacatccaggaactcatgacgaaaagctaccagcgcagccatcagtatctcaacgtcgtttgtgcagtagcttgtcaatgcttcgtcgaggaaaaatggctcctgacggtgttgttcataccactcgtcgaatttttgtcgtttatctggcatcattccgctgaccaaatagtcgtccggcattgggtggatctgctttccgtagttgtccgggtggttggccatgtgcgggaagaacggcttgtcctccacgtccaagccaaatgatgggaccaaagaagcgagggacattggcataaggttgaaggagtcgcggaacacaatgttggggttgcgctttttctgccttcgaatccgcatttcgtacattttattccccttaaaattgaaaattattcaaatttgaaaaatagtcaattattactttgcgcaacatgtccgggttatatccgcgtttgaacaattcgcggaacaccagcaccatatcgaaccgaccgccaaagtgagagaaggcataggtgtcgtaggcgagcggtaagtcgtttatcaaccagctgacaagcgcttccaaagggttttccgccaccacttgcttgtcgactgttgtttcggtgaagcggcgctggcagaacgcgaccgtacgattaggaccgcacacttcacaccctcccgatgcctctcgccagctctcattttcaatgcagtcggggcaggcgacacgcgcagcgataaagttgggcaaatgttcacgcttttcgggcttttcagatggcatgtgctgcatagtctccaagtcaaatgccacaattcgataggggtcgcgttccttgggctcgatgggttggatgtagcatccccgctcggtgttgtggtagttgttgcacatcttacagaagcgttcaccacaaacatgcccttttctgccatttctgttgttaaccgctacgtcccaaacagcaccacaatccttgcattttttcgaccgcttgcagtagcctgactgcagatgatgctggtagcagccgttgttggtgaattttttgttgcattctttacactttttgatgaatccatccgttggctgacacggaaacagcggtccaacacgtgagcatagcacacagcgcgctttacatgttttgctgtgctctgacattcttcggtacgggcgctcacactccagacaataaggcctgccgaacaaaccgccctgcttctgcacaccatcgaaatggtcctcattgaagtacaacagcagcggagtgtcgtaagtggtgtcaatgtacttgtagatcggtttatactgtcccaacgatccaaagatgaacacagcaaagcggtgttgtcgctgcgcgttgttccagtagtcaacgacgtgaggcacaaaagtgttcgcgtcgtagccatccaagtccattggtgcattaacctgctgcatgagctcaaccgcatcatgataaagttgtccctgttgtccttttctgtcgttcacatagtcgaaaaacttccagcgaggccaattgcatgttttggcgaccattgttgcctgcagtgcgtagaaaaggcagaagtgattgtcgttattgcggattttgatcaggcattggtcattaattcggtggtgaacggccgttttgacagggcgacgagctcccccgttgactcgacgtttggatggtagtccattacggtccagagtcgtgatggtgacggtaaacggctcaccccataacgatacatttttctgttgtttggactgcgccacttttttgaactggttgagaatggtgtcgagagtgttgtttgtcatttgtcgtatcgggattgggatatctccgccttccagcagaggactgctgatcatacagccgaggtgtgtaggttcgatgtttcgctcacggctttcaacaattgcttcgtcgatgcagtgttggaaaatcccagccaacaatgcctcaggcgtgctcggcaaatccgtaatggtgaactttgacttgactttgacgtaatggaatttggccatgtgctcgatgttgttctccaattttttaacgtagtctttgactacattcgatgttccatcggcttgttgaactgattcatggaaatggaatacgccaagttcattgatcaggaagccttgacggggctttttgggcgcggagagaatatggtcaatggaaaagttagtgaagcgctttcggggatgattgtccatatttttaaatctgtgcagggattgaggaggagtgaacaaaatttcggtatttatatgcgcacgtcagcatggaaaatgttgtgaagaagaaatgatggtgaatgatggaagatgaagaaacattgggcatggataggcacatcataatatgttaaaacatacaacttgctgccaggataaacggagcttttttaattaaatctaccgccctggttaacagcaaaaatattaataattttaataaaatttaattatactgtccccaaaattcccaattaaataatacggcccccataaagcacaagacaagtgagaggaggagagagaaacagcagatgtgcaaaaaaaaaagatgaaaatttttaaaatgaatcgggaaaatgaccgggtgtaggatatgtgcactttggccacgcccacttttgggtcaaaattattcctagcaagaaatcgaaatcattctttattcaaattctagaaaatgaaacgcaccaatttcaacaatgctcttccaatgagtgagaaaaagcccaaacttcgtcgacgcctgccggctgaattgaacagcgagctgatcagtttcgtgcctttgatctgcctatttgccaatgtgaagcggactccaattggtcctgtgtgctaccaattcgagtgttttcgtagtcgacgccaaaagaattttgaatatttggtaatttcccctttttttattttattac

SEQ ID NO: 3034 - DNA, 3733 bp, Heterodera glycines
gagtaaggaggaatgagcaaaatctcgatatttacattcgcacgacagcatggaaaatggcgtaaaatggtgaatgaataataaatatttgggcatggaaaatagtcaaaaaaacataaacaaactatggcctgaagagcagcacaccgccacccatgaagcacaagacgacagggcacctaaacgactcgtgaaattagtcaagtcaagagaacgacctcaagccctaaaaggaaattgctgccaggataaacggagctttgtgtaattaaagctaccgccctggttaacagcaaaaatattaatttaattatacggtccccaaaatccccaattaaataatacggtccccataaagtaaagaaaaatgagtagaggaggagagagaaacagcagatgtgcaaaaaaagataaaatttttaaaatgaatcgggaaaatgaccgggtgtacgttacgcgtacttaggccacgcccacttgcgcaccaaaattattcccaacaagaaatcgaaatcattctttattcaaattttggaaaatgaaacgccctaatcctttgaaccttccaatgagtgagaaaaagcccaaacttcgtcgacgcctgccggctgaattgaacaacgaattggtcagctttattccattggtctgcctttttgccaatgtgaagcgggctccaattggtcctgtttgttaccaattcgagtgtttccgtagtcaacgccaaaagtgctttgaatatttggtattttcaccatttttattttattacataaattatttatagaagggtgttattgcattattcgatgtgatgtttgaggagaaaaggacaccgaagaagaagaaagtggggagactgcttctacaggaagaactgccgcatgacctcagccgaaatgagctcctgcactacctgtgctacggacgactgggaacgaatttgttcgagacttattttgtgatgacccatgcaacaaatgtaagcgaaaagttttaaatttttaataacaacacaaaatttttagtcaattgccattgggaatttgtttgggcttctgctcgattttgcaatgagctcaccaactccttggctcatgaagcgacccatttgctgtggaattttcttccgacaacatttgccgtggattctgcaacaaccgatgaacgtaatgctttctcatggcttttttccggaggtccgaagtgatggttttgaatttttttggctgttcaacccacacttgaaaaagtatgctgggtatgtcagaattctccctgagcttagtcagcctgacaatttgcattttttccttagcattttctaagcattttacttgaccaatttattcatcattatcattacatacagatcggaatttgtcgatttttccattttctcaataaattgttgaaatgaatgaccttgtgacatatgatacacaaaaacaatacagtgtggggcacatgttgacactaattgggattgataggaacgaatattttttcttaggcccatcggaaacttattcaggaatgatgacacaatgacagatgggattttttgggctaagctgtcataataaatcactggttcttccattcccttcgcataaattgcacaccaatgagaccctcccttgtaatgtgggtcccggttaacaattagagctgcgggatactgtagagtgaccggaggcggtaattgatcactggcgaagcagccccgaaaaagctcgtgcggtcccccggttttcgttcaagattgatgtgatttgcacgctgtccattcttcagccaaaaaatagagcaaagttgatggagaaccaggctgacaataagcatcaagtacaatgcgaacaccgcccagcaaacggcttgttggaataaatttccctcttctggtcggtctttgcacaattggatgagtggcgtgagaccagctgacacttgctcttcaattaacttgtcactttttgggggagaggaggtggtggttgttgttggtgtgattgtagacggaatcgttgttgtggttgtggatgtaagcattgcctttcttcttatatattcagaatactcaggaatttcttctctacatgacactacgggaagagaaatccgaagaaggaataaaataacgccaacttttttggaatacatgtttattattgtaaaaaatgaaaacaaaagtgccttaaatagtgatgtcagtgctgatcgatcgatttttatccaacatcaccagcgagtcgcactcgcccatcaccaccaacattattcctccagctggcaccgcctgattaaatttgatgctcaccgctgtcgtcccgttctttatcaaatcaaaaagcgccgcttggtcgtccccgctgcttgtcaagttgaacacgtaaatgcaatgtgtagtaccgaattgtgcgagagtaatcccgttgctttccgatgagttggcgaatcccaccgcttcgttcatgtcgttgaagggacgcacatactttccgtttgggtagtccaagtcgtaggctgcttgagggtaggagcgcccattggcaattatagaaatttcacgcacattaaatggctgaaagttgaaggggctgcgtgaaactgtgccaacatagtcagcattggccaccaatcccattgtgatacgccggggaatttgatccatgaacaaattagacgtaaattcaaaacgcccatgactgatgaacagcgacttcatcagcgttttcctcactgcatatcgtgccggcttcaactcaagctttcgcgcaatgtccaacgccaatccgtccatcagggacaccttcttcacatacattttcaaaccgacaacttcgaaatggtagcgagtggctgcagcaacaccgggtggtgtgattaggacaaagtcgttgtcgttgggcaaaatttcaatgtccagctcacaaaagttgatcaagtagagaggctggttaaacaaatcggcgtcaattttggcaatgaattgtgctgttctgctgcctacaaacaggttgcgtcgtgcagtgcatccgtctcccacctcaagcacaccaccagtgtcacgatagtaaccggcagcattcaaatgcgagtccttggccgctgttgaataggagagttcgtgtgaaaaatacgatttataggccatcagagaatttgcgttgaacacttcacggccattgatgctcattttgatgttacggatgaatgtgtgtccaatcagttgaatcggagcaacctcatcagctgcaaggtcaaccagttgaccatttgcattttctttgcgaattcgaaactcggataacaaatagcatttggagagatcaatataattttgactggagtgaagcttgaagtggtagggggtgtcggtcagagggttacttgggagcagttcaaacactttggaggatgagacgctgacgttggttggcgggatgcggaaaaagtccaaggcgttggtgatggagttcacactgtcattgtcaattttatggaatgccatttagtaaagtccaaatgcgtcggatcgaacacgttttcttgctggtttgctgattgttcggccaattattgtatggtgacttggtgcatgttttcttcttctttttatacccattcttccaccactgccaaactgttttggtaggcctcccttctccaatacggtatcaattccttttcttcccttcgctttaccagtgcctcccttaagtggcattcc

SEQ ID NO: 3035 - DNA, 2116 bp, Heterodera glycines
taaatttttatgccaaccggcggttgcggtggctctctccaggggtgccctggaaataagcccgtgtgctgcaaatggggcgccttttgcatgacggcaaatgattgtgccattttgcatcggcgcatgcgaaagtgacgacggaggagggcacaaaatgtgaacaaatagacagagaagaaagacacaggaattgtgaaaagaaaaagcttaacttttgacattcctaattctcataattagttaaattgtgattcaattttggataaaaaaaaaccccaaaaaataagtaaaatacgggtgaaattttcatgtttttagattccatgttatgtgacaaattttggggtttcttctttattttttaatcagcaccaaaatttaagccttttttgaattttttcagatttattatgtcaaaaatttactgaaattttgtcccagttattattcacaagctaattgttttggggaagcatttaaaattttttttactcaatttgtggaaatatgaaaaaaatatatattttgaaacttggttggccataaaggcttatttattgtaaaatttttcgtttgttccttatttttcgtttttatgtttgtcgattattttcccttcattattcaacaccgccggacctaacatttttttaaacttaaccgaaatttactaaaatttgatggataatttcacaatctaaaaattgcaaattttgccggagataattaacattagcaccgcctgaatacgaatatatttttaaatttaaattgtgccaattctccaatttactcattgacaaattactcgggtcttatagggcttccagttatatagctgctgaaaacttgaaattatagcttaaaaacctcgcttaaaacagtttattcatacatttctgactgaatatacaaacgtaatatttataaataatgtaaaattatttaaaaattatacaatcatgaacaaaatcaataaaacgtcaggcatttgccagttttaaaatcgaataaaaagcatatgatgatgacattgtcaattgtacacgttgaaaggggccacgtttgacaaggcgaagagaaaatttaattttgaatgcataaaaattattataataataccgtatatactctttttatatgccagtctccattaatctgccggcctccaattatatacccccttctgaggaggttgaaaaataatataccagtctccatttatgtgccaggggggataaatagaattttttaaatattttttggcacattttcaaaaaaaaattaaactcaattcaacagtaaaaggtgctaataaaagaacaattctttcccatctccgactccatccagccctgcatcatcatcagagtagggtcgctacttttagtgacggaaaatctcgaaatagttaactaaaaaaaaaaattctgggaagaatttttaagaaaattttccaattcttaggggtgcattttttgaaaaaatgttggtaatactttggtttgtcccccctatttttcaaaaaaaattttaaaattttaaaatcgcttaaaacatctctcctggggttttggggccgctgatcacgaatccggcatccgtttcgacccatttcgaaccccggacccaaattcgaacaaaaatcgaaaatttatttttcaccaaaattcacatttatctctcaaaatcaattcaaatgcacgaaattagggttgcaaccccgaccccgccccgaccccgaaccccgacatttttggccattttcggggaaaaccccgatcccgaaccccgacgcttcataccccgacaaccccgaaccccgacccttaaccccgatcggggtcggggttaaatcagggcgcgtatcgaaaatttttcaaaataagaacatcaaggccaaaaaataagattttagggtcaaaaataagaacatttcgcaaaattgcttcaaatcagttatttttacaatttattcgatcaaaaatgtatcaaatagtatatttttgtctcccattaacgattttaacaatgtttgggaggaaattagcaaatcataaaattttagtgcaaaggggataaaaaaaaatcagatttttaacaattttttgcg

SEQ ID NO: 3036 - DNA, 1850 bp, Heterodera glycines
aacacataaaaattcatagcgtggctcaaattaaaccaaattaatttttcttggtatcattcaatagctttaattgtcctatatcagaatatgatttttcaaaattttttaaaataagtataaaaaaaattattgtcataacatttcaaaaatcttatgtcagcattttttgttcagaacttttttaaaactcaatgaaattttctaaaattttaaaggtaaatagagaattcttagggctatcgaatatataaattaaattagctcaattgcattttaaagactttaaatgtttattattattagggatgatatttttggcgctaaaaactgccaaaataggtaggctttaggctctaaaaaccccaaaaataggctccaaaaaatggaaaataggcactaaaaaccttcatttttaggggtgtaaaatgacaaaatttattcaaaaaagtaaaaaaattaggccaatcaaaattcaaatgaggccaacttagaaagcactgaagatgagtaaatgaataacagaaaaatgcaaataaataatcattagtgccagatttgggttaagtttaaaaattaattttgaaaccaattttaggcattcggaaagatttcaagaagctacacatcggtaatttgaaacttttttatgcatctttatagcaatatttataatataaaagatgaaaatttgactccacgccgtctcaagccgaaacaaggagcagtatttaaaaacaaaacgccaaagcggggaaaagcagtggagaaaggtgtcaaggaattgcatgtgagcgaaagtgcgaaggtgtgaaacgacaaaaggacgagaaagtttagaagaaagttgaacgaaaagtttttttcatcgatgcccctccccaagttccatggttagccgaaaccatccggtttttagggtccaaaatccgacattttccgaatcgaaatccgacccgagcattctgaggtgacctaaaacacgacctaactttttttttctcaaccctagccaacagaacctaagcatggcaatgccgccaaccttggaaaaatgacacgacactcttaaaaagtgaaatgttatgtctattgttttcaattgccttttcctctttgggctttatcagaaagtgcgagaacaggctttgtaactgagaatgaccgcggaaacaaaaaaaaacgagaaattttcaaaaaccaaggctctttctcgcacaccccctaaagaaatttcctatctccactccatctgtcactatttttcttgttgaaattcttttgtaaaactctgttatgtaaggggataaagtgtgattctatcagaaggatatttcttatttatttaaatgtaagtcataattagtgtccagatttatatggacaaaaaaatccaaaattttaattataatatggacgaaaaaaagcaaaatctttaggggtgtatttttagattttctagtgaaaatgccaaaatatgggtgtaaaatatggacaaaaatctggatggaaataaaaaggcatcctagagcaataaaccaagctaaaaatactatttacgagtttttaggccgaaataagtgtgcaaaaaaatggaaacccatacaaatccgggctctagtcataagcaaaaaaaaaggaacaacacaaaaatggccaaagcattattcatttaagttaatccaacacatttatttttcatgttctcatcccatttctgtcgatcagtcgcattccgggtgcccacagcacataatcttggattttgaaaaaattaaaatttgacacagttcggtgaaaatgctttttctcactagaaaatttgatgagaaaaaatctcaggtactttt

SEQ ID NO: 3037 - DNA, 7753 bp, Heterodera glycines
  unsure (1)..(7753): unsure at all n locations
tttcgtccccctttccccattgntcatgccttttcctcaccctatttggcatgtcgctaaagtaccgctggtaaacggcaatcacaacatcggccgtaaccaaagtagaaagaatggaagcacggacccaattgaattgcatttcgctccaattaatgttgacattggcaatatgcgcagaaagtagagtgtaactgaacttagaatcaatgaaaatgaatatgaatcatgctttttcaaattattttaaaaagattcaatttaactctcttttcttncncacacccaaagagagggttcaatctcattattggcgtcaaaaatcggctcaacagaaacatttaaatattaaaatagagcaaataattttaaaatttaatcatgggcttagcgcttaggaaggaaaattgtgaagggcggggagaggaggacaagctgcttcaatcaattttggcatttctttcgttagtttttccaatttaaaaaattacagtatgcctataatacatataactcacacagtatgccctgccgcggaagcatcgcgcaacgccgcgctgtccgcggcacgcgttgcacataaattgaaaggaaatctggccaatggtcccgcgggcggtgttcacgtcatggaatgtcacctgtgataaaaaaatgtctttttgaaaaaatttatttcccaaaaagtgctgtgagtttcaaaaaagttctggacaacctacttaaagttttttggaatttaatagccataactttttttatactatctcaaaaaattttggatactaatattctggaagacaacacctagaactattgaatgatagcatgaaatatctgatttggttgaatttgggccatattatgagccccgacatttgcgcctatctccaaacccgaattcaaagtttagccgaacagcattaaaattaagaaaacacagtcttctaatttattaggtgcattattctgctgtttgaataattgatgatttttcaaaaaatttattaactataaaattatcagacttaagcaatcacttataaaatgctgtttaggcgatcagggattgaaaaaacttatgtttgaagccgatttggacaaaggcgcgcaaatgttgggcgagtgtccgggagaggaaaacgtttacccccctccccccccgttcacttaccatattgctttgcgcacaagcactgatcaccatcccggcataatgcgagatcatcgacgaagaagacgacggaacggccatccctgaagcggcacaattctgctgctgttgctggggccccacagtgccaaaagtgttacgcgggacaattccgtgtttagtctgaagcaaagggcatagccaatatcttggcttcaggggcggggcgactgacgactttttttttaaaatttaaattcgctatttttggggtggagtgggagggattaaagggagaggaagcgcagagaaattttagaaaatttaggcatattcgctaactgaggaccattttcgtaggtttttgggccgaaatttaaaatttaaggaatttgggggtgtgccgcggcgccgacagacggcccgtcggaggatttttgtaattttttatgagatttgttaatgtaaattttcatcccgttttttaatttaaaaaaatatacaggtttcgagggggggggggaaagctcataaaaataattcaccatttcccttggttaattattcggattaaatcaacaagcggcactttttacactttcattagcttcacataattaattaaggattaattattaatttaatggtaatattcctacttctggctccaaaatcacaatgtcgtcttcctccgcttctcctccaaatccgtcgtcgtcgtccatttgcgttccgccgccgtttggtctgtctccgccatcgccattcggtgcgcgacgctgttctcctcctgcgccattagtccttcgtttgttgtagctttgatctgccaaagatgagccgacttaaaaatgatggcaaaagtaatcgatagaatcatagaaatttatttataaagaattgaaagaaaccatataaatttaagacattaattaaatatttccatcgttttttgtgaaatattcccataaggttttaaaaatattaaaaaaagaatataatttttcaaattttttccatgcgtaattttagagatttgaaataaaatttgtcagttattctaaaaaatattttcttttctctatgactcgcattaaagaaaactcattttaaattgtccatttgtttatccataaatatacagtatcattgacgctttttcgggtcacaaaacaaattgtgcatcaaggatggcattgattccgatttccatttccagaattttaggggccttagatgccacccctagtgtctaccccttgcttttttgtaccttccattttcaccggatgtccgtgcctgcgcaacttcggaatttgcacattgccatttggttgctgctgagcagtggcagcgtttgtgggtttggtgcggtgacggccactcaaaagctttttgggaaaattatttttcgctacaaaagttttatgttagaaaaaatgttcaaaagaattttgaaatatataaattaaaaagggagaagaattgaccaaaaatttaggaaaagaaatgctaaaaaaaatttaaatctcacaaagtttagtggcagaaaagaatgttccggcaaattccaaactatcatattttcaggtcccaaattataaaaatcttaaaaaggcggtcgttactcccttcctctcatttatgtcccgaatcccgggccaaaaatttttgctgtgtaagaattattgctagggaccggtgatttgattttgatcaattcgtcaaaagacggaatgcccaaatgtgatcagtttcaaatgtaaaagaagcgctgagagtattacgttttgatggccaatcggcggcacggcggcaatggaatgggctcgtccttttttggcagtgtcaaccgacgtcggcggcactacgccaaccttacggggacggccccgtttgactgcgcgggtggcgatgctgtcaaacagaaagatgatatgtttatgaagcaaaaaatgaatcaaattgcattgtgaatgggcgtaaaaaaagattaattagtaggattataaattatatggactaaaaaacaccaaattgaacaaaaatatggactaaaaagcccgaaaatatagtaaaatatggactaaaaactgtcaaaatatatcttttaaaccataaaaaattccgaaaaggtgattatattcaatatttgcttaaacagaactaaaaatacgtttaaaaactgccaaaaatggatttaaccttaaaaataccaatttttattaaattctagcttcacaattgcaaacaaaacacatttcaaaattttttaataatctcattctgttgtcagcgaaaattttcggaaacgaacaaaatacctaaaaaaaatttccaaatttcgaaaaaaattctctttttagaagtaaatattgactaaaaacgcaaaatgtcgaaacatggatttattcgcgaaaacccccaatatatatatatatttatatggtcgaagtttctccaaatcaaaaatttttaacgcagaaatgttatttttgagcccctttctttatagcatatgcgcagaaaaaatatgtttaatccatataatttataaccatagtaattaacaattaaaaaagcatgaattccatgaaattatttaaggtattttgctagaacctaaattggaatttggttttttaaattttcgcataaaattggaaaatggcaccaattgtggatttaaaagaaaattagaaaagaaaagaactctctaacaaatgaaaaatatttttttttgtaatatttttccaaattaaaacttacgggcacttcgccatattcttcggcttgaccaatttgctgctgctctcccctttgtgtgccttgcctttgtgaagtgccaccccgcgtggagagatgaattttcggttacaaatgtcgcaaaatgacagtgatgagcaaaaattggcgggggcagagagaacggagcggcgacaattattttgatgtaattccaactgattttttgaaaaaagtgaaattattaatttcttaaaaatctgtccttttgggcaattagggaaagatattgcataattaagcttttgaaatgtaattgttcaatgtcactttttaaccccagggttttctcgttttctcagatggaaattgaggaaaggaaaggaagataaaaacaaaataatttgtttttgtaaaaaaaaatattgaaaaaagagaaggttttttcgcaatggttcaatccccgacggagaagcagcaaactttcttattttctttttcaatgcaagtaaaacctttgttattttctcttaatttgatgctacaaactctttttgaatcagaaatcattaaaatataatattttaaaattaaagccacaaacattggctaaaaaattcttacttattaaaattgacaataaaaaaacaaacaatcaaataaaattaatgggggccataaatcttacaaaaacaaaacaaattagtgaagaatttcagaccaaaaaccctcaaaattaatttttcaacaaagcccaccatttcatccgacttgaaattgatgttgcaatttgcgcatttgaatgtgtccttttgttttttgttggccttttgtttgccgccatcggtgccgttgttgcgcacataaaacaccgccgacgatgagtcggagtcgtccggcgcgtcgtcgacgaacgtttcggaggcgaccaaaggcgaagaagtgtcatgacgggtggatgagtgggaagtgccaatgccattgacagcagtgccaagggtttgagtgccattgctgggagatggagaagggatgtcgacaattgaggacgattccgacagcattgaatttacgaacgacgataaaacagggccaaatgatgacatttagaacacgaatgttatgccggattaaataattatcagctttaattttaaaatgctaaaataataaaacttaagaaaatggacaaaaccattatgaaaagtttgtttaaaattgaaatgatattggaatcagaaaaaaatgaagaggggaagctttttctaagtaaattctaatccatatgtatcaggaaaaaaaaaagttaggagtagggtcgcgacttatagtgacgaaaaatcttgaaatagttaactaaaatagtgataaaaaaatatcaaaaaagtgccaaaatagtggcaaaaggtgcgaaatagtgacgaattgtgacataatttttcagccaaaaattaagcaaaaataatttttattcactagttgctgttgaaaatgagtaggactgggtttttaagggcaaaaaacccaaaataggcacctaaaaaataatttttaaattataaattcttgccaagaaatgaatttttgagaaaattttttcatttcttaggagtgaattttgaaaatttttaggtcgattcttaggggtgtattttttggttttactgtaatgtcgaaaaaatgaaaaaaatagtgacaaagcgccaaaatagtgatttctagtgacgaaaaatgccgttcaaatgaaaaattttgaattttttttagtaaacaaaatgattttttttaatttgaattaaattattatttatatatatttttctatcggtatgaaaatttgaagcaaaagaaatgtacttttctttctcattctctctattagtttgacttagctcattattttgtgtttaccgtagaccatttactaagtacagtatgcctaagctgatcatgtaggccccgcccactttaagtctttagctgccctccagcacattgtactctttcactctttcgagaggggggaattggctaatcccgaactcttccaattccccctctccccctatttgccccggacgaatcggttcacccttccccagctaatcacacatattacacattatatatttgtattgatcaaccttccgaataaaggatattattccatcccactcgtgtaattatggggaggggctaagcaacgaatgccaaagggcatccgacatattcaagttcatctaaaaatgccaaatatgcacataaaatatgcactaaaaatcccccaaatatgccctaaaacccaaaaaatgcccaaatatgcattaaaaattatccaaaatggcttctaacccagggtttctatctgaaaattttcaaaataagaacatcaaggccaaaaaataagattttagggtcaaaaataagaacattttgcaaaattgcttcaaatcactatttttacaaattattcgatcaaaaatatattcaattaatatatttttagtctcctattatcgattttaacattttttgggaggaaattagcaaatcgtaaattttagtgcattcgggatcaaaaaatcagatttttaacaatttttttgcggcgcatttttccaacaaacttttagtgaatgggcgaggggagagggtccggcggtgccgatttgcgccgccgggaaaattttttgaaaatttgaatactattaacaaattttggccaaaaattaccacaatttgcgatatttttaagaaaaaataggagtttttgaggggtcggcggtggcgataggcgccgcggatgaaaattttaagaatttttaatgaattttgttcgaaattatccaaatttttaagaaatttctctcttttagatgaaaataaggcattacccccaaatcagaacattcttagaaataagaacatataaaaaccctgttctaaccatcaaaaaaatgccaaaagttgtgtaaaaatacagaaaattttgattttctaaattatatataactagggttataaattatatggactaaaaaacgccaaatatggacatcttaaaaatacgctaaaaactgccaaaaatggatctaacatttaaaaatgccaatttttattaaattctagcttcacaattgcaaatcaaatacatctcaaaatttttgtattcctcttattcagtttcagcgaaaattttcggaagcggacaaatatttaaaaaaaaaatccaaaatttcgaaaaaattctctttttaggggtgtattttttaaaaattttcaaaaaagtcgatttttatgggtgtatttttcattatttttgcatttttcttgtgaaaatttgccaaaaatggccaaaatatggactaaaaatgcaaaaatgccgaaatatggatttatatggactaaaaactttcaccaaatcaaaaatttttaacgcagaaatgttatttttgagcccctttcttcatagcatatgcgcagaaaaaatatgtttattcaatataatttataaccctatatataacaatttcgaattttttaaattattatcatgtgctaaacaaaattacatttttcttataccctattcatctctcacactttgggacggtcaaagtgaaagaaaaagaaaattttaaatttatatccaagaaaaaagaacaaattgaatcaatttttaaattctcaaaaaataaaatgcaaaagacggataaattaattgattatgcgaatgtgatggttagtagtgacccctgtacttttgtcgccccttttggcgctaaattcaaatttgaattttcgcgtcgatactctgtgggtggagggacgcttgctgggggttgggccataggg

SEQ ID NO: 3038 - DNA, 9130 bp, Heterodera glycines
  unsure (1)..(9130): unsure at all n locations
atttttggatctaatccgaaaactgatttttnttttattataacataaaattttatgagtgatttatttttaagacatacaaaattagatttattattttttgaaaaaattaatcctctaaatttaaaagttttgtatntaatttcaattcaaaaaaaaattttcttttttcataatacggtacttctgcttgaaattaaatggaattgaggggtcgccaatgccaacaggcgccgctagtgaaaattttttggaattagctgaaagtgtatgaaaaatgattcgttaacactcaaaactaaatgctttattgtataaaaatttttaaaaaaatgaaagtgggtgtgtgattgattgtatgggcttattaatcgttcaatttgcgctttgtccctttttttcttccactgcaaaatcaatgactaatgtgactttgtcctcattttggtcatacactcctattgctactttaatttgaatttttttttataactttttgaattttttaaaattttttagtcaaaaatttttcttaaaaaaattaaatcgatttagcaacatagcgagcgatctttaaatattaatggattttatttttaaaattaaaaaaacataattttgccagacaatcgctttgtgcagcaggacagcacacggcaaatgatgcgcaaccggcgggaatgggctgtccaacggttgttcaggcattatgccaatgtcggtgtgccgaactcaaccgtacggttgggcgaaattctgctgttgctgcctgagttggaggtgttacaatatggggactcaatgtgggaattacgatcaaatatcgacccaaaaaatcctggggataggccaaatcagtaccaatcagcggggatcaatggacttttttgatcagatccccaccaaggatgttcgacaataaaacatttttgtatacgaaacgaaacgaaatacacattcgatactaaaacgaaatacaaacgaaacaaaaaaaattttgaaaaccaaaatgaaactcaaaaagtgccgaaaatataggaggaaacgaaaatgaaacgaaaattcgtctaaccctgatcccaatatgcatgcaaaaaattgatcaaataactatgatcagtccaaaagagaaccggttgggctcaattttactgtttcgatcaggcaccgattgttctcgctcgtttattaaagcaatgtttctgatcaggataagttgccattaggagagagataatcagaatatttttcattgaaataaattattttcgatttatttttagagttattgcttcgtaagcttttttaatacaaaaaattatgaaaattatcaaaaaaaaaataggatttttattttaatcaaaaaagtttttttttctctcaggtcatctgcgatttgcactgcgtttttcacttgttcttcgaaaaatatctttaatttgttgtccaatttttttgctgttcgctgcccagttacttctttaaaaatgaccagaaaaaagtgatcaaagtttcgaaaaatcgataaaatgacaaaatttgaaaattcataaaaaattcaaaaataatggtagagtaaataactttttttaaatgatcagcaaacaattttctatcaaatagcatcataaaataaaatactgaataaaaaaatgtaggtggaattttgtaggctagtagaaagcacttagggctatcgaaaaatatcaagcttttaacatttcgtacattttaggccaagttataaataattttctgtcaaaaattttccatttgatggtttttgactaacgtcccagcaccctctacacgataaaagtggtttttaaaaagttggcaaatgactcaaagaattcactgcctgtttggaagcaacggaaggggagacggttgaggagatgggcacgcgatggttccattcgaaaaatgattacgcaaagcccagtgaaatgatccaaaaaatgcattttgatcagctaataatgctgcgaaataatgaaaattttgcagaaatttacaaaactttttcaattaataattatttgatttttattttaaaaatatttgaataaaatattttaccaaattgcagaaattcaaaacaacaaaattgctcattcaaatttgtagcaaatcctcacaaagcaaatatgaagaaatgtatggacgaaattggagtgaaatataattcctcattctttacataaatagggctgagaatttaagtcacaaaaaatctcttttaattagaattgcaaaaatggtacattcaaaatttgtaacacattgtaaaaggggacaaatggaaagatttcagagccaatattttttcatgaatgaatctgacaaagttgggcgattgtttcaattccctggggtcgtctttctgtcggatttcaattgtttgtttgtttttggcattttatccactgaaattcaatttttgccgtataaaatgaaaaaaccaaaaagtgcaacaaagtcataaaactccaaaaaaagtagaaaaaataaaaagctcaaatcttaaaataaagcgtgcgataattttaaggtaaaaataaatccatttcgagtcagcagaaaaaagttatttgacttaaattcccatccctattaataaaaaagaataaatgtattttttaacaacttttaattaataatttatctctcgcaagcattttaaaaacttcacaacgaatttaaaaatatgtaatcaaaaataattgcagtacaagataaattgcagcgaatattttaatttatatttatttttccgtatgtatttttattattgactactgtttttcctggccaagtttaaaagggaatgtattttacagcatttgaacaaatttttttttaataaatttgacgaatttaatgagtttttgacaaattttattaaaattgaattatttttaataacataatgccgacctattaactgtgtggttcacaaatctaaatttaaaaaaatgaataatttattcattaactgaatttgttcaataaaagcagtgctgaatccgaaaatccttccgcatcacataaatcaaacccaatctaatcccaaatttccgccccaacaatctcaaagtgatccaattatttaattaatatttgcaattttctttattaaaactaaaaactacaacattctcacaagcctttttttcaaaaaatagataactcgagcccggacctcagttttattaattgagtttatatttattaataatcgttttataagacagatgattcaaacggtaactgtgatggattgtctggagaattaggtggctcaatttcaattttattttgttttccttttgcatttaaaatgctttcttccaaattgttttggttaattgacaattcatcttctgctgcttgtgatgatgttgctgcttgacttttttttaaaaatttttctgttatatttttcgtgagtttctggctgtttcgagcccatggaaaaaatatatacatatgcttattttttcgagccctattcataagcgtcttgctcttttgaccaaaatatttgttagatttttgtgtattttgttcagtaattcctgacaatgttgttgaatttaattttgcaatttataaatattatttaattcgttgttgcatttggtttgattgccgacaggcgccgctgggtttttttgaaaaactaggctaaatttgtcggatttcgaattttcgagtcaaacgaagcataaatatttgaatttgagcagccaaaacggccatcatattcgtaatcactgatcagaacaattcaaaaactcttgaacctgagactccttactaaaaaattttaaaatgaaaaaatagtgataagaaagtgctatgacttacccaaaaaagtattttctattatcatgcaaaactccaaaataaatttagcgatttttagcaaattttttccgaaaaattcggactttttatgaaaaatttcggaagtcggattccgaccccaaaaatatcggaagtcggaattccgtgccatccctggtctacggaatgccaatgccaaccattgagtcgctgatgaaagaatggtcagccgaaaatggagaaaaaaagttgaaggagataaaagtgcaaatagggaaagtgccaaatcgtcgcttttttgatttgtttagctactcataaacgctaatttggatgtctttggaggactgtgccgacctttgcctttgcctcgttgacattccattgcataaaagccggctcgagtcgaagcacgttctgttctcgctgtacgccgaattacgcgcctcccaacacttgcgcaacatggcgcgggacagagacgaagcggacggagcgacctcagtaaacattgaccaatttgtgtcgaacttgaatcggaattttttgggtttttgtctcggcttgactttgcccttgcccgttttcgttcaaatataacgctaattgaacaaatcgactataatagatttcaattttctaattctgttgcttaagtctcatattttttaaaatttttctcatattaattgaattttttaaatttttatcgtttgcctaaaaatagcctggaccttggatttttaacccacgaaaaatccaggtctggatccaggcccaggtcaaactctaaaaatttattcaagcagaaataaatactgatattattttttatttaatgtcatggaaatgcaaattaaaaatctgtaagaaattcaaagtattcaatttttacaaaacataaaaactttcggtgcaaaattggttagcaaatacaattaatattttaaaaattttccctgcggcatctgtcggcacgggtgaaccccaaaaagctccacaatttttaaattgtcacaaaaatcacaaaatttgagcaaaataaatatattacattttccaaaaattttaatccattaatatatgaattttttcacaccaaaaaatgtacaataaataaattatgagaaaaaacatgtaaaataaatggaaatttttttgacttttataatttttggtcggttgaattcatgaaagattgggttaaaaattattaataatgttattattattattcattgctataatataaatgttttaatttcgctgttacttacgcaaatatcttttaaatatttacgcaaatattaatatttacaaaaacgcattatttatttaaataaatgccaataatcacattaacatttttattaagagaaaccatggcatcgaaaaatgaacatcattttttattttattttaattaaattatgaatttctccgtgctgtctttcttcgtatttatttgtgcccaaattttccacggcaatccttttatgtaaatgcatttgctgtaacggctgctgttcactctctctcgcgcaaattccgacaatttctcaatttccatcgaaagtgtcccttctttctgatcggaaaagcgtccatggcacggaaatgccattgggtattgtccgggcgcaccgcggagattcgggtggcaatggtattggaagacgccgatcacttcttccactgtcaaaaggcaggaggatactgtaagaaaaatgaaatttaaaaaaacatatatatttttggtgaatttactagaatttaaataacaaatattttggcaaaacctgctggatcttcaacctttagaaattcgcacataaattcttttaaagacccaaaattggcaaattagtaatggccacgttataaaatttaaaaaacttgaaggtgggtggagaaggggtgttaaggtggttggccggtaccaaataattttctagtaaaatattattattatatatatttttttaattggagtgagagtagtgccggcctgcaaatggggtcttttaaaaaatcggaataaaaaccgagacttcgggttcagtcagcatcggtcggggtcctaatcccaatcaataattgaccggagattccgcattaattaatacaaaaaactaccaatatttagcgaaaattccctttttgtgatcagtgggaaacgaattctggacagtgccggaccaagcacggcacgacgattttcagcggaacattcaatgagcatttgagcacagcgatcgtcggcccaacgaatggcctgaaaaaacaaatgaaattagttatttttaatcgaataattaattaattagtacagcattccaaatgatgagttcgtcggcgattttcaattggtcacgttcgataatttcgcacaacaaattttgatcaatttgcaaaaattcttctgattcaaataaagttttggcattttggtcaatgtaatccaagcagcgacgagagaaatccttaaaataaaacaattaaaaatattttgtataaatttcgatttgtacattttcgttgagaagacgagcttcgtcaaaggcaaggaaaacatttgacaattcattaattggaaaagccaacaaggctttgaccagcagagaaacgttatatttattggctaaaaatgtttaaatataattatttatttattttttaaatttttcaccggcgtaaagcactgccatggcattttgtccgttcaattcgcttaaatcttccgcgtaaatgaagctcaacatcactttgaacgcttctgcttcaacatcggtcacttcaattacgtgaggacagtcggcagaggcaaaaaaatgatgaaaaaaaaacatttttaaaaaatatttcgattttttttactttttgtctttgcgtttttatcatcaaaacggaacatcgacccaaacacatcagaagcgaacatcatcacgcatttgtgtgctaccaaaagctaaataaaaaactcggaatagaaatgaatttatcattgaagttttaaacccaaaagataaatttcagaggcctcactcatttcagtctgtcagaaagtatcattttttggtacttttcgaccatgcggccacacctccaaatttttaaaaagcgacgcgcgctttatgtgtgtccagcgtataaattagcatttgaacaacgccattcgttcttttcccgttcttagtgcttaaattatcgacttaagagtagatttatgtataattgcgacttttagaccatctaaataattgttgcgtgctaccactggagcttttctcttttttaaattttttgtgttcaattcacctccttttctttcccaaccaaaaagtgaacgtccgccccatcgcccgtgctcaacatcagcttaaaccggtcctgcaaactgctcgacattgaaatttctaagaaaaaattgcaataaaaattgttgaatatggaaattataataataaataaatgaggtaataattttgtttttcccaaaaaactatcaaaaatggtaaaactaactaaatttactgttttgcggtcgacttcgatttacaaatttacatagatcgaaagggaatgcgtgaaagaattggttgacgtaaaaaaacaacaacaataactttttatttacacatacacagcagggatgtgccgagccagacaaaatccgattccgattaaatcgccgattccgattatggccaaaaatccgatacggtttcattttgcagcaaaaaaatggctaatttaatctttaaaaaaccaattaagaaaatttgagatattttcatttactgaatattaacaaaataaggacaaatgctagagaaataaggacacttgactattgaaaatagtgttcccttaattgaaatgatatgcttaattaaggaattaatggacatgaggaatggtttttacaactgagacgaggtcataatgatgttggtcatagagaaaaaataaatttattctggaaaaaattactcattatctgcagccttttcggcaccattttccgtggcattctgcaaaaagacataaaacatattaatgaatggcttaagccaatctgtgtcgccatttctattcagctccagatcaaggccagtcgcatgcccttcatttcttccacggacggccaaggcaatgttggcattgtattcgtcgcgcgcttcctctgcggggataaacattggcaaaacacgctggatcaagacccaattttcgaccagtcttgccactctgccattgccatcgagatatggatggatatggacctaaatttaattttttgaagtacaaaatgccgtaaaaaatccaaaattttggcaaattttttatttttttatacatattttgagaatttttgaaaatttttagaaatttctagtgaaaaaatttaaaaaaaaactttttttaaatgtacccctccaaaaataattttttaaatgttacaaggtgattaaacatatttaggtcatttttatgccattttacgcctatttaacactttacgaaggttttttcccaaaaaataaccatttaaacaaattttatttacatattttcgtacatattttgggtttttatacatatttcttacatatttagggattttttttacatatttatgtacatattttgaccaatttttgtacatatttttgacatccctattcattattatcctttttctaaagatattttgtatgaatttcttgaatttaagcaaagcaaatggctgaaaaacctgctgatgtgcgttgtttcgctgaatttgcaatcccccaatttttctggtgcaaattccaaaaaattgtcaatctccataataagtgttccctttgtcttccaaattcgctcatttatcggaaattgcatggggtacagtatgccaaagggcatcgttgcattcggatggtttcggtaggggtacagtatgccaaagggcatcgttgcattcggatggtttcggtattgttccacgccgaccacttcgtccgctgttaacaggccggacggaactgtaaaaattgaataaaatgaatagagaaaggtcaactgctgcttgtttccgggggattanaaaatgtttattanaatctccaaaagtcggattcccaaatgtcggtccccaagttgcaaacccccaaaagtcgggtagccgtcatagtatacgcaaaatttctgttngaatanatcacccaaaaatcatatgtggcatatgatacggtgtggtattcataaaaattttaaaattatcgaaaat

SEQ ID NO: 3039 - DNA, 5420 bp, Heterodera glycines
tctacgcccaaaacttggtgggaatggtcgggcggagttcctcggtaacttgggcaaagtaagaggcgcgttgttctgaattcaaaggctcatttggagagaaaataactgtggaaacgaaccgtccaactgagcctgcgcttgggcccggacttcctcaggctggccctggggcggcaagtcgaattcctggatggtgtcaccgtcagcgctgtgaaagggagggcaatgttaggaaagttttccggggggggggggggggggaggggctcacgtggacgtgcgccaattgttgcgcccacgcgtcgccaagtccccggccgagtagagaacgcccggcacagcagtcggactgcagcagatcccgtgctggtagcacagcgcgtagctgatctgttccagctcgctgagcttgactcgaggttcggcggtgtccaccacaacggtgcagcgcaacggctgggcagtcccctgtggaagaaatggaagtgtcagtccaaggggtgtcaattgcagtaacaacggacttggatggtccgatggccgaccaaaaggaattcagtcaacgaagagtgcatggcctgaaagaacagcaattatccatcaatcagttctgagcgattccgacccttttgtccagcacagtgcccggctgacagttttggtcgggcgcgcgaccgcccggctgtacattcttaggaatgatgcggtagttggagttgcgttgacacacgataagcgtcaacgcgggtttttttggcattttgcgttcattgatcagttcgtcaaaggcagtggtaaacgccccgccctcccaatacgcaaccttcaattggtcttccgttttgcaactctttacgttctcgtcttgcccacctttttgtattcgccttccgaggcaccggccctgaacacgaagatgtgttccgggaagaaaccattttggacattgaaagtaagcaaagcctctttgatagcgctgaccatcggcgctgccatttgtacggtggtgacccgcggctgctgcatccagtacgtgccattcaacttcagcatgtgttttgagatggtgtaggccatctggggaaggcaggcccatgatcaggtgcataatggagaaggtggggtcaaccccttgcccaaatggggaacccttcgcagaagagcatcacttacgccaacaatcgtcggaatggccggcgcctttcccgtacgccgttcgaacaaagtctgtggcggcgcgtgggacatttctaagccgaaaaacatccgtttgctgcccagccattgttcggcgcttaacaatttggttggtacaaataagtcaaaagattgaatactcgcgattctcgccggccgaccacttacagaatgtcatggcggatcccgttggcctgtttgaatgcctgtgcggcataaatttcgtaattggcaccgcccattttcaagttcatcttcaacatgatgttgtctaagaccatgatggcaccctggcgcccagtggccttgtccacgattttaggcgagacatgttgagtcagaacacctttatcaaccaattattattcaaaagatcgttgagagagaaaaatgggatgaaatggagaaaaagttgtgcttgccatgttcgacttcctgcagtttgaacacatggtgcacgtcaccaggatgggctgactccttcccgggcgcgaagaaaagcacaaattggcagcgatggtttgaataaaagacgaattgttcacggacatgctcactaagaaataaaaaatattgcttatgtagaacaaagaacctgggtttacaggtaatttcttatgcttataatgtaacattgaacaaaaatgaccactcacagcgatgtgtcctcaaaatggtcgactcgtggtggcattcccatctgaacgccacgcgcctgcgcacatcggaccaaactctcacagaactgtctggacaacgaacgggaaaccgttttccttttgaattcgttaaaccacctgcactgatcctttcgaacggcgctttgcacgatgacaacagcccaaaccttcggaaattcacacggaagcgaatagcgacggggcaacggttgtccacggtcagccaaacggaagtccaacactaaaaacgacagcccaacaataagtgccagatttgaatctgaaactgaccgccacgattgttcggttcgatttgttcattttgtgccgagaaaccgagtgccggagggtaaaggtgttgcgcctccgcttgcatcatgttcgtctcaacacgaacttcgtgagcacgaaaaaatgggttggcattctgaatcatccctttgtcgcgctgtgtctcaatgccacgcggcaaatcgatgggcagaacttggcattttcggatcatttgctcagtgagtttcggcgtttgtttgtcgagcgaaacacgctgcccatcgctaaacaaaagatgggatgattggcctttgatcaaataattgacttttaaatggatttaccaaaacaggatagttccatcactcacataatctgcaaaacttccatcggaaagaacgattcctgactccccctgcgatgaatgacgcactgaaggcgtgggtagcgcagccgtctgttgtacttctggtcgtaatactgcaccaaattggtttgctgactttccatcataaaagtgatctcgttagcgcctcgatcagtgagccccgaagccgagaaagtcatcttaacggcagacaatgagtgaaaggacgcacaaacgcccatccaaagaaagagacgacctgattttcaggcaaatgcatcgtttgaacagcaagacctgaaaattcagttaagcaaacatgcaaaatggcggaagggttacctttgatttgtttgttaataattcgcgccttttgcaggcagtcagtttcaatttggttgggattagagttaaggaaatagccgacgaagtcgacgagaccaatcgccggaaagaaggccgatttctttgctgaagggcaccgttaatttgagctaatggcggcataacggaccatccaactgaatgatggccatgctttgctggggattgtcgccgacgaagcgcacattcttctgcatgccctccttgcaaatgcgcgggtcgccctgcagttggaggacgctgttcttctcgaacattctgttcccgaagacgaaatgctcatttctgaaaacggaaagaaggaaatgctagcgagggcattcactcgcctttcgtgcattcgctgcgtgctcagcaactccaaaaattggcacaccgatcggtcgccgcccggctcagtcacgcgcacattgcgaacctccacttcctcggtggccgtcagaaaggccttcacgcgttcgcatctgcgcagatacgcacggctacggtcggtcaacgaatcctacggaatttaaaggccaaactaagcgacggaaagcgtagggaaagagaaccaaaaaattttgaaatgcctatttgtgaagattacccaccaaactttcggcagcgatcacaaattcgcgcgtctctccgtttttcatcagacgacgcacggaataaaggagcaaagcgcagtcgtagctgaatttgttcttttcgcttccaaagaaatcggcgttctgatcgagcagaatccgccaaagcgaccaatgcaactcgcgacgcgtctctttgctctcactgaaacgaatcgtcgagtagaaaaacacaaagcaaacgctgtttggtaggacaggaccaaccaaaatcacaacccactcaccccgactttcccaactgctgctactcaaaaagccatggcttccaatgactcactcattgcgtggccctcgtgccaattcgcgcggttccgctggtccttctttgccctttttgctcgactttgggtattctgccgtgaaacgaagctcatgctgatacactttgtcaggcgatcccctcagattcagttcaaatgcgttgatgagcactccaaccggtgcgatgccacgaacttcatggtcgttgctgattttctctaaacataaactgtgttattcaaactaaaggatatttccttgaacttacgtggcaattgaatttcattttcttcttgggctgccatgagcgatgttattcacttgaaaatgaccttagcaattgaaaaatgactataaatttaacgaataaaaatgattagagagagggagaaaggtaagtggacagtcgaaaagatggcacgggtaaggacagaaggggagagacggaaacatatgaaggacgaagtgagtgaatgacggagtgagcgtaggaagggcgagcatttagggggaaggacattggacagcagagcaaatggcgagggtatgggaggcaacgatgccgaaggtggccgatggggagaaggtgggcaatgggcaaagaatgggcgggtggggagggggtggagacgaggggagggaatgtgcaaatggaaccacagaatgggaggggcgggggcggcagagggcgaacggaccgcggggtcggctttggagttgtttatgcaaatgcaactcttaaaaagcattacattcgcaagccgctgcaccaccaccactttacaacacaaaagaaagtgactgaatttggtatcagtggcaaaaaatgagtaacaaaaaaaagggaaagttgcgtaagttgggaatgtctcaacgttcgtcgtttgttcgttcgttggtcagctcctttccctctctccctccaaatccccctcccctctacacacctctcttatctttcatccatcttttctttttcgttatgtacttccaaagattttgccgtttctttctccccacaacaataaaaaaaaatttccgcatttttgccccaggacaatttgctttttattgatcaagcaaaagaaaacagtaataaaatgttgttctgtgaatattattaattaataaaactcaaattatgtacatacatatgtatgtactgtagtagggctggaaatttaagtcaaatgacttttttcactttataacgtaaaatttgaaaaataaaagttcgatcggtgaaaaggcaattgatatccgaaaaaaaaacaattttcaggacttttttatttttttttttcgtgccttggcattttttattactttttgggcgattttttataaatccagtggttcgatcagctgaaaactttgtctctattgcatttcacacgaccataaaataaattggcaactttaaagcaccataactttttcttgaagcatctaaatcaaacattcttagtatcttttggtagccccaagaagtcctctgttactcttcgaaggttgaaaaaaacaccaaagattcaaaaacttgtggttcaaaatgatcagaaaaccaattttttgaaattttctggccataacttttttttgaaattttgcagtcta

SEQ ID NO: 3040 - DNA, 4210 bp, Heterodera glycines
acggcgcccccacaaagtgtccaagccacgaaatgtccaaaagagtaaaaacccacgaaatgtccaaaatttttcaaaatttataaaaacaaaatgagtctaatttaggatttttagggttttcggggtcgctgaatacgaatataccctttatattacccgttgcctaaccttaggcccatccgaataataaaaaactcaaattcgagacttggacatttcgtggcctggacattttgtgggtcagcgatttttactcgatagatttcacataaacatttttttaaatgccaataaatgtacaaatattacataggttaagaatagtaaaactttattaaaatatattattttatttgttttaagatccgcatttgtgctgcgtttgttcggcaacctttcgaattgttccgcaaaagaatgcggcataccagcacaagtcgggggtcagtgaaggggtcttacgatcgactttggccaggcccgtagccccaggggtggaagggggggggattgaaaatttgagcgaaatttgttgactgattttcaccagaaagtgctaaatttttgcgacttttaagtcaactttttaaagaaacattaaggattttgatagacaaaagggaaaaaatcgggggtttgtcgatcgtagaaaaattaaaatttaatgtagttttttttttaaaaaaaaacaggcaagattttttgtaaagaagttaggttgcaaaattcaactgtttttgctaaacttcttgactctatttgatttggatcgttttatgcatttatgaacctctcccaaatgtgactaatttgcttttatcttatttgtttttattttgccggcgtcacgctttgtgtataaatttttttttcacccgcctctcgtctctacgatcgacgaatttttcaaataaatcaggattagttgatcgtagaaaatttggaatttttaaatgaaatcagttaaaaaaaataagcaatttttcgaattcccatgagaaatttttgtataaattttgacttttttctctcactcttttttcttttctccctcttttttccttcaccttcaccccggacgaaacccaactcgtactattatgtagtaaatatagaaacagaaaaaagcgagacagcgttaagtcatcagagaacagagaaaaaaagatactctaaaatagtacgagttgggtttttaccaaactcaaataggtaggtaattttcttttgttcatttggtaacaatctcaaaaattcctgtctctagtgcatgcataagaaaataaagacatcgaaaattacagcgctattcaaattaacattcgaggaattatttattattcatgacgatcgatagaatgaaaatttgattggattggtgaggaaaggacggggaaagggcatgagagctaacaaaagcaaagcgaaacagcagaaatcaataagagagttgtgtgggatgaactacagcagcggaattgttatcggctaatgtcataaatgtttaatgaaaattagttttagaaaaagtacaaataaacttacaatatacaaccatgatttacactttgtttgcacgttttttcaaaaaaaaaaatctgagtaacaggcagggttgccagatctgaggatttatcctcattttgtggctttttgataggtcaatgaggatttttttggaaaatgaggatttgaggatttttgtggctttttgagaaattttgaggatttttgaggcttttggggaaaatcctcagaatcttttaaattttgataaattggcataatgtttggctttttgggaaaagcgccgcaaaaaaatcaacttcgtttttcatgttcagaatcccaaaaaatgcttatttctaacaaaaaaatgctcaaattgatcatgaacaatcaaaaatataacatttgaacattttaaacgtgtttagaatacattttataaaaatgaggctttttgacccaaatgaggcttttttgcctgccaaatgaggcttgaaaattttaatctggcaaccctggtaacaggggtcccgtcaaaaagtcattaacccaaaggattggggcctaatgtgtgtcctatgcgcaatatgggcgtccgattgagttgaggcctattcatcctcacagaatacacaatttattcatataatctgaatattcaatatgcactttctccccgtctcaattggtcattgaatcatcattcctccgctcgaatgcaattcggcgcttgtctcagccgcttttcgtccataataagaccaatagacaatctatgagaagggattgatcagaatggagtttgttggtcagcaaaactcacattgaaaagggcgaacattgtggggaaagcaatccgagagaccttttgaagaaaacaaaattaatttgggcaaattggaaggcgagggccggcctttcgttgttcccgattctcagctctattggctccctgttaattgactttgtctatggattcggcttggacttgtgaaggcacactgagcaaattgaaaaatcggaagcgcaaaggcggcgttcgttggtgaagtcgcactacgaaatcgccatccatcctttaaaataaacttagaaaggaacttaaaaagagcccacgggagcataaaacgcctttcgccgctctgtcggattccgccgaactttggcgataaatcctcgccccgccccgccccgtccgcactgttccggcgccgctgctgctccgctttttccagtggccccccgccgttctcttcccatctctttttgcatttaattagccccgcggggggcgtccttttgttgcgcgggtgcggcgggggcatttcgcgcactttgaagccgacgatggccaactcgagaaggccttaagggaattgagctaagtgagcagcaacgaccgaagggacgggcaaactgcagaagatgaagaacatcgcgccaagcatccaaacatcgattgctttgacataggaaacgcgggggagattcctaacacagaacacaaacaaatatgtaattggccacaaaacaacggagaaatcttcttatttaaagcaaacataataaattaattgtccatttcgattatgtactttccttttccttttttccaattttttattctccaaaatcgccaaattgtgcgtgacttttggccgttttttgcttcttttcccccattgtttttttttatttgtataaaaaaacgatcagtgagttaattacctcataatgtttccaaattgaaagatcatcgcctgaattcaaagtgacaatgcgagttagcagcatttgtcactgttcccaaccgaccaaaagtgcgttcactccgagcattgtccgtgcggggatggctttggagcccaaactgaaggacacccaactgaaaatggggggggggggcaatcacaaaacaaaacgaacgaaagttggactaccttatgaagatggtcaaataggtgggcacataagcctgcatgaagtaccacacataacgccgctcgaaggacagtttcacgtgcaattcgtcctcaattggtgctctcttttcgccttcccctctttcttacccacatccccgcggggtacggctgaaattcggggatttgacggcactttcgcgcccatacctcgacgacaaggtacgcctgaatgttgaccaggttgaagtcgggcaacagaatggtgttgattgggtacacgggggttgggttcagcgagttccaccgcatccgaacttcctgattgttgtagttgaagctttcgtagatcagatggcacatttggatgtccattggaaagtttgtccttcagtcagagaccgatttggccttcccttgcgtttgtcggcacttacaaatccatggcacacggacccttcacacggacacgctaaaaatgaagaagacaacgaagaatggaagaagcaacaagcaacccacataattaacccaaatggtcccattcggataaagcatcaaaaagatgttcctgaaatgggccgcttttggtgcgtgccattgagcgtggtaaagcgactgactgaaagggcgagttgtgtatttgggcaactttggagttgatgaagcacgagtttggcgtccacagcttctcgagcacttgatggctgctcagaaaatggtcccataagcaatttcctccaatcggcgccaatgaatgcctttggctgcccttc

SEQ ID NO: 3041 - DNA, 2483 bp, Heterodera glycines
atcactgggacccttctctcctgcgtttcatcacctggactcagtttttatgcattccaatcactgggactcattctcctgcatttcaatcactgggactcaaccctccagcagttcaatcactgggactcaatccaccagcattccagtcactgggattctgttctcctgcattccaatcactgggactcaattctcctgcatttcaatcactgggactcaaccctccagcatttcaatcactggtactcaattctcttgcatttcaatcactgggactcaacacaccagcatttcaatcaccgggactcaattctccaggacttcaatcaatgggactcagtttttatgcattccaatcactgggactcattctcctgcatttcaatcactgggactcaacacaccagcatttcaatcaccgggactcaattctccaggacttcaatcactgggactctactctattctcgtgcatttcaatcactgggactcaacacaccagcatttcaatcaccgggactcaattctccaggacttcaatcactgggactctactctattctcctgcgtttcaatcactgggactcagtttttatgcattcaaatcactgggactcattctcctgcatttcaatcactgggactcaaccctccagcatttcaatcactgggactcaatccaccagcattccagtcactgggactcaacacaccagcatttcaatcaccgggactcaattctccaggacttcaatcactgggactctattctcctgcgtttcaatcacccggactcagtttttatgcattccaatcaccgggactcattctcctgcatttcaatcactgggactcaaccctccagcatttcaatcactgggactcaattctcttgcatttcaatcaccgggactcaattctccaggacttcaatcactgggactcaattctcttgcattccaatcactgggacctaacctcacctggtccttcggcatcgcaatcatcgagactcaattctgcgatattccaatcaccgggactcaattctgcgacattccaataactgggactcaactaaccagcattccaatcactgggactcaattctccatcattcctattcccgggactcaatcccaccagcattccaatcactgggactcaatccttcacttttcacggattcttcggcatcgtaataaccgaggactcagttctccgacattccaatcactgggactcaattctccgccattccaatcaccgaggattcaatccttcactattccaaacaatgaactcaattttacggattcatcggcatgtcaatcacgggacttaattcagacctgttcagcataattttggaattttaaaaacgtatttctattatgaaatacaatttgcgtagaaaatccttttcattataaatacttgttctcttacatttaaatccatccaattaaaaccgtatccattaaaagaggcataattgacatccgctttaattacaaaaacaaaaaaactccatttcaaggtcaaacaatttctcgaaccaaaactttttcaatacaatatcaaaactaagtgtaagatcatttccattgactttgcatatacaaaaacaattctttttctttacaaaagtgttaagagcattcatttccaaacgctttttgataataacaaaacaaaaactttttctcttaagaaatgcaatagaaagcattcattgcgatttcattatcattaataaacatacaaaaactattttgtcattaaaaacgaaaaaaaagagaaatttattttaactgtgctttttgcaaaaactgacaaaacgaaaatgaaaaagcaaaaccaaacatttcttttttcaaatcattttttaacgcaaaaactaaacaaatcgccacacaaattcaaaaacggacacatacacacactcaactttattatactagcggggtcagcgccttcggcgcattccccgctaggtagtacgattgtattgtaagattatgtttgataaaatcgactggctcggccgattcgcggcctcgcatcctttttttgctttttctccaatcgtcgggactcaacccaccagatttcaatcactggtactcaaatctcctgcatttcaatcactgggactcaaccctccagcattccaattactgggactcaattctcctgcatttcaatcactgggattcaaatctctggcatttcaatcactgggactctattctcctgcattttaatcactgggactcaaccctccagcatttaaatcactgggactcaatccaccagcattccaatcgccgggactcaacctcagcaaatttctttagcatttttaactttgtgtgccttgggatgttgaacagttggggagggctcggccgcttcgcggcctcgtacgggggccttcagccccccaacaattttttgcgccaaaggtactcgatcgg

SEQ ID NO: 3042 - DNA, 1498 bp, Heterodera glycines
  unsure (1)..(1498): unsure at all n locations
ttccagtctcgaattctgtaaaattttgtccccaattccctgccaatttctcgtacaattagcttcagctgtttacaattgtaaatgtcattgtttttcaatatttctctccttttgtcaaattctttgattatttctaatatttcttgttcatcaaaatgatcagaatggtagcttcagtctgtggaatctccctgcgttatacgagcgctttcttcatattcgttaaacattgacttctcagtgatcgtatcatttgtttttatcgggaatgctcactaattcaatgcgattcttaggatttatcttttttatttataggaatgggatttcagagaaaatttaaaatgccggatacaacaaatttccggacatgtgattctcctttagaaaaataaaataattttttgtcagtagagtcggtgcggctagagacttccccgtcctccaaggtgccgatcgcgacttcaccggttccgtcaactgccgttacgcggttatgcacaacattcccggcgacaatcttctataattatcaacatcaatggtcctattatacctcttggaatcgtgaacacttggggaggggtctatctcatccagtctttgtacagtggccttcaaccccccaacaattttttgcgccaaaggtactcgctcggccgcttcgcggcctcgtactggggccttcggcccccccacaattttctgcgccaatccaccatcatttaatcgctgggactcaacccaccaacattccaatcgccaacacttcaacgggactcaatccaccagcatttcaatcactgggactcaacccaccaacattccaattactgggactcaattctcctgcattccaatcactgggactcaattctcctgcatttcaatcactgggactcactcccccaacattccaatcaacgggactcaaaccaccagcatttcaatcgccaacacttcaacgggactcaatccaccagcatttcaatcgccaacacttcaacgggactcaatccaccagcatttcaatcactgggactcaacccaccaacattccaattactgggactcaattctcctgcattccaatcactgggactcaattctcctgcatttcaatcactgggactcaacccaccaacattccaatcaacgggactcaatccaccagcatttcaatcgccaacacttcaacgggactcaatccaccagcatttcaatcactgggactcaatccaccagcattccaattactgggactcaattctcctgcatttcaatcactgggactcaacccaccagcattccaatcaacgggactcaatccaccagcatttcaatcactgggactcaacctcagcaaatttctttagcatttttaactttttgtgtgccttgggatgttgaacatttggggaggggctcggncgcttcgcggcctcgtacgggggccttcagcccccccaacaattttttgcgccaaaggaactcg

SEQ ID NO: 3043 - DNA, 2146 bp, Heterodera glycines
ttttgataataacaaaaccaaaaactttttcttcttaagaaatgcaatagaaagcattcattgcgagttcatatcatttaataaacatacgaaaactattttgtcataaaaacgaaaaaaaagagaaatttatttagactgtgctttttgcaagaactgacaaaacgaaaatgaaaaagcaaaaccaaacatttcttttttcaaatcattttttaacgcaaaaactaaacaaatcgccacacaaattcaaaaacggacacatacacacactcaactttattatactagcggggtcagcgccttcggcgcattccccgcttaggtagtacgattgtattgtaagattatgtttgataaaatcgactggctcggccgattcgcggcctcgcatcctttttttgctttttctccaatcgtcgggactcaacccaccagatttcaatcactgggactctaatctcctgcgtttcaatcactgggactcaaatctccagcatttcaatcactgggactcaaccctccagcatttcaacactgggactctgttctcctgcattccaatcaccgggactcagctctccgacattcaagtcactgggactcaattctccggcattccaatcaccgggactcaactcaccatcattccaatcgctgggacctaacctcacctgattcttcggtatagcaaccaccgagactcaattctccagcatttcaatcactgggacttaacacaccagcatttcaatcaccgggactcaattctccaggacttcaatcactgggactctattctcctgcgtttcaatcacctggactcagtttttatgcattccaatcactgggactcattctcctgcatttcaatcactgggactcaaccctccagcagttcaatcactgggactcaatccaccagcattccagtcactgggattctgttctcctgcattccaatcactgggactcaattctcctgcatttcaatcactgggactcaaccctccagcatttcaatcactggtactcaattctcttgcatttcaatcactgggactcaacacaccagcatttcaatcaccgggactcaattctccaggacttcaatcaatgggattcagtttttatgcattccaatcactgggactcattctcctgcatttcaatcactgggactcaaccctccagcatttcaatcactggtactcaattctcttgcatttcaatcactgggactcaacacaccagcatttcaatcaccgggactcaaccctccagcatttcaatcactggtactcaattctcgtgcatttcaatcactgggactcaacacaccagcatttcaatcaccgggactcaattctccaggacttcaatcactgggactctactctattctcctgcgtttcaatcactgggactcagtttttatgcattcaaatcactgggactcattctcctgcatttcaatcactgggactcaaccctccagcatttcaatcactgggactcaatccaccagcattccagtcactgggactcaacacaccagcatttcaatcaccgggactcaattctccaggacttcaatcactgggactctattctcctgcgtttcaatcacccggactcagtttttattcattccaatcaccgggactcattctcctgcatttcaatcactgggactcaaccctccagcatttcaatcactgggactcaattctcttgcatttcaatcaccgggactcaattctccaggacttcaatcactgggactcaattctcttgcattccaatcactgggacctaacctcacctggtccttcggcatcgcaatcatcgagactcaattctgcgatattccaatcaccgggactcaattctgcgacattccaaaaaatgggactcaactaaccagcaatccaatcactgggactcaattctccatcattcctattcccgggactcaatccccacaagcatcccaatcacttgggactcaatccttcacctttctacgggatttttcggcatcggaaaaaacggaagaattcagttctccgaaattccaatcactgggaatcaattctccccccattccaatcacccaagaattcaaaccttcaactattccaaacaa

SEQ ID NO: 3044 - DNA, 8197 bp, Heterodera glycines
  unsure (1)..(8197): unsure at all n locations
aacgctgagctgaaaggtccctgatacnacgcatttacctccttggcacggcttnggtgattcaagcgcttgttgaccatgatcagccaatctccggcgcctgcccatcctgtcgccgtctgtgcccattcaacgctgaccactttgaccgaatcgccgacttccaatggccgagtcttttggacaatgtcattgtccacccaaattagggcaggccattgctctgccagctgaactcgtgcagcaaccacgccgtttgcagcagtttgagcgaccaggtaccactttggcgccttttcgtcttcctttttgccagggtatggcccctgaatacgagtcttcgtcaatttgtctttggcccggccgatggcttggaattcgtcgatcagagccccgtcttccaaacatgcctgcgatgacgaagagcattttgacgcatttgtctggtccaggcgttttgccttgttcgacaagaaggtgtggcgagaagatgactcatcacctgaaaacccgccattcccgaaactatcccccccttggtccccattttgctcatccacttccatttctttcacctcctctgggactaccggctcaaccgtggccaaacccagcggatcgctcgggtttgccagtggcaacacttccacaacaccattttcattatcagtattttgcccgcaggcgttctcctcgatgctttcatccagcaccaccacttcgggcacttgagctggtactccctcagcttctctttccatttcattttcagtatttgcccgcaggctttttcgaaggacatttttgggaaaaggaattaggatttgttatagctaaaatataaaaagaattagttgaaggaaggatttgtgaaatgtaaaaaagtggggaaagggatacagaaaatggtgaactgaataagaaacgagaaaatatgtatgttgtaaggtttatatgtgattggatcggaggagtggcctatttgccagtcggaggaaaatgtaaaatgtgtaatgtcggcggcaaaaataagatgacaggcgatgggcgtttgctccgtctaaggagcgaagatgtgaccgttgatgattcacaaggccgtcgctagctttttgagttaaattatttgagtgggaatgggaaggaaagagggaacaaaaattgaaaattgtgttgtggtgttcaaaaagcgacaatttgtgcatcagcgatgagagagagggaaaaaccggtgggaagagcgaaaagggcaacatttaattgctttttctttgaatgcgcggatgggccggacctgaaagaggcacccatcagccattaattcaacaaagtgttccctcagcgagcggtggagcggagagagaatttgaaaaataaaaaattggaattgaaatgtgaaaatccaatccttaaatccaacggaaaaatttaccaaaattaggaaatcaattttccatttcaaattttgtagccaaaaactgtagggtgtacgatggtgaaaacggagcggtcacacttgcaatacagcaacaacatctgaggatttttatgcagactaatattgccaaaaggaaaaggacaattaagccaattgttagccaaaaattagatgattgactaaatttgtctccaaaatttttgattatttgttcgcaggcccaacgtaattgttcttctccatactcagtgattgacgaattatagtggtaaagtgcatagcatgttgtgttgcagttcattgaacacaacaaatgctgttcgaaaatagccgtactattcggtgttagttgagacgtactgaccgtccaggccatgactaacaacacacaaaacagtttaatcaactttcctaatttcgattttgtacactttgagtctgtattgtgcccgcaggccatttcagtcgattgtcttaggttgctggaggagtgaattttaagaaaggaataataaatttgtctgaatctcgtagagctcgtggatggctgtttgtgccaatcgttggacgtttccattttttgagtcgattcgcacccacaagttgggtttttgttgcacttggagatgatggtagcgaaattgagagcaacttgcgatttttgagatgagtgagaggatgcgcatctccgggtcgaggaatgcgtcctgtgttgtgtttggcagatggattgtgaccgggatgaacttgtagcagtctttcgttgtccggtaactgatgttgaacagtgagattggaacgcagggaaacacttcgattgttgtttcgctgatccatcgggcttgcagattttcgcgcttgaggagttttcgtgcttgaagagttgagttgctgacgcgcacgttgcgctggcattccttcaagtagagctgcgagagtgccattgttgtggcaagttgagcagctgaaagctgcgaagcgagttgctcgggttgcacgttgcgtctcgctcttgtgtggtcgctcatgatgatgtcgtattgttctttcggaatgccgaagttctgctccgacaggacgatttgtctcccgtcgcatgcttgcactgcatgcgtctcggtgaaggtcagggccttttgtcggtcgtccgagatccaaaatgctgttgattcaccgttgagtttggtgaattctccgtagatttcttctgcttctttaaagtcgcacatgaaggaattgtcgttagggcatgctgaagttcagatgagtgaactgttgtcatgcagctggcaatactcggaggcgtaattgcagtggtctgctcgatgaattggcgacagcaattggagactgtgccatttgacgaacagtgttgctggttgcgcaaaacaatttgttgccgagcttgtttgtttccctttgaaaagtccggtgattggtccagggaaatccacttggagttggtcgtttgttgcccaaatacgattgttgtcgtcgtggtgcatttccgttttggcgagtgggcattcttgctgatgtgccattcgttggcagagtcgtttagagaccaacggaaattctttgttgatttcgacgaacttatcgccgacgatgtttgtgtaataattttccgtcgtcgttttgatggagcagtgccatgccgttgcgattggttccggccggtggatcttggtgtacagcgtgatggtcagtggtgtccattgcgcagtaagtgccggtggtggacggcagaatggcgagttttccggacctttaagttcccagagagtgctgccgtgattcgagcaccagaagacgtcgcgtcccttttcggttgtgattgtgctcttgggccagcgaatcaatttgattcctggacggggccgttgttgttgccgtacccgcgatactgttgtcgttcggtggtccattgaccatggcattggcgttgtcgtggttgtgcgtgcggttggtcgtgtggttaatctggttggccaatttgttgtgcgtgtggtcgttgtagtcgcggttgttgtcgttgtgcgtggacgacttgtggttgttgtgggttggatcgttgtccatggcggagttgtcgatctcggcggatttgttgattggctcagacttcggttcagtgctagaaccttgtctatgtatcgctggacgtaagggctgtatttcgttgatgcccgtcggtcgcgctccgtgaagatgttgaggaaatttgaaacatggccgccatgccatgctttgacttgcgtaattcgcttttgtcgacttggtagtccttgtgccgtgccggtgaagagtaggcaaaacatgctgatcagcattagcgagctgatcacttgtcggcttgttgatggaccttgtcgggacgtgtttgttgacgacgatggtcccagctcttgttccaaatccattggttccggaatggcttgtcggatccggttggcgatttgtcttgcttctcccatttctcgattgaaaacgaagaagcccgcttttaattcgcgggtgatgtcgatcaggtacttcttgttgttgatccattgtgcattgtcgtccttggctacgatcagtgtgatttcgatgtctgatcgcagaaatcggtggagcatcggtgcgatttgagccgccatgttgtcggcagttgcttggtaggcaaagatcatgtgtttgacctttggtcccgggataagtcggaattcgtctgctgggaagtgggtgaaccacttggcgtcatagaagagtggcttaaacacttctgccacgttgtctccgatgagaatggttgtgcaattgtagttcaagaaggtcgggtgctgcacttttgctcgagcttttgtgaggatttccgccgttcggttgttgagtcgctcgatccattcctcgtagtcacttggttgctccttttctggtatgattggtcgaaacttgacttgtttgtgtgccggttgattgtagagctcgccgaagcgatcgcatgagttgcgccagacattgatgacctctgtgaagtgctggtcgcgtccgatttgtcgtcctttgctgacgacttgttgctgatggaactttttggcgatttcttccgttacggcgttgagttgtgtgtagttatcgtgagctgcccaaatctcatcagctggcaagttcatgttccgggtgagccaattgaatattagggcttggaagaagttggtcgcgcggcagttgttgaactcttcaacttggaatcggttgccggcgattgatccgtaagttgccgttttcgcgcaggtcgtgtgagagtcgtcgcacggctcaaacaggttgaattcgttgaagttgttcggcttggggtcggccattcggtactcttcgattgttggtgccgatgtttttggttgctttggctgctttgcgttgtcggtggccgttttttctgttgttggcgtgtcatcgagcgttatgatttccggttcttcggttggcacggcctggaggaagatcacatcttctggcaccatgtgtgagtagtatccgccgtccacaaaacggaactcggcgaatggtcgttttcctccatacagtcgtgagacgctgagttgaagtcgatcggttttatgatgaatcatccatcgcccttggtcctccagttcatggagttctcggagaacacgtcctctttgccatgctgacgtccaattctccggtccgtaaatgcgttgaacgtagctgagtagcgtttcgttttcctctggccattcgtctcttgaccgttgtcgcttctcttgcatgtcgatagtcttttttctgccgattcgatgtcgttcaagctctttgtcctttgctgattgctgctttgatttcgttgactgatccgtttcttccgcgtgcttctctgttggatccggctgatccatcagatcatagtcaaattgttgtgctaattcttgccatgccttgctgtgtgcttgttgattggtggcacgttgttcgtcgttttgttgcctttcgatttgttgacgttcggcttctcgttgttgttcttctttttgtggctgcggcatttctcgttcgtgttgctcagtgcgaaggtgtcgtttagcttctttttgcgctttctgcaccatttgttgttcgtgttcgatttgctcatgttgcggcgcttttcgcacttctctgttttctgcgatggcctgaatcgtggccttgctgcttccttgttggtccgcgattgcatggaacaattttagcaatccggagtcgtgaagttgcttgcggcgtttgtgttgtccttgcagtggactttgttgttctccgatgggtcgtaataatgctgagcggcgttttgggattttgaagtcttcggtgttgcgtggtcgttgttcttcgtcgtcactgccggctaaggagactgagtcttccatgattgatgctatgaggcagtggacttgttgaattggttgctctggaacctcagggctcaattccaaattgtacaattggtttattgccctatcccttaattttccattgatttttatcaaagcactgcgcgctctcccatcttttcctattaggactttctcaaccctcgccaagttccacaaggatctcggcatttggtcgtcttcaacgatcacgatgtcgccgttatttggggtttgtagtcctgtcgttgcatttggtcggtcgtgttcgcgcagggaaagaaggtagtcacttttccaaatttcccagaatttgttcagccgagcattaacgtggctcagtgttgtcaccattttgtcgcgatttgttgggtatggctcgtatgttggatcgtctgtgtcgttattgatgattgggaagttgttgtttgctttgctgtatggtatcaggaagttgattggtcgcaacactttgatcggttcctgatccgattcgaacgtgagtggtcgattgttgatgatcgcttcaatttcacagagcattgtgccgaactcgtccaatgtgagaaggtttctgccgactgtccttcgtagtgcgtttttggtgatgccgacaagtctttcccaaatgccgcctttccaaggggcgtgggctgtgttgaaaatccaacggattccgctttgagccatttgttgttgcatgtcctccggcattaacgtgtcggtccagttttctttgatgacttttgctcctgccacgaagtttgtgccttggtcggacatgataagtgatggtatgcctcttctggccgtgaatctccgaaaggctcggaggaatgcttcagccgagtagtcttcggctacttccaaatgaagggcgcggatggccaagcaggtgaagagtgcgacgtagattttcaccacgtcattgctttgtttgaccttgagtggaccgaagtagtccactcccgttttgtcgaatggtcgtgcttcgctgactcttccccttggcaaatccgatgcctcaggatatgtgtacggcttgactcgttctcgacgacattcaagacatccgtgttgcggggagttgagcagttgctgaactgttttgcgtccgcgtggtatccagaacttctctcttaatgttgacaggagtattctcggaccgcaatgtttgagctgtttgtcataatgccggatgatgagcttggttatccatgcgtgtggcggcagaaagattgggtgtttactgtcgtatggcagatccggtgcttcctcgagtcgtccaccgcatctccaaattccttcttgtcggaagagttgcaattctcggatttggtcgttggatggtggatgaagccgctgtgtttctctcaagatccaattttcggcctgttgcagttgtgccatggtcagtggtttgttgttttgatgcggttcactaattgtgccgttttcgattgtgcgaagctttttgatgaagcgcatagcgtgtgctgcggtggctttcagcctgttccaattcgaaaatcgttcgaagtggattgatggtttgaactgttcttcaacatgaacaggtgttgtcagttcgatgattggtggctcttccacttctttgaattcatctccgggccggtagatgacgtttgattttggccatttgtctgctttcgaaagccaaacggggccaaagcgccaaagcagtgatgatcgaaggcattgaggatccgctcctcttgatgccatgtccgctggatttgagtcggttctgacgtgtcggacttggaagttcgcttctcggattttttgtaatcgatttgtcacaaatcgatcttggcgcttgttttctcgaagtcgttcgactgagcattgactgtctgtccacatgatgacttgatgatcggcaaatttgatttgcgcttggatgaatttgactgccttgactccgagagtcagtgcttgaagttccagctttggaattgtgccgtcgtgtgcggccactttgattggtttgacaaggctttttgcgtagatgaggttgcattcatccttcataatcgtcgtttttgccttttgatacacggcaattcccatgccgtatttgctggcgtcgcagaagcagtggaattccactgagtcgatggcttggatgtgccgtggaaattcaattgtgattgcttcgcctctgtcgagccactgtgccatcaatttgagccagtctttgctgatgttcgctggcaattcgtcgtcccattttggattcatgttttgcacttcttgaagaatgagcttggctggcagtagaaccggtgacatgagtccgagcgggtcgtagactttg

SEQ ID NO: 3045 - DNA, 3667 bp, Heterodera glycines
  unsure (1)..(3667): unsure at all n locations
attcgaaaatcttatacaaaaaataanttagtgcaataaaactgaatgatactttataaaaatactacttatcggataggcacaataaaagccttaatgatcgaattccgctaccccataaagaagtgcgaaagtagggacaaggcttccgggattgagatttattaaattaatttattaagcaaataattacttttccaaaaacaacgggggaaaggagggggaggagtcaagcggagccaataggcgactgactgggaggggggcgaggatttgcaaatgattccactaaaaagattaacaaaagatgttgtaaatatgaatattttgatcatctcatcatcacagcgaagatgaataatgttatgtctttagcttacacactttattaaagcaaagacaaacagaaaaataaatgataaataacaaataaataaatgactgaggaaagacaatcaataaaatgaaatgaaggagagaacggcaagtgacccgaatgagtgaaagggtcaacattaaataaacatttccaagtgatgacacagggaatcgtgtcaataaataataaatatatttaaattgtcaaatccacaacaaataacaaatcactattataataaaagagcaaaataaggtggggagtgaagaaagcatggaaaatgggtacaaaatccctttctttgtgttgctacatattttgcttctcactaaacttcttccaccggctgtcccattgttcaccacctcccatacataattttgtttattattgtgcataatgttttgtccaattttcatatggatttaaataaatcatatcaacaaaaagttttgtattttaagtgcgttttatttttgtaatttttcgccactttcaaaatgacttttgagaaaaccgaatttttgagttaaaatatattttttctgtttgccaggaaaaaaacctgcaaattctgatccctgatttcaactaaattcataaaaaaaattctttgttttttgttttaagaaccgttgatcaggcacaaatataaattagaagacataaggcaaaaaataaattgacaatttctcaactgctgatgacaaaaacatatacatatattggaattatatttgtttttatttttaaataattaaacaatttctaaaaatccatgaaaaactgcgtcccaaaaatcgagtaaatgttatatgtacattttttggatttcaaacaatctgccgctgttgttgttggagagaaaaggagtagagccgatatacagtatgagcgggactctgtagcagatacagtaaggcataaattgaaagagtggcaccgtaaggtgctttattttgtgacaaaatttctgcgattaagcaaatcccatgtgttttgataaacatttatacaagctgttgaaaatacaaaaatgctaatttggataagaccaataatggcatagtgaccaaattttcagaaacaagcagtgattaaaatgaagaggctgataacattgcctttcaatcaatagaaagtgatcagatagatttgtgagtgtcggctttagtgcccgatcactttcttttacgaaaatgacaaggcacaaaagttgctgatcagacatttgtgttaattttttgactcgtctccgatcattttccgtcttcagtgtgctggttgatccatcagatcagtccgtccatccccatgcattttttgttgttttttttttgatcaccaatatggcccgtcagtggtcagctgcttccatgaggcgaatgcggtggacgacaaaccgttgggcgagttccaatcgacacggtacggttcgtcacgatcgcaaatgccggtgccggcgcagcgttcaatttgcattggcgacgacgaactgcgaccgtaaggcttaaaattcataattaaaatttaaaaaatatatatttttggtaattattaaaatagagaatgtggaagtgaaagaatgaaatttttagggattattaaaaaaagattttgcatataaaatgtatgattcaccacaaaattatgcaatgatttttaataattagcagattttcaaagttatttaatctgttagagacaaattaacatctttaatgcctgctttttgaagttcggtttcaattctcgtaattccacatctttatatcaatttatttgctaaaatttttcataattaaatagaaacgagggctgctcaacttttaaactttttcgagcttaaatttaggtgtcaaaaaattctcaggatagagaaagtggaaaattgatgaaccaaatccaaatcattgtataatgcggttaaagcaattgcgggcggtcaactgctctcattaccattaattgccattttaaaccataaggaagaaatgttaaatcgatgagacaaatataatttatttacaacagtttttggtcaaatgtattcagttaatccgttaactaattaaagtgattgcggtcagctgctctctcattaccattaattaaccttttctaccgtaaaccattccccttccgtcgacacaccattaaaaagagtcaaaattgttttataataatttattctttatttaataaaaaacataaaataaaaaataattgacaaaattttggggagtgggtcacctattttatatattaaatatttgtttaatgaatatcattggaaagcccattaaaaatgctacaaaaaggttaaggttgtactctatcaaagaattaatttttcaaaaattattatcggaatggaaaattattatgaacaatatgcccatgactgtgccatatgaactgttttgcctgaaagggcaatgcccggcaaaaaactcaacagatttctaaaaatggttattttagcacccataagtttgggatgggcgagataggtcaatgggatgttgatgaaaaaaattattacataaattttgatttttgagaaattaattagtgggtaaaatcttaaattctagctttttgtcagtggaaaatgttaactcttattatattacatctaaattcatataaattaaatataaataattaaagaatcatgttttttaaacattttatcagaaacaaataaaatatttatttaaatgttattgatggctaaaacatttctttttttgagaggggcggagatgtcctaaaatggcaaataaattaggaggcataaggcaaaaaataaatgacaattaattctcaactgctgatgaacacatacataaattgataacggaaattctatttattttatttttacttaatttaacatttaaaaaagtccgtgaaaattgctgcccaaaaaatgagtaccaatatgttttttgtgtacacttttttcttcggattttaaacaaattgccgttgttgttaccgtagggaaagtgtgccatggttagaaaatttaaaaagatgcctaaggaaaaaacaaattttctgcataaatttttggatgtgagaaaagagagacaaatgatgaaaaatgtacaattggaaggctgagncaaaaatatcactcattcactttgataatgatcatcagatcaggcacagttagttactggtgcccgttagcgatanaagaaacattgaattttttcctatattttgcnnacatatgtgtaaaatgaggacgagaatacatataaatgagtaaaa

SEQ ID NO: 3046 - DNA, 2716 bp, Heterodera glycines
agacggacagaaaaacgaatgagggccaatggaacgacaagaaaaaaaaatcataaaaattcttaaacattttgttagcattggcttgaaaatgatggcattgtgccaaaagtgtccatacttttctggtttttaaatgaacaaattgtttttcccgtccacaggccctcaatcattattggggatggcgtctgtatgattttatatgtatgtacagtatgtatgagtgagctgtctataactaggtacagtaaggcacatatggaaagagaaagagagagacatacagtaggacaacatttggtcaaacaaagacactttatttgtgtccaaatctctgcgcttaaaaaattaaggtattttgataaatgtttgtacaagttgatgatgatgacaatggtgatgctgataatacaaaaaatgataaataataataatggcagcaaaattcattaattaataagaaatgaataatggatgagagaaaaagggggagagagagaatggaaagaaaatcggcgaggggagtgggggggggagagattccaatttggaagtaaaagtgattaaaccatcaaaaagccaagctataacagcacagtgatcaattcttcagaaacaagcagtgattaaaatgaagaggctgataacattgccttttcaatcaatagaaagtgatcagatagatttgtgagtgtcgactttagtgcccgatcactattcttttacgaaaatgaccaggcacaaaagtgaaatgatcaacatctaatcacaatgccagtacgatcagccaaaatcatttcactgttctctgatcttttaaggatagtgaccagacatttgtacaaacaacaatgctccgttgttgatcagacatttgtgttaattttttgactcgtctccgatcattttccgtcttcagtgtgctggttgatccatccgatcagtccgtccatccccatgcattttttgttgtttttttttgatcaccaatatggcccgtcagtggtcagctgcttccatgaggcaaatgtggtggacgacaaaccgttgggcgagttccaatcgacacggtacgggtcgtcacgatcgcaaatgccggtgccgacgcagcgttcaatttgcattggcgacgacgaactgcgaccgtaaggcttaaaattcataattaaaatttaaaaaatatatatttttggtaattattaaaatagaaaatgtggaagtgaaagaatgaaatttttagggattattaaaaaaaggactttgcattataattatatattgccaccaccaaaattatgcaaggactttttatcaatagcaaattttcaaaattatctaatttatttatggctgtttttatgatgtcttatttaattttcgaattatcatttgtatttactaattaaatttttttttaatttcgcataattaaattgaaaggaggtccgacgaatttttaatcttctttggaattgaaatttcactaacaataaatctctcggaagtttaaggaaatgttaaatcgatgagacaaatccaattaatacataattttggtaaaagtataagtaatccgttgactaattaaagtgtttgcggtcagctgctctctcattaccattaattacccttttctaccgtaaaccattccccttccgtcgacacaccattaaaaggagccaaaaatgttttgtaataatttattcgttatttaataaaaaaatagaattataaaaatatattgacaaaatttgtgggggatgggtcacctatttcatatattcatgcatgataatgatgatgatggtggcatcataaaatcatatttcataaaagtctgacaaaaatgacacaaaaaggggggcgtggaaaattttctgtctctaaaaaattaattggcggcgccaaaggttggccacatcgttttgagagttggtgcccaggcccaccgctgttttgccgacaccgccgccggtgttgttgtggttgatgtccacaagaaacggtgacgatgctgacccaccactttttggcgttgtcgtccgtaatcggtgtgccgctgccgtcggcgattgatgcgacaatgccaaaaacgatggttgcgatgatgccacactggtgatgacgaagacgctgtcattgttgtcgggaattggtcttgggaaagcagcacaaagtttttgccgtcatttgagtcccaatgctcctccacggagggcgacgagccggccaaaaagcggacgcaaaactcaaaacggatgaactgaaaattaaattgcgattaaaaaggaacccataatccttgacaaaaaatactataataatatctcaattacgttattgtttatagagtatatggtaacaaggaaaagaagttctataaacaagaatctataaaataggattggtatgtaacggagcgcttttcaggtagtgccaaaatagtttttggtgctatgagcaaaaaacaaaaaatcgtctccatttccatccaaatgaaatttaaaacaatttcccgacccgtaccctaaaatacagtagggaatcctcttcccgcattggataatggcaaaatttcccaccgggcattcgttgttgcgcggcaacggcacatcaaagcgaaatgtgtcaaatgccttcgagggcgaacattgccattgcgcttcaacgtcgcagaacgttttccaaccattggctgtgtggcggacgaaca

SEQ ID NO: 3047 - DNA, 6428 bp, Heterodera glycines
tgttgtggtgatgtccacaagaacggtgacgatgctgacccaccactttttggcgtgtcgtccgtaatcggtgtgccgctgccgtcggcgattgatgcgacaatgccaaaaacgatggttgcgatgatgccaacactggtgatgacgaagacgctgtcattgttgtcgggaattggtcttgggaaagcagcacaaagtttttgccgtcatttgagtcccaatgctcctccacggagggcgacgagccggccaaaaagcggacgcaaaactcaaaacggatgaactgaaaattaaattgcgattaaaaaggaacccataatccttgacaaaaaatactataataatatctcaattacgttattgtttatagagtatatggtaacaaggaaaagaagttctataaaagcattagcaagaatctataaaataggattggtatgtggggacgggacgaaatctcgccgccgaaatctcgccgccggaatctcgccgccgaaatctcgccgccggaatctcgccgccgaaatctcgccgccggaatctcgccgccgaaatctcgccgccggaatctcgccgccgaaatctcgccgagacaaaatctcgccgccgaaatctcgccggctgaaatctcgccggccgaaatctcgccgcagaaatttcaaaaaaaaaaattcaaacttagaaatttttcaaggaaaaaattttagaaaatttttttataagaaaattccaaaaaaaactatttgctaagtttttttgaaaatttttcaaaaaaaacagtaaattttcataaaatttcaaaaaaaaattgctgaaaaatttttcaacaatttttttatttaaattttcttataaaaaaatttttctaagaattttttccttgaaaaatttctaagtttgaaattttttttgaaatttctgcggcgagatttcggccggcgagattttggcggcgagatttcggcggcgagattttggggtgcacccttggtatgtaacggagcgcttttcaggtagtgccaaaatagtttttggtgctatgagcaaaaaacaaaaaatcgtctccatttccatccaaatgaaatttaaaacaatttcccgacccgtaccctaaaatacagtagggaatcctcttcccgcattggataatggcaaaatttcccaccgggcattcgttgttgcgcggcaacggcacatcaaagcgaaatgtgtcaaatgccttcgagggcgaacattgccattgcgcttcaacgtcgctgaacgttttccaaccattggctgtgtggcggacgaacacatgcttttcaaatgccatgttggccacctgcaaccaattaaaccattaattaaggcattttgacatgtctcgttagactccaaatttttcagatgatacacccaatgccggacctataattgttttatttttgtcatattgcccattttgttacttttcgccgtgccgtgcctcagtgatgtcaaaaaaggcagtttaccaaatgtttttttatcattttgtccattttggcactttccatgccgtgcctcagtggtgccaaaaaggcagtttgtcacatgtttatttgcacattttggcattttccccgtgccctgccctagtgattccaacaaaaaaaggcagttttcctaatgttttttttatcattttgtcaattttggcacttttccccatgccgtccgtgccttgatggtgccgaccattcggctcagttcattcttcagcatcacattttcaagtgccacccgttgtcggtccaatgtgtcgcggaagtgcacatattcactggccggctgtttgaatgccatcttccaactgcgccgatggattgggccgccctttcgctgcctttcctcctccgcctcaaattcgtccaattcgtccgagtcctaccatgtgaaaaaaaagttattaaaatgaaattaaaagtcataaaaatagcaaattaggtgaaaatctgttaaaagtgtctatcggcatcgtttttgatccaaaaactttcaaatttttggggaaaaagccagtaaaaatcgactttcaaatcttattttttggggtcaaaaaagctcttgcttttagcacagtgcttacattgaaaaaaagttggaagcattagttttgaatataataaaaagaatataattttccatggcatttctttgacaccgttaaaaaattaataaaaaaaatgatctaattaaaatgtaccatctcctcaattgtcattgtcgaagcactgctgctgtttctcaatggttgaccgttcgcatcagtgccaccggcggaatgggcagcagcaattgcggaggaagccgcggctgctgcacgacgtattcgacggagaacagctgaaaaattgaaaaaataaaataaataaataattacttaatttaattctaataaaaaatattaaaatatcaaaaaagtagagaaaataatgaatacaaataagaaaatgaattttaatcattttaaatgttgaacagttaaaaatcaacgaatcaattctaaaacaaataccgtgtgacattaataaaccgtattctatacagtatgactcacctgggctgatctttggcgggtagtcgctgggctcggtcatcacacgcaccgtctccaggcactggccacagtcgtctgcgaaccgcacgcgcttcagagggcgcagcgcggctaccacgagcgggaacgacactgtctcggcagaaatggtgccaatgccaatgtggccgctgcaaattgccggtgttgtttccgacggtggcaaaatgtcaatgctggcaacggtgccgcttttgctgtcgttcggacaaagggtggcggtgcctttgccttcaaagaatgcccgtggagacggttcgtctgctgctgtttcactgccggcattgttggccatcagtgaaggcggttgcggcaacagtggcggcacaacactgccgtcaatggtcggacgacgatggcacagctcgacattgagcagagggacctgtgccggaaaattgaaatattgacgataatatattcttggtaatgcggctcaagaaaaatatgccaattatatagtataacagaaaaagcgtgatggtacttatatggcatataaaaagctacttcacttgtttttgaggtttaatacagcgaaaaattttaccattaatatgtttaagttccagatcacaaaattacagtaggattaaaatataaatatacagtatgactgaaagaacatttatttctccaattttccccacgcaacccatcgtttttgccccggctgtttgtcctaagccttataatttgccgttttaaatcatataatcaacgcacctgaaagggcagttgcaccaatggggacggctccgctggcatcgcaaggtccaccgaggcgagcattggcggcacggtcatatagtcggagcagggcggctcaaccaacgacgatggaggcagggactgctgaaaatacgaaaaaatatttcattgtttttttgtttctcgaaatttcggacttggaaaggtgacgccattggcacggcggcggcacagacattgttggcaccggtgtacagacaagcggacccggagtcggaggggacaagcgaaatgttgtccagccaagagtccgcataacgcggcgccggcggcatcggctggtgatgctgttgctggtgcaggtggtcagagaggccctgagggatttttttttgagtttcaatttttcgaggttagcgcggcccgggagagagagggaggggtggctaattgcaaaccacccgccagttgagaaaaaacccaaatttttaatacctcactgttcaacaaagatggtttgaaattcgaaatcatttattgatccgaattggctcaaccttaaaaccaaacagtttgccaaacttaaaaaaaattcaaaagggattggctaatttgtaggttatggaatcttaattttttcggtcttttttcaaacgcttaatgccgggaaaggcattgggaaactggcattttcattttgctgcgcacagaaaaagaatttttaagtataaaaattattgaaaatccaaaatgtggagcaaccaaaaggaaaaaagttacagatgaaaaccctcaaaaatattctaaccaaattattggaaatgagtgcaaagtcgcggatggcggtcgaactcgggaaaaggaagcaagaggaggaaggcaacaaagttggagttaagggcggaaaagtgtccagcaaaattgactcgaaaaccatcatcggcgaaggccgaagccaaatcccaccagaaaatgagaagaattcgaaaaatcagaaaaattacgaaatgcatgcaaaaccaaaaaaaggggaggaagtccctaaatttctgaaatccatcactttttcaccaaaattcccgttcaatcttttgaaatataaatttagaaggtgttattccaaaaaagccaaaaaaaatctgtagattttttaaaattgctatttttagtggggaggggagactttttgagtgcacaatgaacccgtacagataatatgcgaattagtggaccaatgaatggtgtaaatcgatgagaaaatgaacggacgttgggggcggggggattatcatctctcatcatcgtttattattttgtgtgtgccgtcgtccgtttgatgacccagaaaatgtttttcttcttttgaatgcactcactgatttttactttaccattcacagacagagaaagagaaaagagagacagcataagcaatttaaatttggaaaaaaagtttggcattttgtttatacaattttcataaatttgacgaggcgcggaaaatccaagacatttattcccatttcaaactcgagaatatcttaaggctgcctgcagcactcaccattttgtgttcttgctgttggtcgatgtccaggccctccaactgtcctaccaattcgtccaacacgttcagcatgggcggcccggtgccgccctgatgctgctgctcgtcctcctcctcctcctcttcttcggcacatgaaccggacgggctgacctcctcgtctggggacaccaacgagtcctcgccctccgagtcggattgcagcggctgcggctcgccaaagactgtaagatggacgaaaattgatttcgaatttcatagtgttagagtgttagcccggaataatatagggaaaacaatgagtcaaaaagttaaggaattcaaagtaggagtcgaaagctgagaacagtgaagacagattctcgattaggagctaagtatttcgggaattgacatattatccaatggtgccaagaaatccggggagaaccatgaacggaatgccacactaattttatttgaatttcttgcagtcgcccctcccactgccctttatttttggtttggaatgaggaaataagcattttaagggtggagaacaagccttaattgagttgaaacccgggggggggggggcggggggcgggatagttgcgtcacttcattgcatccaaattgctcgtagtcctaatcccgtatcttattctcaatttcccaattcacgtgatttcaataactttccatgtccatgcttctctaaccctccctcttcccgcttatatctcacatttgacttctcttccgctgccgaccgctggaagtccggcggactccgtgccggactgagcaccgccgttcccgcttttccggttccgccaaatttcaaactcgtccaggaagtggcgcggtttatgctgtgcattgttcagctggaccagcttgttcagcgccgccgactcggattgggagcgaacctgacaatgaaaaaatttggagaaatgttcaaatttgacttttgataaatagtttgcattttattttaagcacattttttcattttaattcttgactaaatgaatccttccttgggttttgagtcccggctcccattctttaatatttttttcccagaaatttcaacgcaaattgtcacgccgctcgagaccaggacatttcggcactcatttttccatgtcaaaattttttcgcattttaaattaggtagacagtttagcaattttttcccagttcctctgccatgccgtacaaaggaattggtgcgcggcgagggcgggacaacggcaccgcaactgcagcagcccattggagacaaagatggcacatcataatgttggtggtgaagatgatggtggtaatagtggtggtaatccatgctttcatccgcagcagcattcgtgttcgtaacatcgtaaatgccgagaaaagggttgccgccggtgtaatcgatggcaccgcctgcgccaatctgatgtgttcggcacggtgccgaaaatgaatggaacagccaatggctgttgatttgattgattttgccagtggatgcgatttgaatggcatcgatggcggaaa

SEQ ID NO: 3048 - DNA, 1199 bp, Heterodera glycines
caatgagtggtcgagagcgcgaaaaaaacaactgcgcgcgaaggtttttgggacgtacacacatacaatgtgtttgttttttgtccatgaaaagagagaagggttttttggaggaaatttgtaaaaaaaaaatttggggatttgtttttctggacagaaatgtttttttagagaaagaggagatcaatcacatgatggtgaagaagaggaatgtttttgtttgcactgagttttaagcgtttaaaactttaaaactgatttggaattatacaccggttttaatccggccatactttgatcatttgagcgtgggattttgaaaaacggaactccgttttaccgggatctcgaggcgtaaatttgtttttgttggctaaaatcaaaaaacaacctcaatagggtagcaaaaccctaacaaaatagccaaaaaccggcataatcgccaaattctcgttatgatcacaaaaatttcaaatcaaaatttttgaaaaattgaagagcccgatgctctttaaaaagatctctctgttcaataaacatttttcttataaaggaaggcatatagttcacacccttttgcacacaattgttattatgatgatgatgaccttctcaatttcattcgtaaagtgatcagcccacccaacaattttctgatctgatggaccaatgttacaaaacgccaaaaaggtataatcaaaacggttggggtggtggacattccaatcgccaaactttttttcttaaaaaaattgagaaatcatcaacttaaaaacataaaaatgacgcaatattagaaaaaaaatttcattgaaatattaataaatcaaatggccttggaacagtgtgtgtgtcttataaagtggcaaaaaacaaatttgtgctgataaaaattgataagaaatatatttaaaataaaacagtaatattatgaaattcgaatataaaattaaatcattttttgaaaacaaaggttgaaaataattttgaaataaaatatttgaaaaaataaaaattaaaaaacctcataaatttatcaaaaaaaattttaaccgaaaaaataaaaaagaactttccaatgaaaatatttaattcattttttttattacattaaaaaaccgattaaaaaatttaagaaaacagaacgacgaagggggtgtgaatggtggagaaggacatttgcactttgtggtttataa

SEQ ID NO: 3049 - DNA, 6358 bp, Heterodera glycines
  unsure (1)..(6358): unsure at all n locations
tttgtggctggaggaggggccggcgttattggttttgtgattggaggagggacggttactggtggctttacagttgtgggaggcgatggtgttgtatcagagggaggagctggcgtttttactattgttggtntagtagggcttatggcaggcggtggtgtcggcacttttggtgtgacgggcgttttcacagtttcttttggtgtttcctcataatggggcggtgactcctcaatcgccccttcttcttcttcttcatgatgaggcggagactcatcaattgtcccttcttcttcttcttcatgatgaggcggagactcgtcaatcccaccttgatcatttccatcgtacaataagggggagtcaagctgttttccgctctcattaatcactggcgatgacgcagctcttttttctcttttcaaagggggtggcgaaccgagaggttttgtccgattgcgattctcttcctcctcacgggggagtggcaacaactttgcaccactatgatttcgcaaagtgacagtcaaaaaatctctgagctgttcaaccttactatgcgatgccctgggcactggaactctgatcacccgctgtctgtcctcatcactagcacggcgatcggtgaagtgaatgtcaatccattggtcgtccaatgtgccaatggttgaccatgagtaggggtaactaatactatgcagcccacagacccatgagccattaaaatgtaaaggcttcgggaggcggacccgaaatttgttgggctgattgtcgggataatccgttacattgctcggcaaaaacacaaagaaactgtttgacattattgtttatcaacaacaaaatgaaaaatgtgatcgcttttatacaagctgagattcatgaatccattcccgattgggatatcctataaattttacaagcatctctgaggacccatctgctctttttctctttctgtacaccttttcaatacggtagcttgtgtctgcatcttttcttacgcgcgccagctcctgctcataaaagctgcccttgaatttctctccatgttcatccctcagtttgtaccgaatagggcgtaccgctttcaatacctcatcaatctccaggatttcgtccccataatttggcaaatatcctttctcaaattgtcccttctctctgctcatgcgcacaaattcgtctttacggaagcgtggcgaccgtttttgtattgcagggtgcccatataatcgcttccacactttttgggcatttgaaaagtcgacatcaatcgggcgcatcccatgaacacgagagggtgaactgttaatcccgtccacaattttctgtaccgcatccacccagttcaacgtctccttttccgcaaaatacctgtacaatcgctgcttcacattccgaatggcccgctcagcaaccgaagctttgacggacgaatggacgggctcgtgcttttcaatttcctgttcctcgaaaaattccttgatcaatctgttcttgaattccgtgcctttgtcggagaaaatgcgatgggggaccatgggcatttgatcgatcagttgcttaaatgcgtccaacatctcctcggctctcttgtttttcagcggtacaacaaacaaacgtttggataggacgtcaaccgcaacgaggaggtagcggtgaccccgattgtgacgcgaaagggcttgaaaatcggccaaatccacctggacatcggtcatgaatcccgctgctacagtttttgcccttggaaagcgtgccctccggggccgcatcagagtgtatgtacggtgaccctccaaataatgctgcacgtcccttttccgtaaatgtttcaacttttttcgcgcctctttccacaacgctgtaacgcctgcgaacgccgccggggaagatggactattgtacagcttgtcaagagtggtgttgatcagctccattttttcggacgaaattccttcttgattttcggtgccgtcctggtggtcgtgctctttgacggcctctttggcggagccgtccatgaatacaaaattgggtcctgcctaagcctctcctcaaaaatggccgctccaggtggtctaatggtggggcggcccgctctccggtcaattatatacctgatggccattcgcaaattgctatgcgccaacggcttaccgtttgctgtgttaattgtattttcccgaacacccatacgatccgcgtaacggttgcatttgatgtacagtcgttccacccgttgagtcatggtcagctgatttgatggaatggcaaacagttcacgttgttgctgttgttcatcactttgtgcagatgttgatggacccggttcgggcgagtactgtactcttacccttctcggttgcctaactcgttttcttatgcgcacctcatcatcaccatttacagggtagtggcgtttggtccccctcctaggcggaggaacatagggcatttcttcgacgacagcagcaggaggaggttgctgctgctgcgtctgtggtggcttttctttactttttggctcttttttcgggatacggtacggcatgggcctctttgtcggttcatgttttggctcgattttgtatgttgcgggagggaagtaaccggcttgtctagatgtggatggtcgagggtcgagcccggacattggctctcgattcgcccgaggcgctggagtagggtggtcggcttgctttggcgtcgaggctttcatttccaccaaattttgttcttttttttctatcttgacggaaggacgtcgtggaggtggaggagggggtggaggaggccttagttcagcttttgttttcaaacgaggtggaagtgggagtcgtggaggtgaagggcgataggtcctatgtcttttaccttgtaaatcggcatcatctgtctcgtccttttttaattttcttctggtagcaatcctgcgctgagcagtgtccatctcctcaatttcgtccgcgttgtcgggcagcgcaggcaaatcgccataatactgtgatggcgctggcagcgcaaacccactctccagcatataatcatattcatcatcactttcaggcaatggcgcagcagctgcttccgcaagaaggtctcgcacaattggccgttgtcgttgtatatcagatcgccttttatgccattgctccaatcgactatctctcctagaaggcgcagcagctctactcggtctgggaggacgttctggatgaggcggaggacttgatggaggataaggagcgggagctggaggaatgggtgggggccgaaaacttctcccagccggcgttggtggtggaggaggagccggaggactaggtccatgtcgaggacgtctcccaggcggaggaggaggtggtggcggggcgcgaggtcggggtgctgtgtctacaacctctccatcttcatcttcgccgcctttccttagcagtacacttattcctttcgtcagctcaactttggctggtctatcttcaagttccctcctcattttcaagtatcgcctaagctgttgattgtaatggacattttttgtactgggatgtgttcgctcgaccctggcacggtctaaatcatgtcgaacagcatccagatttaggtctcccgtgttggacatggaggtgagaccacgataaatttcttgcgggacaagtaaaaatttatttgccatctctgttaaatgaataatggaattcacaaaattcaacaatgatgagaggtatttatgcgtttttgttcacaaaggattttgccacttccattagaacgggtgtcaatagggcagcgaacaatccgccaaatcctgcgcctttctggacaagcactcgcttggcaccccgttcacttctcgctctgctgattcggcgtacagtatccacataaggcattagtcgcttcttctgtctggttgtcaattggaagcgcgaagcgacgagattcaaacaaatttcaaccagcgatagtagttgttcagtgtttgcttttcgtataagtttcctgcatttttttccggatttcgtcttggccaaagcacacaaccagtcgcgattctgttttatcagctctccaatctttacttgttgctgcttatgccgctccatttttgggaatgaatacaactgttccttcgtcttcaccctcctgctcatccttaaatatgttggttcgcagccgtaacgacggatctgatgcagcgtgcatatcaatcagcaaatagccatagggacgggcggtcgctttgcgataagcatcaaggaaaaagtcgagctgacgcggaaagagttggacgccaatgttgcgaatggacaacagggaattaggggcccgcatcaacaccaggtactgagcggacaggcgggccactttgattttacgttcaaacaaattttgagtgacgaacaccaccgcaaattggtggtgatgtgactttttagtgaacaaatcggacaaatatttctcgtcaatggacagcattaggtcatcgagaatgagcaagaggggctttgggaggcgtttgagtaattcttcggatgggactcccgaatacacatcgactcccgccttttgaagcggaggcactgccgaattcatttcaccaaaacaatagagcattgagacgggctttggtgtgattaattgatccgcttcagcaataaattttaacaaaaattcagtttttcccgatgaggagggacccgaaatgattagaccaaacggcaatttaaaacaaatatctttattggtaaaggattgtgtattaagcatttttagggacaaaatgatttacatgtttgaggtcgaagctttaatactatcaaaaaactcgtcgagcgttttgtcaatgtcgccaaggtccttcttgttttcctcttcgtctcttctgggctcttcctggacataattctgttcctccacaggactgtttgtcactttgttgtccaacgattccgctaaaagtaggttcccgagtacactgattgcggttttggccttcttccaacgcacgccgtcctgcatggcatcggccattagcccggcttccactaaatcaagtgctaccttagctttgcgcttcaggtcctgctgctgcatatcggtttgcgttccttgcgttgtggtggtggtggtgggagtaggagtggtgcacgtgtcggagggcaggtcaccgtagggcacgttgaacaccctggccttgtttttcacacggaagaagcagtggccaggtagatcataaacggcatcaaatgggacgaattgggacttgctgacccggctgcaccacaatgtgatcccctctttggtcaccattgtgtccacctcaacctctgttgctttacatgcgcggcaacggccgcattcatcgaacggaatgaaccgtggtgtggacagacgtggcccactcacggttatgccgcttgttgtcactgtaatgtccgcttgcccgaggatttgattcacaagcgctttcttgtcgcaaatattaattgccatttttatttgggagaaaatttttgagaatgaaatggaggacggcagattgaccagctgcttatatacagccagccgtttgtgaagacccgcccattttaagtttcaaattacgcagacggaatttgaaaagatgggcactcttaacagagccccgtgtgagtgcgtcgctgattgggcactcagaactgagtcccgtaccacattcaacactgaaaccaccccccccccccccaccgccccaacaattcaatataattctcacaaattaaaatgaacttttattttaacagtgccaaaaaaagcgcatcaatttaaaaatgaattcgatcacaaaacgatcactttttttgggcgatctgagcacaaattttgtccaaaatttgcttccatttaacaatcttttcaaacggcatgcggcgctcttgtgcaaatgctaacacctcctggcaaacgtcgcgagccgtcaccggtgtgaaccaatttaaaatctggaataataatttttgaaaatgaaaaatgaaaaaacattttttacgttgtcgtcgtcatcctgcaaaatgtcgtaccaggatgacaattcgcaaagctccatgtcgggggtaggtgagcgacggtccgctgagtccatagctaaacgggcggatttttagttgattaattaaaaaatattaaattaaattacgttgttgagacgttagtgaaaatttgcgaaacggaaataataataataatattttatttattaataaatgagtgagtgaatgaatctcgctcgtacaatttccttatttatagtcaaattttgatctacaactaattaaatgtgttacttgaccccctatttgggcatctggcg

SEQ ID NO: 3050 - DNA, 1380 bp, Heterodera glycines
ctcacaagtgcgggaaattttccctcaaaaaactgcccccataggcaccccccttaattactacataattattttttttaaattcacaaaaaagttttctcccccttcaaatgcgcgaaaatttcccgcaaaaactaccccctcgggcatcccttaattacccacgctaattaattacccccccccccccataggcatagactcattcccgcactaatttgtcaccgcggcaacttcaaaagaaaccgcaacccatcaatcacccgctacccgctacccgccagggtaactaactactggcatgcaggttgttcagctgggcctgggcgacatgtttttgtccaggcgagatgccgatcgaatgtcgagcaggtgattgcgcactcctcccattttgaatcaaaagccatcggcaggactgttagttgcttattcgcatttcggtaatcaaagtatacaatacaagaaccattggacgtttcggaaggtatgaaattttcgattgatggttcgaaaagcaaagtgacaaaggagagaaatacgaataacatattttgttcagtaaaatagtcacaaaatctctttctctttaccttatttatacccagtaaaatgcacttttatcacttttaagagaacgaatttataatctccacttggctgagtactttaattaaaaaggcccagacaaaaataattggttaaattcgatgaaagaactcatcattcgtaaacaaattaaaaaaataatcaatcttccattcgccactttaatgaaaatttaaaaaaaaattaatatgataggacgcgtaaaatgtgatgggacgcgtaaaatgtgatgggacgcgtaaaatgtgatgggacgcgtaaagtgttgttgggacgcgtataatgtgatgggacgcgtaaaatgttgttgggacgcgtaaagtgtcatgggacgcgtaaagtgtcatgggacgcgtaaaatgccatgggacgcgtaaaaccgactagaacccttttttttcagttgaccaaattctataaatctaatgtcatttaaaagtactttacgagctctattagctttataaaaaaaaatcataattattgtccaacatgtaaaaccagggctctaaattttttaataaggacaaacgaggttaaactaagattgtgaccccaaaaataagattttttgaaaaaagcgtccttttagagtagaaataattaaatacagggctaccaatttcaaaaccagcatttggacgacaaaatccgcattttggaaattttagccagcgactcgcttttaccaaaaaattttcttggcaagagggggccagcggtgccgataggcgccgccgggaaagttttttttttgttaaaattgagtta

SEQ ID NO: 3051 - DNA, 1580 bp, Heterodera glycines
  unsure (1)..(1580): unsure at all n locations
acatatttgcttgtttttgtgtcctcgtgccctaataaataatgccaccgcaattccatcgattggattagtcaaatccatcagcaaaaaatgccaatgccatacaaaaaaagaaagaaaattgaataattaatttcaaaaaatgaccccaaatttaatttccctaatgcgtcgagagatgaaatttttttcgttttttaaagctttttatgcgcctccatttaaaattgaaaaaaatataaattattttaaactgatttaattaatgagcataggtgccgcaaatgtcacctccaaacccaaggaaaacaattgggtgatccatcgaatcttatataattgtttaattcaaaggagaaaaacaacaacaaaaaaagacaaaaaatctgtgacggaaaatttggtaaaaaacatcaaaaaagcagtaataaaatatcatttcctccaacacacattcacctgatcagtgcggtaacgttgtgtgtaagtgcactgaaaaagtaattttcataaaaaatgataaaaatggcaattagtgagtgagtgaattaattgcctggtcaagcgatgctctgagtccggcacgatacatttcccagccggcctaaaaaacaaatcattgaaattggatggcgaatgattttttcaaagaaaacccttcaaagatctatccggggataatgcccccccccggggggcatggctgaaattcaatttgttaaatgcaaattttaaaccggtttcagctttaaaaacggcagtgccgagaacaggaaaggccacgcttggtcaaagggaattttgaaaatttgtgaagaaaaatgagaaaatttgtcataaaaccctataaatattcttagtgtattttcaaattctttcacgatcttaaaaaggaagttcttttctattaatttgaacaatattttgaaaaatttaatttatgctaagaaaaaatctctaaaaaaagaaaaaattattgtttttttttaattttggaaggaacgaaaaggggaaggggtcaaattactccccagaggcacaaaaaacaaaaggtcaaattagaagccgtgctttgctgtgtgtcacccctgctgaaaaacacctgcgcaatcattgcgccgttgtcaatgcaaaagcgttcgtcggtggcgaacagtttggcgccccgttcctgcgccattgtgtccatcatttgttgcagtcgctcgttgcagccgaccccgccgacgatgagcacctcggcggtaccgctgtgtgccatcgcacgctcagtgatttcgacgagcatggcaaacactgtctcctgtgggtgtgtgnngatacggtatacgctacagaggggtggatacggtaggacaatgctacagtacaaaggtgcactaattcaccgccnacgcacgcccgaaaattttttgaaaaatttttcaaacaaaaattatcaaaaaaaatcaaataaaatttttccataagaatgaagaaaataaaatttttgaaaaaattttcagcgtattttgcgaattttttgatcattataaaaccttaaatcgctagaaagttttttcaaaaaatataaaaattaa

SEQ ID NO: 3052 - DNA, 2731 bp, Heterodera glycines
  unsure (1)..(2731): unsure at all n locations
ctaaaaaaattccttcaaaaggtcannattcttaggggtgtaatatatcggatttcaaggcaaaatccgattacgattatccgattccgattatggcccaaaatccgattaattgcgattccgattacgattccgattcggcacatccctggtggatacgatatgataatgctacagtacaaaagtgcgctaattcaccccccacgcacgcccgaaaattttttgaaaaaattttcaaataaaaattatcaaaaaatcaaataaaattttccataagaatgaagaaataaaatttttgaaaaaattttcagcgtattttttgatcattataaaacctttaaatcgctagaaagttttttcaaaaatatataaaaattaaacaaatttccggcactcaattttcatgaacgatgcaaagctttgtttaggcttttggagaccaattcacggccgacaacaattttatttttgttacacgcagcgaaattttaaaaattgttcaattttttggaattaaaaaattccttaattttatgttttgatgttccgctagaagttcacctgaagtgagtagcacaggtcggcggctgtgtacgcgccggagcggatgagcgcgggcgccgccttttcaatgtgtgacagaatgccggacagtgacaggtccatgcccttgacagcgtacggcaacgggtagaacttggtgccctgcttggccaactgttcaatgttgtggcccgggcttggctcgttggacaggcaaagcacacgcgcaaagcgatctttcaaaaaatcaaagttttgggtaaataaatttaaatttttttttttaaattagggccgaaaatgctaaattaaggagaaatgtaaaaaaacaaaaattgttgcaaaaaaattacccaaacagttgccgacggcaatgtccaacgtttcgccaaaaatgcaatagcaatggttcaagtaggagatcacctggggcagaaaaaaattcatttgtaaaatataaaaaaatttgatatccgacgaatgatttctattttttcttaaaaaaagttttttgtacgtttctgccctttccgaatttttttttttaaaagaaatttcaataaaaattttacagcgattttttttgtaaataaaatttattaatttttcattaaaaatttcaaaaatcgctgaaaattttatccggattaaaaaatgttttttttaattctatgctaaatagtttctaataaaaacatttcgggggagggtaaaggcggggggggggggagggaaactgctcgcccacctgagtgtttccgccgctgacgtacaaaatcaccggattctcggcaccggtgatcagacggcccatttcaatgtgtccaatgcaatggttgaccggcagaattggctttgcccacagttggccaagcgttcgcgccaccacagcgcccacctaacaaaacgaataaaatattggcaccacagggatacgcgccatcacaaaaaaattgtaaaacaaagttcaaaaaacgccatgccaatatttttacgaaaatccggcacggaccaacccaaaaaacttgggcaaatgccgggcttttagcaacaaagtaaatccagttaaaaacccaattcagtaaaaagaattttccgtattgggtgagggaagaaaatggaatatatttctaaaaattccattttcgggaaggaggatggatttacggctcgtaattacgtataattgtcatgtacaaccccaaaatccacataaaataatgaccaacagaagagagcatcatttgcattggttacctgcagctaaaataaaaaatatttaaattttgattttgtttgctttaccggtgctcccatgcccggtccctttgtgtagacaatcgcgtccaactccaacacgggatccttgacaagaaaaatgggctattattaaacctttcctggctaacaattgtttgtgttagggcccctaaatttggaaacaaaaaattggacctggatttccgagattttggcttggtaacacgaagggggggggagatttttttggggtttttttcccgatttgtgagcatctttgaaaataaatttttgcttcttggtggtttttggggttagttttccgcaggacaaagttaaaaattcagcactcggaaaaaaaatttttcgtaaaaagtttgccttgatttgcgcctcctgcagtgcctcgatgaccaaactgacaatatgctgacggtggtggacagccgtctcggtgggccgaaagccttggcccggcggggcatggaatgtccgtctcgggttggccaacacagtgccgtcccgcacaatgccaacgccaattttgttggcactcccctcaatgcccaaaatgcacaccattctcctcctcctcctcactccactgctcacacagaatcagatgaccaacttctgcttcacaatctgctcaagtttctgcaaaaaatgggaatttgaattgggtaaaaaatttattttttttttaaatttaggattttcacaaaatttaaatttcaactcttacaactttttagggcaacaactgttaacaaatctcattaaaattaaaggtttcccgtgagattcgtttgaatcattcggacgcccaatatttttttgaattttcggggagggaacgctcccaagtttctgaatgtaaataaccacaccaccacccaccttcaatttgtgctccgcctgtttgttg

SEQ ID NO: 3053 - DNA, 2133 bp, Heterodera glycines
gttaaaaattcagcactcggaaaaaaaatttttcgtaaaaagtttgccttgatctgcgcctcctgcagtgcctcgatgaccaaactgacaaatatgctgacggtggtggacagccgtctcggtgggccgaaagccttggcccggcggggcatggaatgtccgtctcgggttggccaacacagtgccgtcccgcacaatgccaacgccaattttgttggcactcccctcaatgcccaaaatgcacaccattctcctcctcctcctcactccactgctcacacagaatcagatgaccaacttctgcttcacaatctgctcaagtttctgcaaaaaatgggaatttgaattgggtaaaaaatttatttttttttaatttaggattttcacaaaaaaatttaaatttcaactcttacaactttttagggcaacaactgttaacaaatctcattaaaatttaaggtttcccgtgagattcgtttgaatcattcggacgcccaatatttttttgaattttcggggagggaacgctcccaaatttctgaatgtaaataaccacaccaccacccaccttcaatttgtgctccgcctgtttgttggacaattccttgtttgctctgaattcgtcacggattcgttggctcaaatagtcagggtcggacagttcaaactcggcacagaagcggcgcaacaaatgtttgtaaatggaaagcacttttgttcgatgtgcaaccacggagcggacagggctcatcaaacaaaccaaatagaaatttgaatgctctaaaaaagagagttatgtttatttatcggacagaaaattttggagatattaactggcacaattactgtagccaacagtaatcaccacttttttacagtaaaatgagggctccaaaaacccagaaacttggggagtaccgtatttactaaattagactcccctccctctgaaataaagacctccttttgatggggtttgaaaaatagagtccccaggggctcgtattcagtaaatacggtacattacaaccatttaattaggtgagaaaccctcatttgaaaagtcggacaaaaaaacttttaaaatattagaagtatatatgtaccattattgcacgggcgaacaaaatggcaatgaatgaatatcattttcttgttgataatatatttcttcttgactagagcatacattatttcatgcattttgtgaacggaatgataaggaaagctcggcatcaataaaatataatcgtggtcaattgcatccgtccgcctctctctccatgttctcacattgtttcgcccattttcacaatttgttgcgccaacaacgggatgttgttcaatggcattgccgtcgtcgccaactttggcactgtttttgttgcgttggcaccggcgatgccgccgtcatcatcaccgtttttgttgttgttgtttgtgtctgatggtccagctgatgcagtttgtgcagcaactgccaacagtgtacggcatcgttcccaacaggccaaactggcgtacaccatcagtgccagactctgtgttaaatgttcaaaatgttggcaatttttttggcgtaattatcggctcgcaaatagtacaccaatttgaatttttagatggacaaaatcgaactgtcgaaacttaaattttttgttcctcgaaattaatgggttctcctcactcatatttgtgtgctcaaaaactaacggaaattttgtttcgatttattattaatttttcgatttcaattggaattttattttccaacaggccaaactggcgtacactttgtgttggatgttccatgataaatatgattgatcattcacctggcgtccaattgcctcggtggccaaatggttggcgtagcgcataaaaatttccacaaaatcacactggggactcatctgtacaaaagtttccaaaattattacaaaagcctgctccacctcctccaccaatggcatacctttgcataggccaaactgtcgtgccaaagtcccctgagagatcaaatatttgcacgcgtcgaatgcctggtcaatcagcgaaaggagtttgatgccttctacaggtaaaagtggggctgttaaatatttcgagtcaagtttctgggtaaggcaaaaa

SEQ ID NO: 3054 - DNA, 1153 bp, Heterodera glycines
tacattacaaccatttaattagatgagaaaccctcatttgaaaagtcggacaaaaaaacttttaaaatattagaagtatatatgtaccattattgcacgggcgaacaaaatggcaatgaatgaatatcattttcttgttgataatatatttcttcttgactagagcatacattactatagtttcatgcattttgtgaacggaatgataaggaaagctcggcatcaataataaaaatataatcgtggtcaattgcatccgtccgcctctctctccatgttctcacattgtttcgcccattttcacaatttgttgcgccaacaacggaatgttgttcaatggcattgccgtcgtcgccaactttggcactgtttttgttgcgttggcaccggcggtgccgtcatcatcaccatttttgttgttgtttgtgtctgatggtccagctgatgcagtttgtgcagcaactgccaacagtgcacggcatcgctcccaacaggccaaactggcgtacaccatcagtgccagactctgtgttaaatgttcaaaatgttggcaatttttttggcgtaattatcggctcgcaaatagcacaccaatttaaatttttagatggacaaaatcgaactgttgagacattaatttttcttccttaatgtagaattctcctcactttgtgtgttcaaaaactaatgaaaattttttgcgttttttaaatttacgttttcaattaggatttttttttgctcttcccagagtacaggaccaccaaaaatttccccagataaacattagagttccatgataaatatgattgatcattcacctggcgtccaattgcctcggtggccaaatggttggcgtagcgcataaaaatttccacaaaatcacactggggactcatctgtacaaaagtttccaaaattattacaaaagcctgctccacctcctccaccaatggcatacctttgcataggccaaactgtcgtgccaaagtccctgagagatcaaatatttgcacgcgtcgaatgcctggtcaatcagcgaaaggagttgaatgccttctacaggtaaaagtggggctgttaagtattttcgagtcgagtttctggttaaggcaaaaaatagcatttttagcattcatttcgacaaaaataa

SEQ ID NO: 3055 - DNA, 3448 bp, Heterodera glycines
  unsure (1)..(3448): unsure at all n locations
ttaattttaaaattttttgtttttcccgaaacttttcccatgaatcgtcagagttgtcttttagcaagataaaatcaaataatacggaccagaaacaaaaattggatgcgatcagattggttgcagtcagcttgacaaggcagcgcgactcttccgtggcaaacgacgcgggacagagtgcaggcgcggaacgcgttcagccgcgcgtcaccgccacgcgcnggcggttgcggcgccaccgccgaacgccaattggtcattgttgagcaggtaataaagtgccaagtcattctgaacaagtcgtgtttaatttctgaagatatttcggggaataaaatgatggaaaaggcccaatgaaatgagggaaaagtgagtaccgaagcaaaaaaatttttattttcgaaattccggtctaaaaacgtaaaattgccattgaaaatgtgacctttcgcataatcacgcatttctcaatggccatttccaattgccgttctgtgcgaaatgtggacagcagcaagcgggtgaagcgttcaacgcgtttctgtaaaaatgaataaaaatgatctttcaaaatgatgccaaagatttccatggctacgccaatccgtctcacaatcaacaaaaagaatttcagtacaaatggcaggtgatcaaaagttggacaccacactttcaaaaaacaacccgtttaagtgtacttactacacacaaaggttggcacgaattccaatttctgtaaattttcggggcctcgaatgccacaaacttggtacgcttttttgggccaaaaaagcatcaaattcggtggcaacattggctgacgcaattgtggcggtggcggtcgatttgctgcgtcatctccagcggtagaaattgtcgtcgtcgccgcacattggacaatccggccaaggtcagccaaacattgttggccgacaaattggtggaggacaatggcacggtctaacggtgttcggcagcattttgcggacaaacggttgatcaaatggtcaatgtcggggtcgtcaaatgtgtgcaattggtggccatcatggtcaataccaaatgggacagcattttcttggttggacttggtggttgtgtcgtcgttgttgttctgttccgccaccgccgccggtggtgtgtcagttgacaacaacgacagcaatgcttgacagtacgacgggcgcaacaacaggggaatgtctgacaacaaaaaaaaatatttaaaaaaatttgatgtcacaaaatcgggaccggatttgatgagtggcggcgatgtgttcaggttggtgttgttggtgcgacttttctcatccgtgtccgaaaatgcaaaacgaaacatcccatcagaggctatgtacactaaatgtttttattttttatatttaaatttgagagtgagtgggagagagaaaaaagggccgaagagggagagagttgacagacagtcagagaaaaccaattaaaaaacaaatagaaaaaactatagtataattgagtacccggattcagtccgcacatgtcaatgtcgatgatgctgtggcccggtttttgcagtgaaaacagcgactgcaaccgttcagtgtcccacactacaacagaggttggatgctgggcctaaatttagtaaattttttttttgaattttcgaaaatcatttaatgctagctagaaggaaaatttaattcatgggaatcgaggtgaaaattagcaagattttgttagcaaaacagcaacaatcgcaaaaaaattggctattttttgagattttttgtagtaattcttccatttcccccgtggtacgtacgggactgaacttaccgcaagtgtgtagtcacccgtaagccgtgagaacaccacccgttggactgggccccgtgtggactgactaaggcccgtctgacgacattgactcctcaaaaaattaaaaatccgaattcaaacattgtacaaatacctggccaagtcccaaactccaactcggccggcactgtccccaaatgccaacacgtcgtccttccacaccatacagcgaagcaatgcggcgccggatttccactttaatacaacaaattataaacagatattgttgctctttatcaatattgccatgaaaaagtatcaaactggcaaaaaaaaaatttttttttttttgagggtgtattttcttatttcccatgattttttatataatgtatctctaagtaaaccacctgtgtgctcacttccttcccatctcgcacatgtaaacccttgacaacaacatggtaactaaattttttataaaccattaaaaatggaataaaatttcttacgctaggcttgaaaattaaaaaaaaaatccaacttgcaattttttcatttctaatgaataatatgtaaagagaaatatgtaaattgtgtacagcaaattgttgttgtccaacacgaccaagttttccctatggatttgcgtcttctcgttgaccagcttgacctggtggtgcttggtggaccaggccatgtccacaatcactggacactttttggacatccgacggagcagccgaaaagtgttcaaatcccaaatttccaacggatcactgcgaaacgaaatggccaagtaacagctgaaaaagtgcaatttaatgaatatgttaaaaaattagacgattttgagccaattttttccaagagaaataaggatttttagtgaccgcaagtgaaaagtttcgaaatttaatgaattttgttagaaaaggttgttcaagtttaaaattgttcctctttttccgcttcattggatcgggaccgggaccatggaaaatgggactgataaagctcctggaaattccactccaatatcaaatcccggttccgtctgtttcaaaatttccctgtctctgatttttatttatttatttttaatttataagattttgccatattgctgctttcatttgtccaccccaaaaacggacccgtaatgactgacacggagcagttcaacagggccctcctcctgttcgggccgtactcgtcgtttggttcccgttcgaatgtcagtgatgaaaatgtcgttgcggacggtggaggacgaggcactcaacgaggacaaataggcagccgaaatgaacgcgtttggaccacaccattcaaggcatttgaccgggcacgagtgcaccttttggggtttatgacttatttggacgaattttccattattaaaaactggggacgaaaatttttaagaaaaatggaaaaaaatttttgaaaaatttttcgagcatttttttcaaaaaaccacctgcaagtcgcgctcaattcgtcccgaaaatacgtccaccaaatggatacagccggtgctggtgccaaccgcggccaaatgtggtgccaaagtgccgtcaaaaattgttgtcggcatcgctggtggtggtgccgatattgtgcaaattccactgtcctggtc

SEQ ID NO: 3056 - DNA, 2391 bp, Heterodera glycines
caagggtactcgtcgcccgtgccacaaaatcatggatacctcagttgctgatgcctgtccatttcactgtcaagtgactcagcatcagtgtcatcgtcgtccgtttgttggagaatgtcatcaattgttctgatccgatagggctccaagcaatgcgaaactgtctcctaaatggaggagttaaatttggttttttaatggaaagaaattttcggtgttgctttttatagatgtggaaatacttattgttagttgtaagtactaaaggcccccaccccccgccccaaaattttttgttttttttttggcaatttttaggaaaagttggttagtgactcaactcaaaaattttttaaaaatcgctagaaaattttttcttttattttttttataaagaaaatttcgttttttgtgctttttagaaatttttcggagggaacgaactgctcccaagtactagaccccctccccccccccccattttttttgtcacggctcaccaactgcagcacaacaattcggccggtgttcaacagcagtgcaacggttgactgtgtgaccgggcacagcgcggcgcccatcagacggacgcgcgccgattggcgttgcgtcgattcggcaacgcaacggcggacaaaggccaacgaggcgctcatccgttcgtcggccaagcggaaatgggcagtgcgaaaggagcacagcgtattctgatggaccaggaacatggcgtcacgacgagcacagggcaacacctgcaattgaaaaaggaaatttgaatagggtaatggatttttttaaattttgaaataaagtgcctcattaaatcagcgaagcaaaaggtcggaaacgggacaactgggcgacggcacggttttttgggtattcgaatcgaatgaaagtgatatgaaatttttaacgagaaaatttctgtcccattttgaaggcgaatcaccatataattaagcacctggaacagcggtgagccggcgtcaatcacagcgctgtaaacaagttggaaatgttgcgtttggaccaagcaaatttcgttggggaacaacacaatgaggtgatgttcagctgccggactgtgcaccatttgcacaatgtgtgtctccgttttgctgtaaatgcaacggttttaatgtgatttgttgtattgtttggttgaagaagacggattttctggtataatccgtggcaaatccctaatccctcatacaccgaacgttcaatgggtgcgccaaatgaggcctaacctgtgttgcaactgctgttgttggtgaccacaaattgcattcagcgtctttggctccagttggagagtggtgttcaatctggtgataaatattaaaaaacacgataaaaaagtgcccatcaaaagatgcaccgttgggaaaaattattaaaaaaaagtatttttttttttagaaaatgcaatagcgataaaatttgtatttacaaccattgcttttttgtttgcccacttttactattctttttggtcatgaaatttacgaattacccatttttataacctctgattgttggtgttggacattgctgatgatgaagatggtgatggttcggctgcagaagaaagtgcagaaaatggtgaaaagccatggacgagcaaaacggaggcgcattgggaggacacttaaaaaaagtcatgcaaatttaaatttttagaaaatccatccacagttttatttaagagatacatgcgcaacaggaatgtctcgaaaatgcagattccgagatatttagggctcggattttgtatttcgagattttttagccgtcagaatttcgatttccaaaaatattccagtcgtcggaatgccgttttctgatattttttcagggcgtcggcacatatctcttatgcacaaaatgaagttttgaattttacatgtaaaatccagaaattttcttacgggcaatcctggaatggtcgaacgggtcgatgctcaatttgaagacggacgtgccaaaacggtgctcccaaaggcgttcctttttgcccacatcccacacaatgagcgcattgttggaatggagtgaggcgagaaaatctctgctcatatcaggcaaactcagccattgcaaatctgaaaaaatttgcaaaaaatgattttttgaaagtgctaatctttgcttttaggcatcagaaatccgctgcatggttttttcattagtgtgcctttgttgacatattttggaatgggtttaactggagaccgggccaagtctcgaaaactgacccggcgatttttggaaaaatcctgtttttgagaggtttttgaaaatgtgtttgaaaatttcggtttctaattttaacccctttcgccccagccttacgaaaattgtcagtgtctaataaataccctg

SEQ ID NO: 3057 - DNA, 8074 bp, Heterodera glycines
ttcctccattatcgattttccatcgccattatttcgccccctataaattcacatttttttttttgctattttatcatttaaaccgcatttcatctctctctcctcttattagatcaaaaacaaaaaaatggaaaaccgtcctccaaaacgcccattcccattcactattaatgatattctcaccaccccgccaccacccaaaacattacagcaaggcttcctcatcaatcagctgcttggtctcaccgttcaggagggtgaaggggccgagagctcatccaacaaaaaactacccagcgaatttgttgaaaagctggagtgcagcgttgaacatgttgccaaatttaactacacgaaagtcaaatcgagcttcgtcatccgggatgtgccagccgatcccgaaagtcttctttcctccatattcaagcactgcattgacgaagcaaaaagcgacagccgtgagaagagcagcgaaccaacacaccttggatgcctgatcagcagtgcattattggatggcggtgatgtttttgtacccgtgcgccaaataactgccaacacaatcgacgccattctgaatctgttcaccaaagttgcgcagtcaaaacaacagaaaggtgttaccctatggggagagccgttcaccattaccataacaacaattgatcgcagcggacttccggtgaaacggcacatcaaagggggcgccagacgtcgtttgacacacgttcagcaccaagtgcatgagaagtgcttgatcaaggtgaagcgtacaacttatttattatatcatcgactgacaatttaagatcaataaccaaaactgggacaacagtgacaacaattattgccttttctatgctctacaggcaacaatggtatcaaagacacgcggatggccgagctggaaattttttcgctacataaacgatcaatttggacaacgcggattgttacaccaagaaactgttcaactgatgcggcaaatcaaagtgccactggatttggacgcatacgatgccgacacttatgtgccgctggtcatcaaccactggaataacgcgcaacagcggcatcgctttgccgttttcatctttggaacaaccggccactacaagccgctttacaaatacggcaacgacgattacgatacaccattggttctatattttaacaacactcatttcgacgatgtacatttcctcagcggactttttggtggaaaaaagtattgcctggagtgcgagaagccttataagaagccgtcggaacacaaccagacctgcaaagcgcactgtctgatgtgctcgcgtgttggacctgcgtttccgtgtccctcggagcctgacttcttccgaaaatgcaaagaatgccacaaaaacttcaacaacgcgggatgctacaatcaccatcttcaatccaactactgtaaacgttcaaagaagtgcaaagactgtggtgtaatttggaatgttgccgacaacaacagacgggggcgaaagggacatgtgtgcggtgaaaaattctgtcaactctgcaacaacttccacagcacagagcgcggctgcttcattgcaccacttgagcccaaggatgagatggaagcttatcgattcgtggcgtttgacctcgagacgatgcaacacctgcctgctgaccctcatctgcctgaacgacgcaaccacgagcccaacttcatagcagcaaaggtgtcttgtcccatgtgcattgaaaatggcaggtggaagcaaggaactgccggatgttggatatgcggcccacaccgaaccgttgctttctgccaacgaccatttaccgacactccggttgacaagcaagtggtcaccgacaaccccatgcaagcatttgttggttggctgatcaacgacttgccgatcaaggccaacaccttcgcctactcacattttggtggccgtttcgacatggtcatcacattccgggagctgttccgtcgcggatataacccggagatgatcagacgggtgagtatgtttttacatatattttattctgataaacaaattaagggcaataaaatgtatgaaatgaagctgagggcgcagaagaaccgacaccccaacatcgtcttccgagattcgttcaatttgatgccctgtgcgctaggtcagctggtccccgcctacggcttggacgtcgaagagaagccattcttcccgcatatggtcaaccgtccggacaactatggccgcgaaatttttccgacccccgacgactacctcgcccatggaatgatgccagaaaagagacgacagtttgacaactggtacgaacaacatcggagtgaaccattttttctggacgaggcattggccagctactgcaccaatgacgtggagatcttaatggcagcgctggtggcatttcggcgggagttcttggaaatcacaagacgtcaagaacctgtggacggccgtgaaacgcacaacggaattgatgttctgaagcagtgcatgacaatcgccagcgcctgcatgaagcacttcaggacaaatcatcttcctgctggtcatttggccatcgtaccggaaagaggctacgacaacgcccaaaaccagtccctgttggcccttcgcttcttcaaatggtatgcagagaagcacggagtgcagctgcagactgcccactcggcaggcggagagaagagagtcgccaactactctctcgacgcttggatcgaagcggagaagagggccattgaagtgaacggtaatttttacaaaaaaaatttttttttttaatgacagcaaaatttgtgtaggctgtgtgtggcacggatgcagcaaatgcttcccggaggacaacatgcttctgcccaatgggaaatcggctggagaagtgcgggagcgagacgcgaaacgactggaatttttgcgaaaccaagtgggcgttgtggacgtctactgggaatgcgagatcgagcgaatgctggcgtcagacccggagatgcgccaggcctttgcaggctacgtggatgacggaccactggagatccgtgctgcattcatgggcgggcgcactggcccgctcaaactcttccacaaagcgcgggaaggcgaaaaaatctcgtattacgacttcacgtcgctctatccattcatcaagtcatttttgatcagttgaactaaatttgttattacatgacattattagttttaccacgcgctacccaattggtcacccaaaggtgcacgttctgaatgaggaagtggaatggaagtgcgcaacggacaacccctacgatttgtcgctgctcaaagtttgggtcatcccgccgcgtcaatgtgatgtgcccgtcttgccggtcaaagtggatgacaggctgtgttttccgttgtgctacaaatgcgctaaaaaatacccgactggcggtgttgacaacaactaccattgtcggcattccgatgaacaacgcggttgggtcagcacctgcacctcgcttgagctgaacgccgcactggacgaaggctaccgggtcaccaaagtgttccgggtgttacaatatgagcagagcgacgaccaactcttccgttcctatatctccgagttcatggcgttgaaaatccaggcgagcggcttcgactccagcatcaaagggaataccgaaatggagcaagagtttgtccgcgagtgctacgaaaattttggaatcaccatcgacccagccaagatggagccgaacaagggcaaacgctcaattgctaaattgtgccttaacaatttatgtaagattttttttcatttaattcatcaaatcaaatttgaagggggacgattttcgctgcgcaacttcggtctgtcgcagactctggtgaccgacgaccccgctgtcttggctgaatacttggacaaccgctcgctcgaggtcacggcgatcgatgagcttgatgctgagcacattttgatcagctatgagacgaaaaaggagtgggtggaggaaaactcatgctccaacataggtggaaattttttgtttcaattgaactaataataaaaatacctcaagttatctccctgtggaccacttctgcggcgcgtctcctgttgttgaaatcaatgcagaaggtggtgagaactccttcctgccaactcctatacaccggtaaaaatcatatattctatgtacataaatacaattgttcagacaccgacagcattattttgacccatccggatgacaattgcccactaaagaccggcccacaccttgggcaattcacggacgaataccctaagcatgagattttggagttttgctcgggaggtgccaagcaggttaaaaattttcacttttaactattaattctaaaatgaattttagtatggactcaaattgcgcagaaaggacgcaccacccgacgctgagaacgaatatgtgctgaaagtgcgcggcatgacgctcaactatgacgtcatccaaaaccaagggctgcgctacgagacattcaaggaaaaggtgctacgatttgctgaaactggtgagccccaaccgatcaatgtgatataccccaattttcttcgaccaagcataaaagatgggagagtcatatcctgcccccaccaaaaaatatataatccctttgtcggcaaaggtattgtcggagccgactataaaattttagattttggtcacactttgtaatcatttttgcatattctttgtatttttcattttattgcttgcattattaacgaatggaaaataaaatatgaaaataattaagcaatggaagatgtaacttttaggtagaaaaaatgcataattaacgatttgaaaataaagttttgaaaaaattaaggattagaagatacaagtttttaagccaaaacataattaagcgttgggagtatttgtttttaggcgaaaaaatgcatagttaagaaaaggaagatataattaacaaaaaatatgaattttgtggtaaatttgggtgtagtgctgtgtgtatgtgttcaccagtacgtgtgtgctgatgatgatgatggttggctgcactcaccacgcccagtgttggtaatttcgtcaatgctttcataccatttgcagcctttaccgttaaattgtaaataggaagagttggaagaatgtgaagcttcacttttggtgtcctcctcctcctgctcctcaattcaaccgtccggacaactatggccgcgaaatttttccgacccccgacgactacctcgcccatggaatgatgccagaaaagagacgacagtttaacaactggtacgaacaacatcggagtgaaccattttttctggacgaggcattggccagctactgcaccaatgacgtggagatcttaatggcagcgctggtggcatttcggcgggagttcttgcaaatcacaagacgtcaagaacctgtggacggccgtgaaacgcacaacggaattgatgttctgaagcagtgcatgacaatcgccagcgcctgcatgaagcacttcaggacaaatcatcttcctgctgatcatttggccatcgtaccggaaagaggctacgacaacgcccaaaaccagtccctgttggcccttcgcttcttcaaatggtatgcagagaagcacggagtgcagctgcagactgcccactcggcaggcggagagaagagagtcgccaactactctctcgacgcttggatcgaagcggagaagagggccattgaagtgaacggtaatttttacaaaaaaaaaaaattttttttaatgacagcaaaatttgtgtaggctgtgtgtggcacggatgcagcaaatgcttcccggaggacaacatgcttctgcccaatgggaaatcggctggagaagtgcgggagcgagacgcgaaacgactggaatttttgcgaaaccaagtgggcgttgtggacgtctactgggaatgcgagatcgagcgaatgctggcgtcagacccggagatgcgccaggcctttgcaggctacgtggatgacggaccacaggagatccgtgccgcattcatgggcgggcgcactggcccgctcaaactcttccacaaagcgcgggaaggcgaaaaaatctcgtattacgacttcacgtcgctctatccattcatcaagtcatttttgatcagttgaactaaatttgttattacatgacattattttagttttaccacgcgctacccaattggtcacccaaaggtgcacgttctgaatgaggaagtggaatggaagtgcgcaacggacaacccctacgatttgtcgctgctcaaagtttgggtcatcccgccgcgtcaatgtgatgtgcccgtcttgccggtcaaagtggatgacaggctgtgttttccgctgtgctacaaatgcgccaaaaaatacccgactggcggtgttgacaacgactaccattgtcggcattccgatgaacaacgcggttgggtcagcacctgcacctcgcttgagctgaacgccgcactggacgaaggctaccgtgtcaccaaagtgttccgggtgttacaatatgagcagagcgacgaccaactcttccgttcctatatctccgagttcatggcgttgaaaatccaggcgagcggcttcgactccagcatcaaagggaataccgaaatggagcaagagtttgtccgcgagtgctacgaaaattttggaatcaccatcgacccagccaagatggagccgaacaggggcaaacgctcaattgctaaattgtgccttaacaatttatgtaagaattttttttttcatttaattcatcaaatcaaatttgaaggggggcgattttcgctgcgcaacttcggtctgtcgcagactctggtgaccgacgaccccgctgtcctggctgaatacttggacaaccgctcgctcgaggtcacggcaatcgatgagcttgatgctgagcacattttgatcagctatgagacgaaaaaggagtgggtggaggaaaactcatgctccaacataggtggaaattttttgtttcaattgaactaataataaaaatacctcaagttatctccctgtggaccacttctgcggcgcgtctcctgttgttgaaatcaatgcagaaggtggtgagaactccttcctgccaactcctatacaccggtaaaaatcatatattctatgtacataaatacaattgttcagacaccgacagcattattttgacccatccggatgacaattgcccactgaagaccggcccacaccttgggcaattcacggacgaataccctaagcatgagattttggagttttgctcgggaggtgccaagcaggttaaaaattttcacttttaactattaattctaaaatgaattttagtatggactcaaattgcgcagaaaggacgcaccacccgacgctgagaacgaatatgtgctgaaagtgcgcggcatgacgctcaactatgacgtcatccaaaaccaagggctgcgctacgagacattcaaggaaaaggtgctacgatttgctgaaactggtgagccccaaccgatcaatgtgatataccccaattttcttcgaccaagcataaaagatgggagagtcatatcctgtccactccaaaaaatatataaaccatttgtcggcaaaggtattgtcggagccgactataaaattttagattttggtcacactttgtaatcatttttgcatattctttgtatttttcattttattgcttgcattattaacgaatggaaaataaaatatgaaaataattaagcattggaagatgtaacttttaggtagaaaaaatgcataattaacgatttgaaaataaagttttgaaaaaattaaggattagaagatacaagtttttaagccaaaacataattaagcgttgggagtatttgtttttaggcgaaaaaatgcatagttaagaaaaggaagatataattaacaaaaaatatgaattttgtggtaaatttgggtgtatgtgctgtgtgtatgtgttcacccagtacgtgtgtgctgatgatgatgatggttggctgcactcaccacgcccagtgttggtaatttcgtcaatgctttcataccatttgcagcctttaccgttaaatt

SEQ ID NO: 3058 - DNA, 2280 bp, Heterodera glycines
attaatacaaaacagatccatgttgcccaagttttcatgcatttaccaagatgggtcaaatccctcccccgtttttcggcatttaaccccccccccccctccctcccttcgtcccatgactgacttggcatccgatgccgccttgtggtccgtgaagtcaacaaagcagaagccccggttcttgcggccatcatttgagtccgggttcgagtaaataatgcaatccacaacattttctgcaggttgaggggggaggggcatttgttggaatgaatgatgaatgacacaatgtgagtaataccatggaaaatatgacaattttcatgggcaatttctaattttttccatgtttttcactcttttttaaattttctttttttttgtacgttcgttactcgtctcgtccacccctcacctgcatgttttctcaactcttcgagaatttcgtctttcgatttcgatttggggatatttccgagaaaaaggcgtgtgtttgcaaccgaaacgttcactttaagtggttttccaggcagaatttcgtgtccgtcaaactaaaaaatgtgtgagtgtgtttgttggtggcacaaatttgtctgaaaaattttcttagaaaaaaattttttgttgaaaaatgaaaacagaaaagagagccatcagattttatgatgcgcatctctccacaaatgaaaatgaattgtgtttattgtgttcattccatcaaaatgagggatggaattggggttggggaatttggggggtgtactcgtcgaagatgttggaaatgtgtgaaacgggagcgacgggacgtggggaaatgacatgcaagccgtacaacatcacaacaaaaaaactcactggcaatggggtacacatcacttcaatgtaccgtatacacaaaaccgtaaaaataatgcgccgaaaaatataagcgaaaaatgtcaacagaaaataaaaatgccaaaaatgcatcaagaagagaataattaagacaagatttgcaattgtttgtacccaaacgctgccaccaaaaaaacacttttgtaaaattatgtcatggcattacttgtgccagttttggttatatcatgctatgtcattatttgtgccaagttttacaaaattgggaactatgtacaatcttactgtttttccaatacgttttttggtggcaacaaattgagtacactgttggttggtgtaactacgaagaaaacatacctttttggctgcctcttgcgcatgcgttttgtccgtatagatcagaaaaccgtaaccacggctcttcccattcaccggatccatcattatacctgaacaaaccggggaagtaggtttcatatcagaaatggaaaaaattgaagggggggggggaatttcggtattgaggctgaggcacgagagaacgagggccctcatttcaaaaagattttttgcaaatttccatgaaaaatgcaaacgaatagggtaggacatggaatttttgcaagaataattcaaaaaaaaaaaaatggttacgaagatcatggatgacaccgagtggttcaaacagtgggacaagcatgtcctcatacacatcctttggaatttggccaatgtatatctgtaaaaaaaggggggaggaaatgtgttgtaattagtgctcattaaaacagtagttggcccaaagtgtagcaaaattttggtaaatattgtcttacaaatgtgtcaaccaatttttcccctctttgtataaatgtacaataattgtttgcttgacttacacatccgccgtccgtttggttcgggtccggcccctcgtagccgggcggtgagtggtatttgcgctggccaacagtcacttccaattggtagccggatttggctaaaaagcgccaaatatggtgttatttatgcactatacaaccaaaaaaaagggatgaaacaaactcaatgttttacaatacgatcaaaaacccattgtttgttcgttttttgcgtcccctgtaccatgaaacagtcccagggaaaatgtattacaccatatatctttgtgtggtgcggtgagagggttcatttcgtatcacactcaccatcggccaagttcgaaaagcacaactttttgttgagcaaatctaacagatttggtatcttttaaaaccgtggatgatgcggtcgcttgaaaaccgtaaaaagacacaattttgtaatacatttttttttgttttgttttcactgtgactattctttatacttacaattaaacgaaccccaggaccgggtacacccaagccaaactttgag

SEQ ID NO: 3059 - DNA, 5853 bp, Heterodera glycines
cgaatagagtaatgccataacatgtcagaaaggccaatcgctcgaacaacatttactattgtactgactaacttggtgctctttgttgggtaatgtaaaatccggttttggttaacccacgttaatcatgacaatgtgtaggagagcctggacggttcgggatcccttccgtgatttgccgggatcccgacaaaaaaaaatcgggatttcaatccgaatactcatatgccggatgccggcctgatgacaatctcggcttctttttcaaaataacagcctctggtgccaacccaggtaaaccaaaaaaaaaagtgcacaaaaagcaaaaccttgagctctttgaggatgaaattggcctgctcaaaggggaatgtggccagcatttccacggcacgctcatcaaactcgtccgtgttcaggccgagctcgtcgaacatgcgcatcagtatgacggccaccggcttggacaaactcttgcccatgaacattttgaatgtgtcagtgtcatcataggtggtgtcgctttccaactcctaaaaagttcaattgtttttaagttgacgatactaaacatttgtcttaagccgggctttcacaaaagagacaatttttgggtcattttgcatcatatttttgatacaaattgtggcgcacgtgcatttaatattgccttagagtcagaaaaaaaacgtttccttttggagtggtatcgtattgtttacagggcttggcttttgctctgtttctgtcggtgctgtgccgtcttggccggcctctgcccctccgccgtcctcatcgttcttcaccaaatcgttcggttgtttctgttcttgatgttgttgttgttgctgctgctgcacctcttcagaaacatcgtgcttgaagtcaccattttgtggcaccattttcatgtccaaatcggatggtgatgccatgattaggaaacttttgcaattttctattttgctaaaaacaaattgaatgaataaaacaaagaaatccgacaaatttttaggtaattgtacaaagaaaatgtcgagaaatgcattgaaaataaagaattaaatttaaagattttattttaaaaagtaatggccgacgaaggaatgggacaatagaagaaagggaacgaaagaagtgagcagacaaacgcgaaaatcaattgaaatgtatggcagtggaaaagaaagacaagagaaggagaaagaggaaaataggtaacctaatggaaaaggaagggaaaaaaaggaaaaagaaagaatgaagaaaatagagaaaaattgcgtctgagaagaagtgagtgagacaaatagagagtgagaaacagagtaagtgagagtcataacgaaaagagaaaaatagaggaaagagaaaaaacaaagagatacctagacgagaaagaaccgcgagagagaaaaggaaaaaatggatgctagagaaaacaaaaagacaaagagaaagtgaagaaaggagcaaaatggagaagaaaaaaatgaggacaagtttaggttaatcgttaattaaggagcaaatttgcgcttttccaaagtcaaacaacaaaatcttacgaatttggtagctgtacatatttggaaacaattttcaaagggtcaagcaaatgatcgtgggaatgaaatttggaaatatgaacattgaaggcattggcaccatttcaaatgtatcattttagaaattttcagacaaataaaaaatgctttttcggtgggtggacccctccccgattctccaatattgtcacggatttttcgaccctgaaaagccttaaaatgtggtttctcttggaggaaaaagctttgtttcaccaggaaattcattgatggacccctaattctccagtattgctttggattcgggttttacaaccttgaaattgcttttcccggggagaaattgaagaggcaaatcaaaaaaaacaaacatgaattatgggattattgccatttatttacaagacgactaatatgaacatacaatgcaatacaaatacaatacatattgtacagagcatacacacacaataatatcaattggatttcgagttcatccgcttgtagacacacaataatatcatccgttattctcttcgtcgctcagcaccgaaggattcgcattggcattgttgtcgcgctcggctttcgagttcatccgcttgtagtacagaaggaatgcgtgcttgctctaaaaaggggaaaacaaattattatttttttcatttgaatggtcgggaacgaaattctcacaacgggcgaaggagcggtgccgcacggaatgcatgcttcgtcgtcgaaactcagccactcccgatcagtgctgatcaaattgatcacggacgatgtgtaatggccactgttcagccgaccgctgtgatcctgaagggggaatggtgaaacatagttagtgtgattagtgacaattttaaccaaatttgatcactcaccgttatgccgtagagactgagtgctgtgttgtgatgcggagacttctcgtggagaaagggcgccaggtccaactcggccacatcaaacgttacttcgacctgaaaattgtttaaaaaatcagtgaaaattacgctcaaaaaaaaccccgacggaaacttacgttatttttgacgtagtgtccatcattcagcgaaaatctcttcaaatggacgatcagcaccttcgggatctcccaaatttttgtgctccgtgtcgccggctgtttgcttttgcacttcggacaatcccatttatcctcgagactctgaaaaagggaggggaaatgggatcagacacaaattcaggctgaggtgctgctcactgctgatgaaaagtgcgcctccaggcagtccttgagcgtcaggtcgtcggtgttggtcggcaattcgaggctgaaaaattcaaagggaaattcaaattagggattttttttgggtctgtgaaaaactcaccttagttggttgacgacctcgaagcgaacactcgtcgtattgcacgtgctgcattggaccatggagatgtttgtcagctgaacaaaagggaaaatgattagaaattggcggcggacaaacaaaatgaatatggctccaaactcacgttgaacagatcgttgaccggcgacgaagagaacagtttcgacctctcattgaaatccgaagcgctggcgcccaaatcggtgtcgtcgtagttctgttcaaacgattgtcgcttgttgacctgaaaatggggaggggggagggtgaaaaatggaacataaaatggcaaaactcacccggttggtgtcctcgtgaagcgcgtccagcagatagagttgaaattcttgggcgtcgtgctgccgtcggtcggccatttcggtgttgacacggcgagcgaagaattcctggggaaaaaaaggaaacatttgattagaatggattgttcaaaggcacagagtcactcaccaggaaggtggtgggccgaagtgcgttgaacttgccagaccagatcaggtcgatgagcgcagagaatgagccggagatcatcccattcgtgccaaacgagttgttcctgaaaagggaaacaaaaaatgaattttatgaaaattcgaagacggcgctcggctcccccctcctgacgcacccattgacgaatcgctgcgcgctcttttcttggaacagttgagaaaatccgggcgtatggaacagtggctgaagagtggcgttcatgaagcacgtatttcccatattgaagaggccagtttgtccgaggggctgaaaaatgaatttaagccaagttttttttctggccaagtcagtcccccgaaacccaccgttttcttccactccgaattgctggcgatcctctgcgctgacatggcatatgcgctcaggaagaagttgccggtgccatcatcagtgctgaaagagaaagggacgcgattcagtgacttaaacacaacaacaaaatggggagtgcatgcaattcactgacagaggttgcgctggttgtcgggttggaacaaatggcgctggtgacatggtcggatgagttgttggctgttccgtcacgtcgtccgaagtgggcagtgactttcgtctgcgcggatggggagggcctgcatggttgccaaagttgccgtccggaagcggtcgcccttgactcgaggcagtcatgtcttattggctacagaaaatgtgaaaaaaatgcgttacaaatacacaacaagtggtgttgaatgtaaagcagcattagagtaagaatgaaaacatggagtttgaattgacagcgaaaggagggcacgacgggtggggggggggggggacggtaggtgtcaatggcatttggccaactgcgattctgagacaattttaagaagccatcacttttttctttgaagaaaaaagttatggattctttaagttggcacagacgcgcagtcgcatgattctggagggggggggggaagtgaataattaggttactggtaaagcagcggtgtttcaagagcagaaaatgaatggggaacagttttagacagcagcgaattgtcgaatgtttggaataggtaaatgggaagaatggtaacaaaagggaaaaaacagcgcatttataaaggaaaatcgtggaagaaaagggaaaactgacaaaaacaaaaaattttttgaggcgggagggattataaaaggtcgactcatgatctaaccattgccattatattctgtattggacgccggtacgtttggcgccagcatgtttttggctataactttttctttgtcaaccaaatccaacattgttggtatcattggaaagccctaagtgtcctctattatttctcattaaggttcaaaaaagttatggccagaagaattcaaaaaaaaaaaaaccaaattttttggttttcaggctactagagcatgtgaagagctctcgaataatacccaagattgttggatttggttgacaaagaaaaaaattatagtccaaaacatgctggcaccccaacgtgccggcgcacaactgaagtagaccgttagacaatttgtccgggtaccgatttgtccgttctgccaagccagaatcttgcaaatgtactgaaatttcgctgtcgtaagtcgggattcattgccaaaaatgtcgaagtaaatcgaaaatcattgaaccaatgctcaataacaaaacgataatgcgagctaagaaacgaaaaacgcatttctaacttggtgtgaggcttccaaggcccaatcgcataagattttcgaaaatcttcccatagggccttcggcatatccgcccaaaatcctaattttatcaaaacgtcgatccgatccgtccgtcaatgggggcaggaaaattggacactgagctaatatgtattggacacaaattcgagtaaagcgaaattctttctcaaaacttcatgccaaatcgcaatttacatagaattaattgtaagctgtttacacgacaacacattgatcaatttctattcattatccgatctttgaaatggtggcattgtctgaaagccctttccaaatcagatttatttgtaaaccttaatcaacatcccacggaaatttatgccatttttcgaggtatattccgacccggacgctccgcaccccgaaccatcacccgagtcgggaccagcagggttacacccccctaagaatggcatttcatttttgtgagggaaaaggcacacattttgctgttgatggcccacgaaaatattttacaaaaaaaatgtcgggggcaccgacaccaaacaaaagtgccaacaagaaatttttaactcattttgcacgtaaagcaaacaaacaaaaaaaaatccatttttactaatttatatgatagcattttataatagaga

SEQ ID NO: 3060 - DNA, 1851 bp, Heterodera glycines
ccctaaaccgtatacacacaaagccacatcaattaagcaaagcaaataaattttattaagcaaaataaatataattttatttatattggtttatttatttatttattaaagttaaatttttttaaactaatttatgtttatcaattttataatttgttagtaatattttttaaatttattttgagcttgcaaggctccaacatttgcattattctgtgtaaatcagttacacacgtacaagtctaaacgttttccattggctaagcaatatagcaggataagggacggttttcttcgtctttttagggaatttaatatcattacggggttgcaatataactcttccatcgtctgccatacgagacaacaggcaataaatgagtatgaatatgcgtagacaaaaacgaaaaggaggccacacatgacaagggttgtgtaaaacattgtcatgaccacgggacgccaaaagggatcagtgaccagccaaaacgggggcttaggcgtgacgggcgtggaagcatttaacggcatttgctggaaaatgaaaatattacagttacaaaaaagaatttaaagcaaaaaaaaagaaacacaaactttgttggtaagagttggattggaggcgcaacataacacagaaaatgaaaggagcaagaaaaccaagcaaaaggacatcttaaaaaaagaatttacgtcccttttgatttcggaagtgataatgagataataatatgttcggccaatcacttgaacgactaattgaaaaagtgtctttttaggtgaataattttgaggacacatacctgaacccgtgaaaacattttgcagaacttcttccacggctcagctttctcctcttcattgtccgtggtgcacattgttttgatgttccgctttagttgggctgaaattttggttaaaaaactgagacaaatttaaaaaaaaccgtaaatttacgcatttaaaattccgctgggtttgaatcaaacgggcaccaccagcaacagcaggagggcatcaaagaagaatccgaatttgtcaatatgaataaaaaaaacaacaattctcttgccaacctttgttcggcattctgctttcccctgggtaaaattcacaatttttgatttgctagactcattctctaattagctaattagtgtaaattatgacagtggcccaaattttgcattttaaaccctatcaagcaatgtccactgtccgccgcactgtcgtccgcggtgcgtccgctctcgcatttccgcgcattgttccgcttgcttccttctttacggcgcgggcatccgtttttggcacacctttccgcgcttgcgcccgactcagtttttccacccgcttcatctcctattcatcgcttttccgcttcaacttatactttgcgtgttgacaaagtttgttcacaatgatttacaatataccaaaagttatgaacaagtttgtttttccttttaagttgctcttttttttcatcctgttttgttgttttactactgtctcttctgccgatttcgactttcgagtatgtagggagttttaaacgggtgtatttcatttccatttcccctcgcatattcgcagaaatttattggcaatttcttctaatatttattataaaaaaatttttaaaatttttttttaaattctatgatagtaaattttaaaaaattctcaaggggaaacgatgcggggggaggggggggggggaatgagctgccccctttttaaaacttaacaataaaaatttcttttctttgctcaggaaattgctttggaaaacaaagtcaaggcggatctatatggagtgaatttatcttttgtgtatgcacttggcgg

SEQ ID NO: 3061 - DNA, 8068 bp, Heterodera glycines
aaaaatgggcaccgcgaaacgtgcaaatttaaccgaaagagaccgggcctcatcagtacggtgtctctttgggttaaataatttaaattaattattatgtgtgtttcgccctaaaccgtatacacacaaagccacatcaattaagcaaagcaaataaattttattaagcaaaataaatataattttatttatattggtttatttatttatttattaaagttaaatttttttaaactaattttattgaatatgtttatcaattttataatttgttagtaatattttttaaatttattttgagcttgcaaggctccaacatttgcattattctgtgtaaatcagttacacacgtacaagtctaaacgttttccattggctaagcaatatagcaggataagggacggttttcttcgtctttttagggaatttaatatcattacggggttgcaatataactcttccatcgtctgccatacgagacaacaggcaataaatgagtatgaatatgcgtagacaaaaacgaaaaggaggccacacatgacaagggttgtgtaaaacattgtcatgaccacgggacgccaaaagggatcagtgaccagccaaaacgggggcttaggcgtgacgggcgtggaagcatttaacggcatttgctggaaaatgaaaatattacagttacaaaaaagaatttaaagcaaaaaaaaagaaacacaaactttgttggtaagagttggattggaggcgcaacataacacagaaaatgaaaggagcaagaaaaccaagcaaaaggacatcttaaaaaaaagaatttacgtcccttttgatttcggaagtgataatgagataataatatgttcggccaatcacttgaacgactaattgaaaaagtgtctttttaggtgaataattttgaggacacatacctgaacccgtgaaaacattttgcagaacttcttccacggctcagctttctcctcttcattgtccgtggtgcacattgttttgatgttccgctttagttgggctgaaattttggttaaaaaactgagacaaatttaaaaaaaaccgtaaatttacgcatttaaaattccgctgggtttgaatcaaacgggcaccaccagcaacagcaggagggcatcaaagaagaatccgaatttgtcaatatgaataaaaaaaacaacaattctcttgccaacctttgttcggcattctgcttttccctgggtaaaattcacaatttttgatttgctagactcattctctaattagctaattagtgtaaattatgacagtggcccaaattttgcattttaaaccctatcaagcaatgtccactgtccgccgcactgtcgtccgcggtgcgtccgctctcgcatttccgcgcattgttccgcttgcttccttctttacggcgcgggcatccgtttttggcacacctttccgcgcttgcgcccgactcagtttttccacccgcttcatctcctattcatcgcttttccgcttcaacttatactttgcgtgttgacaaagtttatgcacaatgatttacaatataccaaaagttatgaacaagtttgtttttccttttaagttgctctttttttcatcctgttttgttgttttactactgtctcttctgccgatttcgactttcgagtaaataaaccgcagccaagcggactcgaaccccagacccccttctcatatgacccctcggtgattagaattgatttttatcaattcatattttttgtaacatcataatttttaaaaaaaattttgatatgtaacattttgccataaaataaaaaaaattttaatttaaaaacaaagaaaaaattctcctttctccaaattcttcacttttgttagttatttcccttggaagtcaattaaataatttcaacagtgaaaatttgcaacgtaaattggctgttaaatcgatgcttaaacttatataaaaatcatcaataacagcattataaaaaacgatcaaatgaaaattttttaataaaaaattattcatatttgcccaaaatcaactaacctgcttgcttgtgtacttttgtctataactttgttcaaattaaacaaaatttgttgaaatttttaggctaatagagaatttttagagctagcgaatggtttcaagactattccgaactcggacccgaattcgaacaaaaagtcgaaaatccaaaattttcgaaattcttacttttgttcctaaattgatctaaataagctaaatttagtcagaagccattgcaacatcaaaaatggtcattttttacagggacgaacataaaagaaaatttcgaactgccctgccagttggagtgtgaagttctttgtttaaaaaataaaaaagatattgatcatttttatcctatgcaataaagcaacatttttcattcattcaaaattggtttcatttaattttccgtttcgcgtgccctgtattatactacatttttcctctccaaatttagctgcaagtgctcggctacgacatttcctggacaacatttaacatcattgaagtgatgtcgagcacgcgttacagcgaaaaacgcattggttatttggccgcggtgcaagcattcaatgacgaaaccgatgtctgtgtttagggccctggtttttcaaaaaaaaatttaaaaacaccagtgcaggggggtagacagacttctttgatacaaataggttcaattattaccaaaattctcaaattttttcatggcagcgtctgatgggtcactcattcctcgaaattttttctcttgttaaaggccgaaaagcaaaaaaaaaaaaaaatcgtcgcccaatgcggcctaccccccccccccccaagctagggctaaccccctcctcttttgcttttttcacccttttaatttttttaactgcgttttttaggtgctcatgttgacgacaaatcttatccgaaaggatttgcaaagttcaaacactgatgatgttggcgtcgcactgattgtgagcggactttcctgtttcaccaccaccgatttggtgctggacaccgcagaggaagcaacgttggcatatgtttttttggtggacaacaacggcatcggcatcgcttgtttaagtcccaggtcaaaaaaagcatatggctgacaaacgccatgaattctggcaaattcataaaaattgagttgcttgccaagaattctcgggtcgttttaagagagaatttacaaaaaaataatttccttaaaatctgcactgttttgaagattgtacactcggggagcagttgctttgttcgccgtccgacgaaccgtgtgccatcgaatttcttccactctgctactctccaacatttgcgtgccattcgccaggccggacgagttggttcaccaacagctgctgtgctacatcattgactccgtgccgcatcgtgcccttcttgaaactgagcccggcacaccactgatgcggcacttctgggcgcgacttgtgcgtcgacagaagagcggcattggcacggcaccgttggtgaaggacgcgcagcgacaagtcagtgctgcgtttgaacttctgaatgcaataatttaagctcatatttttgtcacaatttagagcaagtttataacaggaggccgatcgtccttattcataagaaatgttctgaattgaattcaatttccccgacagcgcctgccggcaccgggatttgaatccgacccagagaatcaaatctctattatatccggatcacatttgtccgcgaaaattttgtttttgggttcattggagaattaatagctaatctctttgtttttgggggctgaggggaaattctcgtataaacataatttttgccaaaatttactaatctcgggcttggcccactttttccctccccctcgtttgactaatcccacaggcattggcatcttatcaactggatctttggtggaaatgtgccgtctgttgttcttccactcggccccctcccgccactgaacatcacatcccgcccgtcttcgccatcggcccaccgtaccatcgctcgcccattcgcccgcgcccgccccgccctttggcccaagcacatataaaagaaagatggatgagtctcgagatcataaccttttcctcttcgttttttgccctgctcttcgaagatcttcaactctctacaaaccccttttttcaccactttcgcttataaattttgggaagaacaaaaaaaaaatcaaaaaaaaaaagcggtacacgccccatgggacaatggacctggccaagttggaccccaacactccaagcctccaccacgtcccatagagacaataagacgtgcttttccagtggtgggggagacaaaaaggggatttccgaatcggttatgctcactgtgcctacgggagggacatcagccctccaactgtacggcctatcgaacggcggaccagcgaagggctcgcctcgctgaacaagggcggtgctccctttgcgcccgggaagggcactattcagacaattgctcgtcacgggcactttgctttcgatgtggagaaaaacatcacgttttggtatgcccgagtccggaaaagacacctaccaaggggagcaatttggctccgttaggcacccgtgcaccaggcggaaggacaccccagtgggaaaatgcgcccactacttcttcggcatccccccctcagggcaacagaaatggcactcaaattgccttggcaattgctgagggtgaattttttgcccctactaatgagttttacgccgaggaaaaaccccgaccaaaggcctatctcatgatcaaaaaaattcctgtttttaaccctaatggaccctctccgatgccggtacctgtcttttttgacccgggttcagcccgctttcatttcatcgcccctcgtctcgcggatccgccctcctctgatgtcacaagaaaacatgacagttgggggcttcttgtgggatggaccatcccacacaatgaaatttgcttcctctcgtttttctgtccgcctacgtcggaaagacggtggttgggagactgtggaattgaatgagagtcccaaaataatcctatcagtcgagtttttgagggaaatccattggaacccttccgaaaacgtaaaaatgggagtgacagttgaggagccacaaattttgcttggaatcaaggaaaacttcgggtggtttatgacgcttccgtgcatgagaagggcaaaccctctctcaatgagctgctcctccccggccctaatttagtccctgagttggcgggggttttactccgcttccgagcctcgacctgtccagtgctaggggatatagaaaaagcatttttggccgtgggacttaaggaggaggacagagaagcggcaaaattcctttggttgagagacccctccaaaccactgaccccggacaatttaatcattttccgtttcaaaaggattgcatttggcgtgagttcttctccgttccttctggcatctgtcctgcgctaccatttggcctctttgggggatccattggggctaatgagcaacttttacgtggataatttgcttatttgttgtgaaactgccgaagaagccgccgaatctgtacgcaaggcacgagaagtgatggcccgggccgggatgcgcctccatgagttcgtagccgcaaatcgagccgttttacggggtctccctaccgaagaagtgctggtgggtgatgtccaaagggtcttgggcatttcatgggatttgtcaagggataaactgatttttgagtttcctaaggcggttaattttcccccgactcggagaggagtcctgagctcaattgcctccctctttgaccccttagggctatgtagcccgtgcctcgttaaggccaaggtctttttccaatctttgtgggattaaaacacgggatgggatgccccgatcggggaaacgctcttgagcgaagtgccgttcacagacaatcccccctcaggcaaaaagagggaccaacggcgacaagggattttgaagtgggctgaccgccctccactctcaaaaaggcccaccctcggagccgacaaaggcaagcctatgcattttcactgggcgacgcgcttgcccttaatcacagtttttattccaattttaacccttttttgtggtacggatgctgccacccgggctctctcctgcgacgaacagggaatttgggtatttttgaacccacaggcggagaatagcatagtgtgctgtgagggcatatgcagcagtaggggaaacccttcaccctatctactgccccttcccccggacctgttggcaagcgcttttgagtgccacatctcctattcaattgcaggggaaaaaatctcatcacaaattcagtgcgagcccgtggaggggtgtagcctcatcaaatgctatttgtgttgggaaagagtccttaattcccattgctccccgttccttcttgcctttgcggtcggcaaatgaaggcgaggttgtcatacgccatcggaacttaatagggggagtggacccacccaatcggtcggaagtcgccggtcccgaggagttttcccgtccaatctcgccccgaatggatgcaaacaatccaaaccgtttaactcgtctaagttatgcgttagccccaacccttctcgcatttttggccattttaagtttttccttaatttcttcggtaaatggcggcctggaagtagtgtcagtctcagcagacacggaggagtgcattgttgaccatggggggacgaaatgcctattcaacagtgtcacctcccttactcttttacctattggccaaagggtggaattggttttccataccccccatacagtacccatgggcagtctatccttcgtcctaaaagggttggcccttcggtgcatcagagaaaccagcagttggacccggtcataccgactcaacatatcctcaatgctgcgttgtcctgcagcagggtcttgtacgggctccttttgttctgatttagagccctatcaatcagtaccagatttaagtgatgcttttccaggggtcaatttttgcaaggaagcatccggttttatccgccagggatgtctctcgccttcttatgcgtgcttattttacagattgtttgcggcgcctctttccccctacccctatgagctgtacaagtgccctgtttggcaattccaattgagactcgggattattttgcagcttaatgggtccacaaaagctgaagaaataactatgtctccagggattacccaccattggccgttagctaagttgtctgtcacctttacccccagcggtttgccacccttaccaattttgggaagcgattttattgctaaccgttcacatgcggcattggtccccgaatggcattgccaagaattctcgggtcgttttaagagagaatttacaaaaaaaaataatttccttaaaatctgcactgttttgaagattgtacactcggggagcagttgctttgttcgccgtccgacgaaccgtgtgccatcgaatttcttccactctgttactctccaacatttgcatgccattcgcaagggcggacgagttggttcaccaacagctgctgtgctacatcattgactccgtgccgcatcgtgcccttcttgaaactgagcccggcacaccactgatgcgccacttctgggcgcgacttgtgcgtcgacagaagagcggcattggcacggcaccgttggtgaaggacgcgcagcgacaagtcagtgctgcgtttgaacttctgaatgcaataatttaagctcatatttttgtcacaatttagagcaagtttataacaggaggccgatcgtccttattcataagaaatgttctgaattgaattcaatttccccgacagcgcctgccggcaccgggatttgaatccgacccagagaatcaaatctctattatatccggatcacattcccggcaaattttggctgggtcccggtcccgtaaggcttctaaaaacaggaaaatgtaaattctcaatcatttgtaaaaaggcaattggatttttagcccatgttttttgaataac

SEQ ID NO: 3062 - DNA, 2442 bp, Heterodera glycines
  unsure (1)..(2442): unsure at all n locations
tgctcgcncagcaatatacattttctgattttttattttattttaaaatttttttgttcataaatttttcataaacatttttgtcttcagagatattggcccatattttataaagcataaaataataaataattaaatgaataaaaaaatacattaatgtgtcatttaaaaaaataataattacaaaacatgaaaaaagatgaacaaaaaaagacatctccacaggcattaattaactttttaatttgtttgtatttaatatattttcgatgcatttaatcaaatttgacaaatctttgtacataataatatatatatatatatatatttcttgtgtatttaagagaggatatttttgtactttttgccaaaaaattatatagcacatgctgttggatgatgtgtttaaaaatgcgtataggactgaatagagagggactcaaaacaatgacactttaaaaaaaaaataaatttgctgattggaaattggccaatgctgatcagcggcagaagacagatcatccaatgatcactgatctcccccttttctctcatggatggccaacaaatggcacgaacacatggataagtgatgaagcattattggccaagaatggactcggactcaatttttgccaacggcgggcggctgttcttcgacttgcaaacttttggactgttttggcacttcagcaactgcccaagcttgcaagcagtggacttcgtccacccgaatgatttctttggtattcggcttactgtagccccaaaagcttacggtaccaccttcggccttctgtaaaattagtcaattaaaaagggtttttgaaattagaataccaaactcacataacaaacaacatcaatccgagcccaattgtatccaggatttttttggatttgaattccattgaccttgagtttacaagtaaatcatttgtccttatttctaagatttgcacttatttcgtccttattaatcgttatttgttcaactttgattcaaaaggaacaaaaaactttaatttttagtgcctaaaaattaaattgtatatttaagtgaacttttctgtggcggtgccctttggcattaattaattaaccaattaacgaattaattacctttaatattgggcaaacaaagtggtcgtgtgaccatttttcttcagtgaggcatttcttgtcaccatcactacaggggcaatcattgtatttttgcttgaccgcgtcataacactgcaaagtgccgctgccggggttccttttttcggcatacaaattgccggcataacggcacttgctcgattttatgagcttgacgttgccttaacatttttgaacagtttcagttgtgtaatggttctgatttaccgaaagcctttgaagaaaagtcaatttaaaataataaatacttaaaaaaaaatttaaaaaccaataaaatttattttacaattttccttgcctgaatacgtcagctcgaatacggtagatggtacggtccattttgttgaaaggcgcgcggaaatgacaatgtccatgcccggcttttccgcctcaatccaatttttgtattcatttgcttgcagatcagtgagtgatgcggcacaacaaagtttggcaccttaatgagccatcattttgctaattaatgattaattagttaattgtttgtctttttgccttgggctcttttgtcggctcggtatttgacctcgacatacgccgatgagcagttgtatgtgcactcaaacaaattgctcaaacttttgaactgaattcgcgccttcccagcttcaggctgaaagcaattaaaatttgcatttataatactcaaaataaattcaaaaatttcataaatattatttattgccttaattcgccaatggcatcggcacggcttattccccacacatttggccttcgtcttcaataacactgctgactgattggccaccaattctctcggaattccactcaaatcctcgcaattcaaatcttcaaatttatttataatttattttaattgttgaattaaataattagttaatctcactctcttcgagttctttacagtattggccaccgtatccgtccggacaatggcattttgtgcaatcattcggattcaaatagcccccgttttggcacttgtcctcatgtcctttgcatgagtctgaaaaatggaaaatcacttaattatatttaattgatttgcctttgcaataaatttgattaattatggccgcgtctttgaaagagattcgttcggtttggccaatcgtttgttggtaaaagcgtggcaaagtgatcagttcgtataagcccctttaatttttcatttcactcaggaaatccaacgttttcttactgttcatgatcgcctccagatggataatgcatcaatgatccgaaatcgtaagcgaagccaaagttttgcgcgtt

SEQ ID NO: 3063 - DNA, 5986 bp, Heterodera glycines
ttagggctggtcgggaccgggaattctgacaaaaaccgggaccgggacttgccgggaccagaaaagtcgggatcgggaccaagtttttcgacctggaccgggaccgggaccgcgagaaaagccgggaccaaccgggaattttcccaagagaaaattttttgaaaaaattttgaaaatttgagtgcactttgttacgaaaatttcctaaattcaaaaatgtgcccagaagattttaaaattttcttttgggggaggaattcgaagaattttctattattctctgtttcatttcgggggggggggggatctggaatcttggaattttctgggtcccaaaattctggattttttaataaattaaaatttcttaaattttttgcttttaatcgctgtttttgtggcgctgttttccaaaaaaaacttttgggaacattggtgagggggcggcagggtccggcggtgccgataggcgccgccggaaaatttgaaattttgagtgaaatatgttaacagaatttgtcaaaaaatgaccaatatttggttaatttgttattttttagcctgtttgaaaattaaataaaaataaacttggaatattttattttttaattgaaatttcaattacaaaaatggtaaagaaaaactagaaaatattctgttcaagtggggaattgaacccaagcgccaaataatgaaagtcagaaggtttagccacttgaccacagaacgatgtgaaaaaaaggcaataaaataaaaaatttatttatttttttctcaaagatttctccttcttcaccaatttccttctcttttctcaccccccattcttaccagtgcttatttagtcccgccgggaccgggactggcaaaaccgggaccgggatttctgtttttccaaaaaccgggaccgggacctgaaaaaaccgggatttcccgccccggtcccgaccagccctaaaattgataaataaaaataaattaaatatgccaaattttgcgaatgaaaattcgcacaagtgaaatatgaatttaaattaccgccaacaccatttttaaccgcaattccattctgtcctttcaccattttatcgacaaattcaaatcgaacacaggtcacctccctgtacagaagagagagaaatgaataaaaaatatatgaaacctcccctacgcatttttttttttggttgtataaaaagtcggctgaagaccccgacattttcccgaaaattaactaaacctaaaaatatcattctcacattatcaaatcggcaccaatttctatcgcatgcttccatgattggtacccgtcctttggcacttaaaacatttgttcaaatactgtatgatgtggcaagattattacgagcatctttgttgaatgcgattttgatcgggaattcggtccatttttcgaatgggttgtattgtcgttttttccgctgactttccacttcctcgggctgaagtccacaaactgtgaattttaatttggattttttaattttgtttttaattaatttatttttaattaattaaatttgcaaattgaactcactcttccgcaatctgttgtactgttgttgaagccttcgtttgtcacaaaacatatcccctccacataacaatgtttcggatggctttttccagggcatctctggcggaagtggggcccagtctggctttttgaaaatctaaaattatttttaaatatttttaaactgttttttctattttttactgcgtttgttttgctttcgttcttcccacagtttgccaatgcctcaattttcaacaacaaatttctgatcggcacacaatctgcgccgtattcatcacatgggtctagactgtcttaaaaagtgccgaaattaattttttaaaaattcaatttattttttactgactgaatctgttcggatcatcttggtagggcaacaaatccgtgtcgttgattatgcgttttgaaaatattggcctttcaatttggaaaaacgcgtgcattttgtcatcatccgatggcggcacaaaatgaattatttttaccaaagtgccgttgaccatttgcggcgaaatgtctttgagaatggtgccaatgccattgctctgtaaaaaatgattaatttatataaattaatttatgatttttttgaccgttttgaattcttcacaaatgcttttttcgtcgcccttttctcggattgcgcttttccgctggtcggtgccaaattcgattaagaatgttggcatccaatttgttatttctgttattttttccaacgaaattggaaatgttcgcgtccgtttgcaacttaatgtttttaatttcaattaaatattatttttaatttttattattttaattcgactcaaatcgattcaataaattacatatttctacataattgcttagaagcaaaacgtttaaacattcttgctagcattagatagccctaatggttcctacctacctatcttaagaaatttcagaaaatttttcaaaagtccaaaaaaaaattggtaaattgaattttgtaagatcttttttggccatatactttttgatattttacttcttaatgaagtttatttaagagttactaatgaataatataaagaaagttttgtttgattatttctcagattaaattttaaatgcaaaatcaatattatacgtttcattggagaaggaaatgttgaaagttgactcaatgacgagatcgttttcgttacggtgggcgcaaattttgacaatgaatccggcaacattggcattggcatcggcaccatccgaaattccttccaaatgtttttggcacatttcggcgattggactgtttccgggccattttttcgagcttttgtagcacccgatcagctcttcggaactgaatgtattcctcattaaagcaagttcaaattttaattgccataatccctaattattgccaggccactttgacgccaactattttgtcgacaaattaaatttcaaaatttaatgagccacaaatatggccaaaagcccaaaaaattgtgttttctggaaattttggcattatgttactttaaatttggtagcgccaaaaatgccgctccaaagtgacccgacccaattttaaggcacttaataaatctgtgccccgctcattaattaatgactgtttcactaattaatgatgatccaattttcttttacttttcgcatttttcttccgttggcactttgttacaagcatcgaaataacggtgcttttcgctgggcggaccttccggatctttcattttcaaaggccgctgatatttttgcatgcaatttcgtatggcgtcgcggtgatattcaacaagaatttgtccacttccgtcgggaagaaaatgttcgtacaattcgtgccaaaatggtccacatttcgtgcaaatggcacaaagccaaaagtttgttcagttgttggcacaatgccaaaagtggtttttggcacagagcgtggcgttgtgccatggaatttggttgtgccaacaaacggtgcctttgtttttggggcgaccaatgtttgggaaaggcactaaaaaatgaaattatttataaattacgaattttaaatatgaaaattgaactttctctttgcacaatttggtggtaccgccgttttctccgcaaaattttgcgccaaattcaaatgccaaaacaaatggcataaaatcatcaaaaaatgcagcagaagaaagaccttcttgaagttcgtttccaagtggttcagcatctgtaaaatggtaattactattaaaatattattattaatttggctttacttttggtcaaattaatttccaaatatttttccgtttttttcatttgttcggtgcccaaaatgtcgtcgaatccatggcttaattttaaatttaaatccaaattttaaaatatttttcatttgaaatttgcctcgattcgtagctgatcactccgtcttggtgcttggaaatgatcagtccgtgccattggtcttcgccaatttcttcggcacattccacaaatttcagtttgccaattgttcctttgcccaccccaaaacgttttccaatttttctgtttttggccatttcgctttggtagcagagaaggaacctaaaattgatttaaaataattaatttaaaataaatttttcaaatattttactttgtgcagtcatttgccaccaaaattgtgccattttcgccattgcacgttttccaaatgccaacgtcggatgacaaagggctgaaaaattgaaaattttaaaaattacaaaaaaaataatttactttcatttaagaaattaccgtatcggaggagctgagcaattaatgaccaagctcagaaagacggtcagtagattaaagaagttcattgtctattgattaattattaatgaatattaatactatttaattaatgaaaattaaaaaattatttgatttattttatgaataaaatatttatttcacaaatgatcaaattaaatgaattaatgaaagtggtgggatggaagcagtgaattccgtcgttggaccaatcactgaattttctgtgtcgacgtgtaaaaaagtgaaaaaaaagggggaaaagccaccagcagaaggaaaagcggacaaacgaccacacattttgtagcagagattgtggacaccgataaatgacaaaagtaatttatttatttattttaacattttggccaaatcatcacaaattaattcgtcgacaaatttccaccactttttcatcggacaatttggcgtaaaatgtgaatgaatacataattaattatttattgcataattaataattgtacgtctttgtgatgataaaacaaaatgataaaattgaataaatgatgctgtgataagataaagcatagaaaaggtgtataatcgtcttcattagcgtaagcgccgccgccggggtcattttaactggactgactgatcaggattgcgattgtcttaaaaaatgatcaatcattactcagctgataaagccacaattatccgtttagttggttttgagcaaagttagggctagttttttgttgaaaaatttcatttgatggcttttttataacggctcagcacccggcggaggctgcctttgatgccgtcgttgctcattttgttgttgcccttctctggcaaccgaggaggacgaagtggactaatttttaagattaaacagcaattaaacaacacaaaaaagtgaataatgaaaaaatatgaaaacatttttaataaattttcaaacactcccaaaaattaaaaaatatttattagtgttcaagttatgacggtttttttgtgtgtgttagaatgatttttgaatgaatgaactctctcttttttttgactgatttagaactgatttttttaacttttcttttgaatgaatgatttcttttactgatgatttttttttgttttgacttttgattttctttcaaatatatttaacggccgggttataattagggatgctaattttatgtaaatacatattttacatatttcggattgtcccaggactgaaaggtcttaatcttaggaatcgggccctgatccccaagaagtccaaagggtccaatcgtttgtatggctctttattgtcggattataatgcgcgaaatatgtgaataattattcacatattaaatgaattaataaataattaatttgcattttgatcgctccaacgtccgactatcatctcctccgactcgactgactgattggtgggggaaaaaaattgaacggaaaaggggcggagatttgcggggatttgtgagagttagagaaaagagaaatagtgaatgaaatgatgaacgggggaatatcgaaaagatgaataacatcgattggccaaaaagggaaatgtgtgaagggttcgtcttcgctcatgggtaataatttgaatatgttacaatttttaataaattttcaaacactccccaaaattaaaaa

SEQ ID NO: 3064 - DNA, 5422 bp, Heterodera glycines
  unsure (1)..(5422): unsure at all n locations
ccctagaaaaaggtgtcttaacaaaattttccaaaattttgtttgaaaacaaaaaaaaaggtgatttttcgtgcaaaaatcagcggcnccgctttcccctgtgccggcaaaaaatgtagagattttaacggctttcaccaaaattaaaggatttcatgagaagataaattaatgttaacttaattattacaattttacacattgagaattgagaattgaaaaaaaaaatttcacttcctaaacttccaagtttcggcatttcttctcaattttttaagttaaagatagatagacattttaattttattaatttattcatttgaaaaaatattaaatttgtttttccgtttcatgaaaatttcccggttatttccaggatattctggccctagcaattctctgtctcgggattttcactatttttcgtggctatccccgatcccgacgcttccaatcccgaccattattgctaatcctaatgttcaatttattaaattatcataatttaaaatccatgatttttaaataaatgtttaaatttattccttttttccagttttttgtcagtgccaatgccgccgccggtgttgcgctgacgcatgacgcggtgctgcgcgagttgggcgccgcgctgacgttgcgcaaggagcagtgcctgcgccgtgagcgccgtgcgttggcacgcgcccgcggccttccggacgaggcggcggtgcccgcggaggagttggaccgaacgccattcgcggcggcggcagcggcgtgccgtgacgcgacgaccattgtggcgccggcaacagcagcggtgatgatgacggcgctcaaccaggcggcgttaatgccgagcgccgaagcggtggcggcacagcgggtcgcaattttgagcgccggtggcggcgcggcactacatcagcgggacaagatggagcagttcggggacgatgaggaggacgaggaagaaaatgctgatgatgacgaagcggggacacagaaacagcgatgactgactcataaaaaaacattttgttaccgtatccgccgcgtgtatctctctcttactgtagtgccgtgttcataaaacccgagactcaccacttttgacctcgctgtttttggctgcgttctttattgaacgtggattttatcatatggtctcggcaaatacagtacaccacagagtactgtagtcgccggaaaaaacaaaatttttgtttattgaaaaaacttatccgttgatttgaatttaaattttctttcaatatgatttattttattttgtttttcatttaatatttttgtcaaatgaataaattaataaaaaatatttgctatgaatgtaaaattgagcaatttaactattattttaatgttctcttcacctgaaattttttaccgcactttgtttccaaaaaaatcattagtggacgggggaggcaggccgaaaagcccctggggaaaattttgaaaatcaattataaaaatggtcaattatgggtttacacaccgtttcaaaaaacgagagatgaaccaataaatagagagcgcagagaaaaaacatctctctttttggcgtactatttttttatctctgttaatagagaaaaactgaatttattcgctctatagaactttttttccgccttacagattttctttaaattttgcatatcgatagagaaaaaaattcttcatttttctatgctgatttattattattgtctatgctcaagtccctgggcaccagggttggacgtaactgattttcagttacgaccatccgtaatccgtcatgacgggggtcaaaaaaggccgtaatttggcgtaatccgtaatacgtaatccgtaattttcaaaaaaaaaacaaatttaatattttttcaaatgaataaattaataaaattaaaatgtctatctatctttaacttaaaaaattgagaagaaatgccgaaacttggaagtttaggaagtgaaatttttttttttcaattctcaattctcaatgtgtaaaattgtaataattaagttaacattaatttatcttctcatgaaatcctttaattttggtgaaagccgttaaaatctctacattttttgccggcacagggaaagcggggcgctgatttttgcacgaaaaatcacttttttttgttttcaaacaaattttgaaaatttgttaagacacttttctagggtaattttaggtgtttattacgaatctgacaaggctctgtgcttttatccatgactttcgccatgcaaagttgtcgattatttttccaaaaattccctcgggcggaattttgaagaatctcttgagcaacagctgaattgcttctccaatgcttttcatcttttgatctcccccgcgggggagatgcgccgctcccggaggtaagtgcaataccgggccgacgcgcggtcgagagggggcaagccccctactgcgacctttttccaaaaattggttaatctctttgaccccggtaggggtcgttacggagattaagccgtaaagaacagatactacactttgatcttagccaaaaggccgagaagcgatgcctgaacaggcaaaatgggttccggaaacggaaccggcaccatcgaaaacatatgggtagcattttaggcgaccaaaattgcacatttgggagcagagatattgaaaaaattggggaaatagcgtttaacgggagggacaaataggggaaagaaacaagacggacgagagagagtgcttcctgaagaggaaagcgtaggagagagtgtgtgccacagacatgggaagggagaaagtggggggggggcgaggcagcagcagcagttggtcgtcatgtcgtcgcacgccgacgaccacttctcttctttctcctctcattgactctcgctcgttctctctctctctctcctctctctctctctcttccactctttttccatcgaagtattaattattattaaaataattagtaaaattaatatttaaaaaaactttatttgaacacacttcgtcctcctcctcgcaaatgcttctccgtttccccgcctttctgctgttgttgttgttgccattttcaacagcggcagtgtccaactcgaaaatctaaatgtaatcatttaattaattacctaattatcacgccttcattggtgtataatttccttcactctctaattagccaattaaaaattaaattaattttcccgtttcgaaaattcaattttcgcgccgccaaattctcgaccaccaatcactaccacctgataatcctcctcattgtccaccattgatccgcaacttttcgcttggcattgtgccaattcatcatcggcatttttccagtgaaatgaagcgtcgtcgccgcccccggcgggcaattggtgcggcgggcacagtttttgttggcattctgttacaataaatcgagagacattagacgaggacggcaatttgtgttacacctaaaaaagtgccaaactttttggtaaaattgtcttgaatcgaggaataaccaaccccatacagtcgtaaaattcgaaatgggagggacggcgccatggataaatccccaaaaaagcgggcaaaaatccaaaactctcgggcgcaaattcaaattggcgcccacaaatgcttgccatttccctgtaaaaatggtgcgccccggaatgccacggcaccttccaatgcgtgccgaagtgagacggccacttgttccacgcatttgacaacgtcgggcggaggcggccacgctgagtcggcaccgccgtcgtccggcgaaggttgaagccttagaaaggcgcaaaactcagattggcatgacacgcgaacacaattccaaatgccaattttgactcgcctctccagtgcccattccaactgagcacggcacattgaggcccgggaagcgacggccaaatcggcgctgcttatcaacacattgttggcatttgtcctgctgctcgttctgccgtacacattggggacgcacaacggcactgatgttgttgtggcacgtacggtgttcaaaatgagcgccaaattgcgacagaacgccaaatgctcgcggcgtcggaggtcgcggctgagtgcgagcagtgcacaacggatgaactcgctgcgcacgaggaaatggtattgccacaagctctgaaaatgaattcccaaaatttttgaatccatggattcaaattcccgacatttcgatatgccggttccggcattttgaacccatgggcttccatttcccgacattttttggttcggctgccaattcccgacattcttgaatcgacgggttgcaattcccgacaattttttattcggcatgccgattcccgacacttttggattcatggactcccaattcccgaaatttgctgtgatcggtgccaattcgtgaaatttgaagcttcggattttaatttccgatttttcccggctgatcatatccgatttcgacatgccttcaggctgttcatgtgcaaatcgttgtcgtcgtccaccgccgccgtttcgccggcgtcgcaaagagtgcgcatttcgtcgcccacaaaattgaacaacaaactgtcccgttctttgctgaaaacgtgccaaaattgttaaatagacatttgaccaaagaatgacatttggggtttatttgtgctgttcgagaccgaaaatttcccgagactcgagaccgagaccaaaaaacccgagacttttctcgagtcaagaccgagcgtcttgaacagcactaggatttattgagttcgaggaagcagtcagtgatagccaaatgagatggaagtggcatggcacaacaaagaagcacaccccgctaacagtggtgggatggcacatcggttaagcgccttggacaatcaccaaatggagagtccaccccaaaattgcgccgcccgaatcggtgaaaaaattttttgatggaattttcttataaaaaaaatcaggatttttctcttgaaaaatttcgaagtttaatagtgctttttctatcgggaatctcgagactttgtgggggtcaaatgttgtcaaaggtcacaaattctcgacagagacaaatgggtcgagactttgggaaaaccaaaaggttcttctcattgccagggaatgaatggttggaccgggtcaaaacgagtcgagccgatgccgtgttaaatgcccgcacaaaacggcacaattggcgaaggcattggacacgcggtgcccgaaacggaagaacagcagaagcaaacgatgggggggaagaagggagacgacgagaagtgacgaagactgacaaaaaaaaatggaaaaattanaattaattccatganaaaataataatttaaatattttttggattaatttttattaatacaaagatattttttgtgtttataatttatattttttttaacataacaaatgatcattaat

SEQ ID NO: 3065 - DNA, 1741 bp, Heterodera glycines
  unsure (1)..(1741): unsure at all n locations
tcttataaaaaaaatcancatttttctcttaaaaaatctccaactttaataatactttttctatcatcaatctcaacactttcttaacatcaaatattatcaaatctcacaaattctctacatatacaaatctatcaacactttaaaaaaaccaaaacattcttctcattaccactaaataaatccttacaccaattcaaaactactctaccccataccttcttaaattccctcacaaaacttcacaattatcaaaatcattcatcactctcttccctaaactcaataacatcaaaatcataactatatcaacattactaatactactaaaaataactaatacttacaaaaaaaatataaaaattaaaattaattccatcaaaaaataataatttaattatttttggattaatttttattaattacaaagatattttttgtgtttataatttatattttttttaacataacaaatgatcattaataaagaaaaaaggaattagttgaggaaaaaatttagaaacaatttttttttaattgaatgaatatttttaaaatgcaaaaaatattgaattagttgttttttagacaatttaattaattagtttaacaaaagaattactgtatataaaatcaaaaactatttttattattaattgcaaaattaaattattttattttaatggaaaataaattaaattgcatggaaaaaaatatattaaatttattacttttggattagttttaattaattaaaaagtagtatcttttaggttttgaagctataaattgtaaattatttttgaaataacaaataattattaacaaagaaagaaaatgaataaaatataaatttaatattaataaagaaaaaaaaatgttttattatttattttcgaatttcgaccagcacccgaacagtgcgagttcgcgtcgtcgcaacccgagcacaaagtgccgaaaacggtcgtccacgtgccgggcccaaagccaacaagcgagacgaggcagcaacagaatgaggagggcggaagagagaaggaagagggcgagagcagcggagaggagcagaaacactgagaaagagggggagaggaagagagatgagagagtgaattttaaataggaaattggggaaaattgggaccgaaaaaacacaccagagtcgagactaataattgatcccacgaaggtcgagagtgtaattacctagataactcggcaatcgagaaatgagatccgagaacagagacttgaattgaatagcgtccagctctgcgcaagagaacatgagagagagagagcgagagagagagagagcgagagagagcgaaagagagagaaatcgagagaaagagagagcgagagagagagagcttgtggcacgcgagagtataatttcagtggtcaaatcaccaaaatttgccgaaaaagtgcacatggcaatggctccaacgacgacgacgccaaacgaagcaacgggaagcaggttcaatttttgccgcccaagtgctgtgccatgccgaccgctttgtgtctgcaattggtcctcgcccccggcgctgtcctcaagttcgagcagttcaatgtcctgctcgtccaacagctcacgcgccgccgcacaatgccaccattgacggaacagtgcatgtgaaaagcaatttcccatttaaacagcaaacacttcaagaatagagagctaggaagtaaaaattagaattttccctgacatcttggcaac

SEQ ID NO: 3066 - DNA, 3146 bp, Heterodera glycines
ccgaaattttataaattcggaaatttttgccagatctataaaaaagccaagttgccttaaaaaactaacttagaatttttaagaaaaaaaaatcttagaaagtttttttttataagaaaattccaaggaaatttctcgaaaattttaatggtgaagatttttcaaaaaaatttccaaaaaatctcttaaaatttctcgaaaaatttcttttcttagaattccaggtcgagaaaaatcaacaaaaccgaaatttttgtcgtatagtttgccacccgatatgtatataacaaatttaaaatattatccggtagtgagtgacacattgccaaaagtgaaatgccgaaattttttttttcatattttttattccttcgcttcgtccacacacaataaaagtttatgcgcaaaatttgtctgtccatataaaaatttaatgtgagtcacacacaacagtgtctgatcatctcatttgatcatcaaatcaatggttgtgttttggatttagctttttctcattaacaaatcagcatcatcaacagcagcaacagaaggcaggagggttgccaagtttatgtattgtgtctagagatcggcctagacctggatttttactggatccaggtccaggaaacccaagtccatcaaatctggaatacatccatccaggtccagaggcgtttttcaaaataccgatctctaattggctctactttcatccatcatgcctttctttattttttgttccaattttccatggcatatgccatatatatgttatgtacttgtttttttttctccagcagtacataaactcttggcaacccgcccattttgagcggtcatcaaattaaaaaaagggagtgacaaattggcgtctatccaatgaaaaaaaaacatcggcaaaatccaacagcacagaaaagaagaacaaaatgtatgtatgaaccagtgtgtgtttcatatcaccttaacacatatatgtggagagcaaatttacgtgtcaatttgttgtacaacaacaaaaaaagggtgaggagataagtctaaataaaaacaaaaaaacagcgaaaaatgaggggaaggattaggaggcggaactgaaacagcagcacaacacacgcgcgtggtggtggtggggaaatggtgccgtgcccagggacggtcccatggagaggaagtaaacaaggggggcacgtacaccctgcctaatggcataaaatttcaaaaaaatgacaggaaaaccccaaaattgggccaaaatacagacacacttttgcccaggagaaccaagtcccgaaaaaatcccgaatttccatggaccgtcgccaggtgtgtcgtcacactttatatatttaaaaaaaatgatgatgatggagcaacgaatatatgtatgtatgtattatctatttttaataaaatatgtggcgtgccggtgccatcggtccccgtcaattaattaattaatgagtcataatggtggtggtgtgttgtcatcattcacatctctcctcatctcatcatcatcagcaaaatgtctctctctctctcctctgtctgtccgtgtgttgttttgtgttaattctgcttctgctgcccgtactccttcccctcctcgtgctgctgcatttgtgcttcttcgcctgccatttgttgaggctgttgcccgtcctcctcctcattcccatggcgtttttgttgcggttgttgttcgcctcggcgacgatagtacctgttacagggtggcagggtttttttttttgaattttcaaaaaaaaatttttttaagccaatttatggcccctataaaatgaatgtatattgggtgtacaaattgatatgccagtgccagatttgaagatgagcccgcatttttggattggggaaggtgcaagacgaatgggcaaaaattttggtgttttattgtcctatcaaaaacgcaagaaaaattataaacccctttcgaaagaaaatttttcaattttttttttgttacaatttcaattaaaaaagtgtaacataacaattttacaaaacttggcaataaaaaaggactgaactgcacaaaaaaccacacttacagcatgtaggcctcgcgtgagttaaacacatccggcacatcgtgggtcaatgggtgggcggccgagtcgttgaactcgcaccagttcaacccgttcagggcacaagcggagtaatggccggagccaaggcctgtgtcgcaaatttgccaacatcagaaatgcgattttttttgaggggggggggggggtgaatacaaaatattttaaatttttattaggaggaaagcgattttttttttcaattttgtggaagacgcaaccgaaatctgtttttaaatggttacaaaattaatggtgaaaccaggcccgtagcctgcacaagttttaggcgggggaaatcctaatgttttttttgcccttcgggttaaaactttttgtttttcttaaatgttcagcgccgagaaaaaaaatatataattttttagacgttttcgctgataaatgccatttttttgtcgttttggagtcaaattcccaaaagtacgagaaaaatggtggaggggttcaggcggtgccgatagacgtcgttgggaatttcaaaaaaattttcagattttttcttgagtaaatttcataaaaaagcgcgcggcttaccgcccgagtggttggagatgccgatgaggtcgtacttctcctggctgtgctccgggttcaacaccttgtcactgaagtccagcccgcgaatgggcagctccagctccgtctcaattttgtcccgcgtgtaccgaccgtagctgaaccgcttcaggtggatgaccaggatttggggcagtgtccacaggtccaactttttgaaggcgcgccgatgcgttttgcagttggggcagtacctgcacaaaaagtaacagcaaatgaatgataaattggataattaatgtatgccgccttaattatggctaattaatgtatgcagcgcctcaattaaagtgtattaaacgtagccacaaagttaaggcattcgaatgtcaacacatcctggaggaggaggcgcctttatcggcaccgtcggattgatatattttgttcaaaacaagtgatacggcacaacaataagatgccatcaccacg

SEQ ID NO: 3067 - DNA, 7399 bp, Heterodera glycines
tctcactctctcttctctattctctacctattatcacgctctctctctctctcgctctctcctctccctctctcctttctctcgtctcaaaatcacaaacttctttctctgttgtggcttatgcgcttgagcaaaaattacggtactccaagaaataacaaaatttaataaaaaaaaatatttattttgattttatttattcttattttcaaatgaaagatttgttaaaatattttttacccaaacttttctccctaattcctaacatttttgaaaagctaaacttattgggtcaatggaaaatcgtacaatcaactcgtattttacaaaatgaagcctacgagttgaaagagagagggcagagtggagagagcttggtgagagtaacaaaaataaaaagaatggaagataaggagtatgggatagaaaaagagataaagggagaagaaatgagatttagatgaagaatacaatacattaactattgaatttttatcaaagttttttaaaaaattatttgaagataaaatagagcggttggtgacgcaaagcagcgcctaactaaacgttgatatttatttatgaggcgtttatgaattgactaatatgactagaggagttgcaaatgtcctaataaagacggaaaaaaattctattttattgttaaacaatttttaatacaaaatttttctttaactgtcgtaatgttcactgtccagttgtccggttttgtccaaatgacttcattgtccaaatatcctggcacgtgtcttttgtacgagtcgtcatgatacccaaacttatttatgccatatttttaaatcagaagccttgaaataaaaatattttaattttatttggttttgtttcctttaactttttcctttttactttcattcttgtattgcttttgtcttcataattaaattaactttattaaaacaattatttttcaataattttaataatgaaacggcaagcaactgaaaatctgcaggaaattgctgcaaagaaatccaaattgtaaaacaattttttaaattgaatctctatgaaaaaacaattttttaaaggaacgagcccgcgccaattcgagcttctttcgaactttattgggaagggtaacttaaactattttattcatattttttatttaatttttaaatattaattcatattttaggctgtgaccttttcgcaatattggcaagggtaaaaaataattaattgttatgataatttttatattttctttaaattaagagacctggtcagtaatgtttctgatcacaatttcgccaaatcgtaagtcagtgggttaagaaaaatgtagagttgagcggtaatcggtaattgcaaaaaaaccggtaccggtactgaccggtactgcaaaaaccggtaccggtaccggtaccggtaccaactttttcaaccggtaccggtaccggtaaaaaccggtaattttagaacataaaaatttttggacaaaattttccaaatacaaaatttttattcagttttcgcgtgagtacctgttttttagcattagaattgttcagaagtatatgtatattcaggttgaccaagtttttttttttcaaattcaggacgtacagtcatggtcataagtgttgtcccatcatgctttgaaaaaaataattgcgtataaaattgtcattttccaatttcaacagataagtagcataccattggatagcattttttatgggctttccaatgataccatatttgcatttgtgacataaacatttatttgatttattttaccatattcacaatttgatcaaaatataggtggtcaagtcccatttcatttttaaaatattgcttctctggatcagcattaaaaaaatctaaaaaaattcaggtaagcataactttggatgctgatcaaaaaaggtagcaacaccaagttgatcagatcactccttcatggtgatctgatcagcccattttggctgggaacgaggggtaaatttcaaaaaaaatttctagggggttgggaaaatttttctggaaattttgagtaggcccattttatagagcacaaaatttgctaccgaattgcctttggaatagtgggtctacgatttaggcccgctgagatacgtcgacttttatttcggtgcctataaaaagtactgtatttcttaagaaaatagtgcattttacactacgtcaaaattgaagtgcccatacctcagccggtataagtcatagaaacatgcggttttttgaataatcagcggccaattttccaattttgcgaaggggtctccggccatgtaaattaatgtaaatcaatgacctttttttgctttcaacaccgctttttacgcggcacgttttttccaagacttttgggggacaaggagggccggcggtgccgataggcgccgccgggaaaaattttgtaatttttaatgcgatttgttaacagaatttgtaaaaaaaatgaacaattgattaagttttgggtttttaggatgcttaacatgaaagaaaaaagttggaatattttttaaaattaaaattttaaattttttctcaaaaatttcttcttcttcaccaatttcctactcttttctcgaccagacccccattcttaccagtgcaaatttttaccggcggtaccggtactagacaaaccggtaacggtaatttcatttttgaaaaaaccggtaccggtaccggtaccggtaccaaaaaaaccggtaattaccggccagtaccggtaccgctcaaccctaatttgcagttccctcttttccttgccaaatttggcatttattttccttattgccgtggactatcagtgccaatgtcaccaaacgaatgccattgtttttcgattgacgtaaaaggtgcacttttatggaaattggaactcacttacctatgtttgtttgttgctcatgtgacaatgtgtaaaaagagtacgaataaatgggaaattcaaattaattttatttccttcgacggcaccggcaaaaagcgttcttcgcatttgaccatttttaccttttttttaaagtgccaatttaagttgcgtctaaataaatgtttgttcgtctcgtctcgtctctcaatttaataataataattttttaaaaatttagtctcatttttatttttctcatttttgaaactttgttatgaaaaaggggtaatgcggtgccaatggtgggaaagtgtgagaaaaggcgacaaaattacacaaatataataataatttgcctggcgggaaacttccccttttggccttataattttggagcaattggccagccgacgagaacaacaattgccatttgtataattatcattggcataatctgtgccttaatttctgtaataatcttaaattttaaattttttgccccaaattccccattaattaattaattaatttagcgattaattaatttctccttttaattttcccattcttcaaaatgtcctttcttttcggccattgtcctttttctctttcccttttttgcttcttctttttcctctgcttttcgctgctcgttttggctgatgaatttgccgaaaatggccaaaacggcgctttaaaaagccaaagtcagcccaaggaaagacggctgcgaaatcgcccacgcgactttctgtcggaatgtgtgacggggtaccgggaacggatcgaattccattgccaattcccgaacatggacaagccttgtctgcgcgaaaatgccgaaggtgtgacgacgttggcactcaaattcgttttttaatggcgatggggcccatattgtcctcaaaatgatctctttcacccacagattccgtccatcagttggacgtgttggctgccgagtgctgtgcctcccctcgcctttgctccgtcgatgacattgagtcgttttgctgtcgtacgatggactgcttgggcctgtgctatggcgactccttcttggcacaaattcaaagccgcttccgttatgcggacattttgctgaaacggcactcatcaaaaggggcggaaaagaggggacgaagaacgacggaggaggaggaggaagaaaaaagagatgaagaagaagaataatgagatggacgatgaagaagatgatgatgatgatgatgatgatgatgaaaatgatgatgaagaagaagaataatgggacgaccgagtgaattttgaggggagatagaaaagaaattttgcagatcaaaatttacaaaataaactttataattatttatattaagaatacaataaaattaaataaacagctgctggagtgaatgtctaattctttcacaaattcaaaaaatttcgttattcgaaattaaatttgtatcagaattcttaaatttataaaatttgttcaacattttaaacaaatcctaccaaaatttgcaaaaaagttttcttgagctgtcaatggtcaaaaaagcgtgttcaaaaaatttaagaaaaaaatccacaaaaaactgaatttgagtgaggatgctttggctgggaaattgatttgaattaaatatattattatattgtcaatatcaatctttatattaaattttgataaaaattcacaaaaatcacaattttaatatttaaaatgtttgttaattagttcttaaaatcattaattttctgatttaaatgctgatccttagttcatttttgaccagctgacttagctttcgatcactttctgtcttcaatttccatcagatgcttttgagtatgtgaaaggacccgcaaattttgtccaatattaaatttgagagaaatttttgacaaaaattgaaagaaatcgtcggaaagataaaagaaacgtcaaaaaggagcagaaaaattcttctgctgtttataaaaggaagtcaaagaggcactaaagtattgttgctattttttaattttactaatgataaaacaattggcctttaaaaatcactagatattcgtttttttgtgactttttcggcctttttaggtgcctatttcgcgattttttatgcctaaaaacgaatccctaataatcactaaacgtaaagcaattgaatttatgcaaatgcagcttttaccctgcactgtgaaaatcaagtcaaaaagctgatttttaatttcagaattccattcctcatccggcattttttcggctttagcctgcggctatagctcttatgaagcttctcaaatttatttaaacagtataatttgcacatatgattttgacatttctgtaaatttttacaaattttgtatttcttttcagtatattctccctcttttaaaacggcttctttagcctcttaaattggaaaatttagaaaaaccacttaaatggaaaatcttagaaattaagagaaaatactttaaatttcaaaattgacatcataattgttcaataatttcatttaatacttttaattagagtgccacgggaccgggaattttgggcaaacccgggagagtcactcttcccgtttgtagaatcgccaatttttgtctggtaaaaccagtactcaagcggcgactagctaccggtaaccgcggcagaaccgtttcctctggtactcagatatgcacaatagaccacgacgatgcaccacagccaatgctgacgaataaccagcaaaataataatcaaaatgcacaactgcctattgtcctttcataaattgtattattaaatgatagttaaaaaattaataaaattgagttaaaaatatccggcatttggtgtgctgcctatttttgatcccgaatcctgcgtgtttttttttaaacgcgggacaatccagcggaaataatagtgactccctttgttcaaggaagcatcttttctcaaaaaaaagtactttctagttttttggcaattctctaaattagagttgcgctccgacccctcgggggcaaaatatcgggggcggggatcttgttaaattgtttatttttattttttgaagattttctcccttgcaattttgttttagtttctgttagtttttgttttgttggttgacttgaatgattaggaaagcatcaaaaattgtttaattttagaaatatttaattcggtttttaagaagacaatcatttttctaagtatcgggatttttgggtctcggtatcgagtctcaggatcaagtctcggtcttggtctctagtacatattctgtgctattatatgtgccgaagtattcaaatatcagcagagttgccggatacgaatggatacgtatgaaattattatgagagcatatccgcttttatgaacaaagaagctatagtaagtattttcgtgatcgaagttgggataatgtaaaaatttgtgagaaaaaattatttgatatcgaaacaaagaatttattatcgaaccaatttttattaatttaaatttccaatgtttcataaatcctcaaacaagccgaaacccatatttaccatcgaaagctcccccaactcgctcattcaagcgggtccaacagaatagcgtcaatacctacgaaaggcggaaaaattaaggagacatttaatttccgtattatatgtaacttttcttattattatggattattaaaaagtaataatgacactaaattataagatttatcaattggaactttttaatctttcattaatatttgttcaaaattgtatttttccgtaaatttttgaccccaaaaacttctgaaggcagcgcctccgccatctgtcccaaggatttgagtgagtgattgagtggggcactattatggtaatatatttctgctgcaacagcaggtgagttatttggtccaccgccgtaaaacaatcgctttttcttcgccatcgctttggatgtcgttgacatggcgaatttgtccgcgacaggagcgagccattggaaagacactttttggggcaaaatggaacaaatttggtgataatttttgttgagattgagtcgcccatatgtatgtggtatttgtgtaaactgaaaatagtaaactcatttttgggagtttgatcacttcctgtgaatcaaataatgttgtcccgttaaatttatcgaaacccaaaaaatcaatattttgtatgcctaaaaatctgaaaaaattcattctaaccgaaattttgatgctgatcaaaaaacattttaatttgaatagatttttatgtaaaaatcgagtactgaagtgtccattttcaacggacactcagttatccattgtcaaaaaaaaaaagaaggaaaagccataaaatccaattttacttggtaaaaaactaggtttggctgcagataaagtcatatgagaatgtataaaactatttttaaattccgacaaaggtaaagccgatgcccggagggcccccggtcgcgaaaaagcccatgcgaagatgctcctttggctaaaa

SEQ ID NO: 3068 - DNA, 737 bp, Heterodera glycines
aaaaggaattcagtgccgccgctttggacgcttgggggcacaatgccgttttcggcagcttcaatcggatccgtttgatgtgttggaatcagcgaagaggagcctgggacgaggcaaattcgttgatagtacgaatctaatacaaaaataattacaaaaataaatttttaaacaaagattcacaatttgtacacggtgtgctcattggcatggaaaagtgatgggtcgacactgatttgtgccaacattttgggagcagtgattgccattgactgcgcgatgagagtcagtggcaattgttaaataattaatattaattatatagaattaaatcaataattgatccgatggaatctttgctttaagaaaacaatattacgaaatcggtttgaagtcactttcgtttcgccatcgcaagccataatcaaggacctgaaattggaaaagatgccaaaaggaggagacgaaaatggggaggaagtgcaaatggacggagttcagcaagtaattaagcaaatgactaaaataattgatcgtcaataaacaattgattattattgctttaacatttcatatgctttttagagttgcgtactgcgctcggccaagggccatgagctcggcgacattcgaattatgggtaatttggcaaaaaaaaagcaaaaaataattttaaaatgtttaaattaggccgagaaaaaggctatgccatcgcatacacaacgtccacactgatt

SEQ ID NO: 3069 - DNA, 1639 bp, Heterodera glycines
cttgcgcagctcggacatggtcccaaactgaatcatcttttttgcaattaattgaagtggagttaattgaaggttcccctattgattggctcgagttgaatgagcgtgccaacaaattgctgttccgcgacctccgtgccgcactccatctgtactcgttggagaatggcatcaccacgcatttggtcggccattgttcctatgttcaatgggtaaataagcaaaaaataataattaaatgtgacttattataaatataattcaaaggtgccgcgtagtgacgtaatagtggcacaatcgaacgaacaaatctgtgtatggtacggtaaaatactgtaaaatattaaaacaattcgatggcattaaaattattttatcaatattccattttttgttgaaggtataacactgatgagcagaacggatcgacagaaagagttgtccattttacagtacaaggcgaagttgaacaagtgatttatggggaatttattttccataattatttttaatttttggcaattcattccaatttgtcctaattgctctcattaccttctcaggtcgcgcgcgatttgtcccgcacagaagtgattgttttggagaacggcgtgcagcgggtcgcctacgagttggactcggcactgatcgagttcggcacggcacttgacgagttggacttgggcagggcggtcgcttttctcgaacaaagcgaaagacaaggcgagaaattggtccaagcatttagcatattgtaatttcatttcaatttcaggaattgatgtccaaacgatgtggcgccgtttggcccaagtggcgctgcagcacggccaattaatggtggcccagcggtgcttcgccagcctcaatgacattgtccgtgtccaattcctgcaacagacccaaatgagggcggaacgccaatttggggggccaatggaagccgaggcattggccgaacactttgaggtgggcaaaaaagcagcaaaatttggcatttatagtatttattaattaaaaaaataaaaacgaccaaatgcgaaaggtccgagctcgactcgcaatgatggccaagcagtttaaaatggcggagcgaatttatttggaaaataacgcaacggccgaagcgattgccatgtggcaacggatgggaaattgggaccaagtaatggaagaaattaattgaaacaaaattttaatacccttttttaattgattattaaggcgttggaattggccaaagcagtgaattgggccgatttggaccagcttcaagccaaacatcagctttggcttgaagagacgggacaaatgggaaaagtggcggaactgaaggcaacacaaaaacaaaaagccatttaatatttaattagatataattaattttaaaaatgatttaggcacgtgagggccttttgcacgaagcattggaaatgtttttgagcgccaatcagccgggaaaagcagctgatttactgttggaaaacaagcaaatgctgcaaatggaagcagaacgagttggaaagcgacaataaaaaagcaaaagattaaatgtttagcttaattcctccgaggagggcgacgaacagccaatggtcgagcggatttactcatcgctggcccaacacgaacagctgga

SEQ ID NO: 3070 - DNA, 1192 bp, Heterodera glycines
aaggcgagcaattatactaattaccaatgctaattgaattggtggctaaacacacatttaggcaggccaaatgtttgaagctgttggccaattggagagggccttggattgctttcggaggtattcaaaattaaatttcaagaaaatatgaaaattcaggggccattcctacgcaaaagccatccaaattgcccgtgtggaattccctgaacgcgtgctgacattggaatcggagtgggccgattggctgtttgagcaggccaattacagccaagcggtaccgcattttcttggcaagaaaattcaaaaattaaaataatattcaaattaaataaatgtttagaggctggcaatttattacgtgccattgactcgtcaattcgttctcgggaatgggaaaaggctttggaggtttaaaagtaaaagagttcaaaagcattgtttcctcgttaagattttacaagttttggagccatcggatgaaacgaggcccttttatggacgcattgcgcaacattttgaattggagggccaattggacaaagtgtgccattttcaaatgataactcaaacactttcaaacctaattcgtttttggctgaacggctttacgtcgatgctgccaatttggcgggtgctgtcgaaatgtacaacaaagctggccgatgggtggacgcatataagtcgagaatttgggtgctcaaatttaaaaaaactctattttaaagattggctttggaattgttgggaccttcggaaagccatcagctttatctgggaaaagcattggaacttgaagaggcgaaaaagttccaagaagcggagcaagtaaattacaatttgttgttggcaattaactcactaattaagctttacattgcgcttggggagccaaacgcggcgatttccatgtataaaattgctgatcgaatcgacgatatgatgcgattaatggggtcgtaaaatgaaataattctcattcaaaatcagtaaaattaagcgaaattaattttaactttagccgcttccatgtggacgaaatgcaccaggcacaccgaaggctggcccaagaattggaggagaaaggcgatttaaggggagccgaagaacaatttttgctttcgggtaattaataacatttaaatcaaattaattattattattattattattattattatattattattat

SEQ ID NO: 3071 - DNA, 969 bp, Heterodera glycines
ttagtactatcgtactaatttttaattaatttttaaataattaatatttaaaggactattttcctaatctaatcttaatttcaaattatgaaagcaattttaattaattttatattaatttatattgtataatttaaatttactaatttatttaaataattaaagtaattttaatttttttataaactacgccttgttgacccatttgactaaattttggccacctaattcggaccagggacgggtgagtttcgaatttcgagcttcgtacttcgaaaacttcgcatttttggggctagtacttcatactgcgaaaaaattgggcttggtttcgagcttcgacatcaaatgttaagccgagcttcgcccgtcgttgattttgacttcatccagcatcggatttttccacttagtaattagtattaatgactttttactgcattttcaggttgcttaccaatgggccaaaagtttgggtggcgattcggctgtcaaattgttgaataagcaccaattgttggaggagaccattaatatggcagtttccaaaaagtgcaacatttataaaaaaatgaataaattctattttttcgcagtgattttgactttgctttcgaattgtgtcgccttggcgcttcccatcgatttccattggtacaacaaaaatttgcggagaaattggaagacgacgcaaagtttgaacaagcggaggaaatgtacttaaaggtgtatcaattgtaaattgccttgttaattaattgagacaggacgggactggggctccgccgggattttgccgggactcacggccccgttttttgagcgtaacaccgggaaaataagtcccgaaaaaacggaagttccgtacggcccttcccttccattttattgttgaaggagtttcggttcctcgtcatgatacaatatttattattttaaatttaacaatctataaagcgggatacaatt

SEQ ID NO: 3072 - DNA, 6018 bp, Heterodera glycines
tgaggaataaaaatatttttatctggtgctatttcgagaccgcgcacttttttgggggggggggctacaccaacaatcacggactaagaagatggacgacctccttgaacttgttgaccaattcttgtccccttgatgcataattgcctgtgaagcggcaaagcaaatgctttggttggccatcggttgtcggcgtgtgcaaccatttggacaacacttcgccagcagttgcattttttccgtcataagcaattggagcggggaacagacgataggaattgatcgatttcagttgcgtcagatcagtgagaattgtcggggaaacgaaactgcgcaaattgttcaaatttgcaggcgaatagaaggccaaatgacgaatggttggcgcaaaaatgggccaaatctccctgaccaacacatcccaaatcgctgttccagtggacgcgtgcaatttcaatttggtgccccttcggtcaaagatttgcttgtttaaacggaaaaattcgatgacagtttggtcgatgtatctgcgcaaaagtggggcaacaacataaaacgcgttaatacacgtgtcccgacatttgaagcacacaaatatttgtggagcctgtaaggctgaaacaaatataaacataattaaagcatttgataatatctttatgagaagcaagtacattccatggaaaattttgactgatcaagggaaagaatttacagctcattcagtaaaaaatattttgatacaaaagatgttgaacatttttgcatgctgacttcccctcaattccacgctggtatggctgagcgtgccaatcgtagtataaaagaacgtttatatcgttacttcaccgaaagagacacttacaaatggattgaggtagttcaggacattgttaagggcattaatcagtctataaactcctccattggaatgcgacctgctgacgtaaattttgaaaatgcagaggaactgagacaaaagttatataatgaagcgaaaaaatttccaaaaaagagtcctaaattcaaagtgggcgaccgtgtgagaatagaaaaatacaaacatgtattccaaaagggttatttaccacgatttaccgatgaaatatttacggtagcagaagtacatacagaacgctcgcccgttgtctacagattaagtgacgatagcaacgaaattataaagggatggttttattccaatgatttatgcaaaattctcaaaaacaaagaatcactatatgatattgaacaaattttgaagaagaaaaaacaaaatggtattgaatacgttctggtaaaatggaaaggatacagtattaaattcaatagctgggttccattgagttctatctccgagaaaaatatataaaaactttattgcgctttatcttttaaaaaaatgccatccaattctttttacattgttcttccttcaaatacaaatgttgaaggtatcaagacaaattcattccgggttcgtttaccacgaaaactacaattcaactccgaatgggaagttggactcgctgttattgtatatcctcatacttggccttcgattggtactgttgaacagcaatttgtagaagttgaatggcaaacaggaaatacggtgcgtattgaagtaccaccatcgaatgtcacaaatccaattgacttgggtaaaagtctgtataggctcttagacgaaggaagtgaaccgttagcaaaaaaggtacgaaccgcacagaattctttttcgcatgctacaaactctgctcgtcgtggggctagagaagaatacataaaacgaaaaacgagagagaaacgaagtattcgagatgaagaaaaacttctagaagccttattgacggacattgaaacaatggttgacctttttggtgtgactcaaagtcttttagcgcgtgagaagcgcgcggagacgagcaaaattccgttgagaatgtctgctgatgacaatgaatcataccaacataaattggatgaatatttttcaaatttaagtggtcccgatttggacatactcgaagaaatgatcagagcaaaattgaacgaagaaattaaaaatatggtagaggaggaccgtacaattcttgatgcaacgaaagaaatgggaatggaagcgtgggttcaagcgtaccgtaaagttaggctcgtttgccgatttatttttgatgtcaacaaaaatcgtttcgagttaatatttgatcagcgatatgtaaggagggttaaaatttcttcacaacttgcgtatatcttaggctttgacagtacagattttacgacatcggaaaatgaagcaaaatttatgccagatatgaatggtggcgtatcatcttttcaagtttatactcccgatctcattgaaccaatgatgattggtgatgtcacagcaccagtgttacgcatcgtcacaattcgaggaaaacctgatgaaatagttgaagaacaatttttagcaatacaatatcacaaaattttaattaaggaaatttctgaactcctgatcgaaattcgcacaaatagcgggagcctaatgccattccaatatggaatatgtacattaactttacatttccgaaaactgtcctacttctgaagatgaataccttggaaattgataaaattttatcgacaagcccactcacaaaacagacttatatcggctgttttgcggctgaccagataccaaatatggaaatggtaaaatttccaaattgtctggtaatgaatattgacccaatcacctctaaaggatcacattgggtttgtgcttacagtccttctccgtcacacattgaatactatgactcgttgggcatttggccaccacctagcatacacattgcaaattatttgtcaagattcaaacaaattcgttatagtataattctacttcaatctcccaattcaagtgtgtgtggtcgtcatgtgctcttcttttacgtttgttcagcaattaaaagtgaccgttggaaacactgaagtttacgatagcggaaatttatatccatacaaagcctacattaccaatgaattgagctttccagtaaatgcaaaaaagaactttctcggctcaacgggatattatcacacggaacgtcacgatgatccaacggatgatggatttaaagaacgttgtaaagtttttaaaggtggtaataatgcacagttcctctctcgccttgactttgacttgggaaaccaagaactctacctgttaaataatttggatttgttgttcacaatttacaaagcgaaagacgcatttcttttgaaaacacttaaagctaatgacgacacaaagtaccgtttgaccgtgcacgatgttaaaatttacgctaaaatgattgaggttcagccctcactcaacatgaatctttacaagacactagaaaagcagccggctacttatgctgttcgtaaaaccgaaatcaaatcttcatacattagcagtgggcgctacgaatttgaatacaacgtgttcagctcgacaatacctcgtcgtgtaacaatagcgttggtcagtaactcggcttttaatggtgattacaaattgacgcccttcaagttcgatccatttgctttgcgagaaatttcagtacatgctgggggcatggtctatcccgttgtaccacataaattaaatttttcaaagaattactatgtaagagcattcgtggagatgtatgaagcgttgggcatggctaattcagaacgttcatttgacgtttcaatggatcaattcaaaaatggatgggccttttttgtcatctctttgaattcaaccttagacgatagctgtggatttgagctgttgagaagcggtacaaccagtattagggccacatttgattcaccaattccaaagggaggagtggaaatgattgttctcggagaatttgaccaaatgattatgattgattataatcgacacattgtctccgactcgaagcttgggtaaatttataaataaagctcaaaattatattagagaaaaatgaataacacgacgaaagaaggaattgaggtgttacgttcatcagatgagactaatgacactctttttcatcttttgctcctttcacattatgcatttgccttccctgtttttctactctgttggttcataataattaaattcctcaagaggagaggtcatatatccccaagcgaagcggaaaccatgattgaagaaatgaaaaatattcaaagacaaccaccaatattttttcaatcaaagtagtgtaacttactttttttacaatgcattatttttttcttataagaatttggtataattttaattgttattggaattttttttgttaaagacaaatttttaaacatttaacagtttaaaaataataaattattgtttataataaaacttaattcctgttattaaaaaaaagtttggtctctcgccgccacacgcccgcctccgcagcgcttgtagtgaagcaaagggaaaatttttcaccatttagtcaacaattatcccattcctttcaactcaccctgtggccaagtggttaagctcctcgcttccactctcaacggttcgagtccactaccatgtttttgatttttcacaatttttcggaattttcatcataaagtcaacaattatcccatacctttcaactgcccctgtggccaagtggttaagctcctcgcttccactctcaacggttcgagaccgcgaccatgtttttgattttccacaatttatcggaattttcatcataaagtcaacaattatcccatacctttcaactgcccctgtggccaagtggttaagctcctcgcttccactctcaacggttcgagaccgcgaccatgtttttgattttccacaatttatcggaaaaagtcgcgcacaaaaatatttaaataattaatttaaatttaaattaattaaattctcgcgcacaagtccatccaataggtttcggttgaagggatcaaagatcatccaataggtatggggcagggggggggtccgaaaatatggattgaaaaaaatcgataatcaaagtactcgtacattgtagtctcttaattaaaaaaaataagtttatcaaaattaaatgttgcaattaaaaaaaattttttgttttaatttttaagtatcaataaatgagggaaagattaaaacaaacaagcaaattataaaaaataaaaaatggaaaaaattaaaattcaatatttctaaaaaaaatctaactgttttctgaaagtcctatgaatttgagccaaattttttttataaatatacaaattaaaatttaaattaatttattaaaaattttaagatttaactaaaatttatctcttaagaaaagaaaattttatataccgaagatgatgatgaagtatattttaaattgggtctacatttaaatataaaataagataaatgcgaaaaaaataaaattcgatatacctctaataaagccatgacgaagcttgattgcagaaggaacatcgtgtatcgatcacaacgtgattttataaaatattaatgatttaaaatgataatatatttaaaagaaattaaaataaataatttaaaaacaaaaattataacataaaagattcaaaatttaatttcttcaaaattaaagaaaaaaattattaaataatgaaatagtaagtaaaatttacatatgcgtcgacatttataaaataattcaaatttaggtgaaaaagaaaaaaaaataattttttaaaccaaaagattataataaaaagtcagtataaaaaaataattttataaaggaatactgaataccgttgaaaaatgcaattaacagtaaaataaaattttcaatagctcattttattataaaaaataaaatttttgttttccagcatgaaaataaattactttaaatttagcaattcttcttagagtgttaacagcatttttcattgcatagaatttttttctgctcatttttacaatattatggattttctaatactattcgaaagagaaatatgcaaata

SEQ ID NO: 3073 - DNA, 1566 bp, Heterodera glycines
taatctgccaaatgttgttaatatcgctttagtaaaatttcagctaaatatatagtatatattttaatacaaaaacagaggtataaaattttgatctaagatgcagttaaaaaattatatttcaagatagaattttcaaataaagatattttttatataaatgtagagaaaacataattattagtaaaattaaaaaaattttacaacaaaattttttaattttattaaattatgcaatattcaaaatagcaaaattctcgtttaaacaaatcaaataatgaaaacattaatacaatttccaatttaatttaattatttttgattgcgatttgccactaatagcagccacagcaattgtaaccacgccctgctccatgaaggaacagcaaagattcgtcatgtcaaagtttgaggacaacaacttgtttgatcgccatggctcatcaacaccactaatgaggactgcagatgtcccacaaactattagggcaattgaaatgaaacatgtacactctacaaaaattatacttttgacaaatcaattaaataattttcaacaaattaagaaacaaaataaaagtgtctttgaatctaaacgacaaatattgaacgaaaaaataattaatcgcggaaatttaatcgctataattcaataaccaaataattttaaaaaactaagaggtaaaaatggaactgaaactaaaattatttattaaaattcattgattgcaaaaaaatacggcgtcatttaaaaaaaatatcatgcaaattctatgggaataatttttgcagcaaatttttaaatatttaaagaaactaaattataataagaaaaaaatattataaaaagcaaataaaaagaagcattataattgatactatcatattacatcggccggcggactgttggattttggacgcttggggttttttcattttttttgcttttttaatttaattttttgcagtgggatgggccgctgcctttttgcagctggagggcagtgtgaaaaaaccgtgttgcagacaaaaacggcaacagttgcttcatcggtcgccaggatggccacaccaagggccactgctccaacaccaaattggtggccgaatttcaaaagttcaagttttttttcaaacatacattgttgccacggaaacgccgaagaaggaggtaaaaaacatataaaattcaaaaaaatttacaaaaaacaattttgttagccaccggttgccggctacgacttcgtgccggcaaaaaaggctgaggaaatgtacaagtgccatggccttacgcagttcctcctttgcatgtacgttttggcaattttttcgatttttttatgatattcaatgcaaaatgtgtatttacaggggtacccttgtaaatgtatccaaagtttatgaatttagtggccgcaaaattccgctgctctattggttcgatgaagagaccggcattgcggcactgcacctcacccaccgccccgtcctccacggccccctggttcccactggggagccgccgctttcgacctacaaatacaaatgagttgggcagctgcctgc

SEQ ID NO: 3074 - DNA, 1112 bp, Heterodera glycines
cagtttgatttccatcaggagcaaaaaaatagaacagcgagcggcaccagtgaattcacatgttcacgctttctatgcttggacacttcatcgagtttaaaatataaagcttataaaagataaaaaacatggaaatatatttataactatataaagcaattttttatcaatcatattataaggaaatatatacgttcgttaaccatttaaagaaattaataatccgtgtcgagacaaaataaagcaaatacgcaccggttgtagaacaagaaatttataaaataacaaaagattgtggatataataaaaaataaacagcatagaattattgatgattcaatagaacaaggatatcattacaaacaaacatttaacaaaaaattaaataattttcagcaaattaaggaacaaaataaaaaatgtctttgaatctaaacggcaaatattgaacgaaaaaataattaatctcttcaatttaatcgctgtaattcaatattcaaaataaataaaataagaaagcttcattaaccataacaatactatcaatagaaaagatgacagttaccagtcccatacagatttaattgaagaataaaaatctcttatttagtttaaataaatttgataatcataacaagttaaaacaaaataataacaatgaattttaaaaattcgctacagaaatattaaatatcatttttgaaaatattatttaataatctatgaaaatcttttaaaaatttccacgaaaacttaacaactggataatctcgagggtctcgactcttaataaaaaaaaataagtttatcaaaattaaatgttgcatttaaaaaaaattttttgttttaatttttaagtatcaataaatgagggaaagattaaaacaaacaagcaaattataaaaaataaaaaatggaaaaaattaaaattcaatatctctaaaaaaatctaactgttttctgaaagtcctatgaatttgaggcaaattttttttataaatatacaaatttaaatttagattaatttattagaaattttaagatttaactaaaatttatctcttaagaacagaaaattttatataccgaaagatgatgatgaagcataattt

SEQ ID NO: 3075 - DNA, 3632 bp, Heterodera glycines
  unsure (1)..(3632): unsure at all n locations
aagagccggaagagcatcaaattttgagtgctattaaccctttaactctgctggaagcagagccagcaaattcattttttatgcgagttgagttcggcacattctgatgattgctgtttgatccgttctacaaattccattatttgttgctcatgacgcgaactttgcgtggattcaatccgattgtaaattcaaaatagtaaatttaattaaataatttttataaattaaatgataaattttagttaaattaaattattaaagaatattgcatatttgatttatttatctttgttttttatgcctttttcaacattacatttctcgccattattgcatttgtattctttcatcaacgaaattgcgcggcggaaaaaatttttgcactttgaattttgaaagtggtacctttttcggaattggtcaagagctatgataaccgacaaaaagtgcaaaaccatggactcgatttctctaatgattttttgtcagtcaattatttgcctgtgcctttttattacatctgaccattagcataattacttgtgcatatatcttttttatatcctattttgtccaaaatcctttttttttgaaatgtctactttttttattccgttttttaatttgtctactttcacaagatctgaggccataattgcaatgttggcacggacgaatgcaaacagagcaattgaaggaatatttagtagaacttcatctgttaactttaaaaaagtaatttttttgaaaaattattaaaaattattgggttttttaatagagtttatcgggcgggaccgaattgagccgggaacttacggtcttcctaagcgcaggtcacggttttcgcaaaattccccgatcccgcccaactcttttttttacaattaaaatagtaaaatgtaaaatgaatgaaatataaaaatattaatttattatgggatagagatggtgaaacgaagaatatcaattttattaaatttgtgaagataatgcaaatganaggaggcgcaaggaaaagggcaaaagaaagattgatcttgtcgagagtgaggcaaaatgaataaaaaaatataattctattttattaaaaaacctatattatattgcatatattggtgttcggatttatatttatgaaaaatgcgaaatattttaaaatttgccaaaaaacatcaaatatttaggaattattgaaaaagccaaaaatatgaaaaatttaaccattattagagaccggcggacgggctcgggcgggtgcatttcattcccccccccctgtcaagaaatggtttcaaaatttaccaaatatagaatttttatatctaagtatgaaaaaattgaaacccacccacaaaaaagttgtaaaattcgcctttttcaaattataatgggctcgatcttccaacgggcttttatcaggccgccagtgctcggatcgtagcgaagggtaaacacagggaaatctttgaaaacagtaccgcaggtttaaaagtaataaaaaataacatctatttatatggcagcacccttttgcaaaatttttggttgaccccccccccaagtttaaaaaagtagtttttgaaataaaggcctcttagtcatcacaaactgaaaatatatttgcaactgaatcaaaaaatacgagaaacgacctctttgaaattgttggtccacgcaaagtttctgcctggtgattgatgcagaaaacccaaaatttaagcaacgcattctcttcggttgtccgtcgctggtcggaatgtgcaaccatttggacaacacttggccagcagtttacagttggcccataatcggcaatttttaataaatgaaatttatcttgtgaaataatattttaattattatataaacgttatcaatgtaatcagcccattttatttaattaaactttattttacaacttttatattttaaactatttttataataacgatttttatttcttttcttgaaaaggttttctaagtgcattatgatatttatgttgtttaatttaatgttttataatttctttatcgagcaaaaatgagaaaagcttcagaaatgatcttaaacatggatgttttttcttgtcattgctatcttgtttcaatgaaaaataaagattataaaatttaattttgttaattaaatttttgttaaaatttaattgaatttttttttcttttcttgctttggtacaaataaaaaaagatttttaattgctttttatcatatttttgaaactttgtgtttaatagaattaaaattgtttcaactattccagatgaggctatcgaaaataatcctcttctttgtttagtaaacatgaagtaataataaataaaagatgaatctaatcaatgaatatgttcactattttagatcaaatattattttaatatataaaatttattgatcctttgtccttgggtccttttgtttgtggaatcttattagaattaaaaattcacggcactgagctagctataatacattaaaagcattaaaaacccgtctcggaaaaaaagacgggaaacttaccgtggttttccttaggaatccgttctcgcatacaaatttaaaaaagttaagaaatataaaaaataaataaatacaataaaaatgaataaattggtgaaaggttcgagttaatataatgagcatagttctccaagtttgactatttacgtaatcttatgataattaaaattaaattttattccatttttattgtaattttaaatgatataaaaaatattaaatttttatttaataataagaacaattatcttaaaaagtcttttttgccattttaaatgcattagaaaatttgccaaaattcgattttgtaaattgacaaaattcacaaatttgaagatattcaatttctttgatgcttgatagtttatttcttgtataaaaataaatataaattgttttcagaaaaaatatttttaaaaaaatattttaggtttataatatttttagtgacccattagggaaaaaattaaaattctataaaaatgtaaaatttaaaagattgattttcaatattctttttattttttcacttatcatattattattcattttaaaaattttctaataattattttccaatttcttatccacaattgccagtaaaaaagaatttttttaaatctttaaattttttaaaggtaacgagggatgcctacgagcagcgcattgagcgtgtcaacgtggctggcggaaaccgacgcgtgatttcccgcgaggagaaagccttgcggccgcgctcatggtggaaggccacgagcagcgcacctactgatcggatgtgaactgcctgagcaatgagtcatccaacattgcaaataacctaaagaattattaatatttaatcatttttatagaatttattttttcagaaatagttgggttaatttttataaaaatgaaaattaatatattattgctatgcctattactgattaaaaacactatagatcagattgtctcaatgaaaataaagcaaccgaaaggatttgacgaaatatttggccaaagatgggacgaaagagcagaggacaatgaagttgatcaaacttgaacaaacggagcaaatgaaaaaaataattgcccta

SEQ ID NO: 3076 - DNA, 1282 bp, Heterodera glycines
ttatgggtattttaaggctacagaattgaagcatcattctgaggagggggggggggggggggaagcgttaggtccggatccgggtgaagtaaatgatttttctatattattttttcatgtttataaaacatttaaacgaatttcaatttagaattaattaatttttataatattgaaaaagaaatattttttcgaaaaaaataaaaaattttatttatcccccgggcagataaatagagacggggagattatttttcaagctagttcgaaatggtaaataattgaagacgggcagattaatggagacgaacatataattagagaaaatacggtaattgaaattctatttttgtgttttggaaaaacagaaacaaaatttttagacaaccaacaaaaggtcactcaatttcttttgtgaataactggttaatttttgtagtgagaaaaagtttattgaatttgcctgccgttcttcgtagtattaattttatcttttggttattcagccgcatgccgaaattattaaattagagacaaaacgccacaattggcgcgcaacagttttagacaaaatctctttttttgggttacatctttttcttgcagagaattttaaattactttttttaaatgcttaaatttcagctaaaaaattaactgatgaagaaaagaaaagaattgcgattaaatttattaaattaaaagatcattttgagaataaaaaaatgccaacaaaaatgttagagaaagaaattgccaaaactttaggcgtacatgaacgaacaatttatgattggaagaaaaagtttggagtaaacggaagtaaattttaataacataaattaaataaataaaaatttatgctttattaatcattgaattaagaaagcaaaattaaaagatattccaaagaacaaaaattcaaaattgtacaacaatttgacgaaatcaaaagtcgaaagaaaggtaaatcaatcgcaaaatcggcaaatgaaatggaccatcaaatttctaaggaattgggagttagccgttcaatgatttgccaatggaaaaaggatttttgcatgacaagtacttttgtgaacaaatacgttttctcttcttggaataaaatatttttaaattttagagtataaaattttaaactttttttatttgtaatttattgactatatttttttcaataaatattaatacttttacagttttttataattatacattattattttgtgtttactttcaaaattcaatgtcagtgagtaaatgcaaataaaaa

SEQ ID NO: 3077 - DNA, 5130 bp, Heterodera glycines
  unsure (1)..(5130): unsure at all n locations
tatacaaaaagcaaataaaaattccaacttttggatgcaaaagatgagtttttttcctactatttagagcatatattttagaaattataatccaataaaaaatacgggattccgggggaagcccgtttggttaaagtcgcacaaaatttataaaacctacagattctaattgggatcgaaccagtaaattattcaaaattcgaaaggataatattttgtacttaaaaacattttgcaatgaatctcattgagaacggataaacttggctttttacaaaatcattaatattaaataataaaaattaaataaaaaaattggaatatatgaaatattatctcttctcactttttaggcataatttatatctcaataataattttagaaacaatttatttaaagagaattttgttattcaaatcaaaagttgccaattgaatctgcaccaaaaaggaatttcctctgcgcaaaattttttttttaataattttagacaaaatctctgtaaatgtaaattggttaatttatacacaaaattttgtgaatttgctgccatcttttgacttttaaatgtgtgcccatttcggcaatgttttcttttttgcctccgttttgtccctttcacttccgccgtcgctctttgttcagatcagtgacacgtgctcatcgccgatcgaaaaaatgcgattgccgggaaaaggcagcgaataacgcgagaattgcgggtagaaaagccgacgttcgaccggcccattttggacgagttggcggaagagacggatggactccgtgttggtggacggagttttgtagatgaacgagtcgaacttggcggagggatcggggcccgcaaattggagcagaacggcacggagaagagccgaggcgatggactgaagcaaaacggaggagcgtaaagcgggggcaaagaccgactgacctcactgttggcatagaacagactgatgccgagccgatcgccgagtaaatgccgcacttgacataagccgaccacgtcgcccgtctccctgcacacggctaccttaagtcattaaaatagcagcgaatgccaaaaactagtcgctgctgacctttgcggcactttggggaaggcgaagtgcctcccgcaaatacgccgatctgtcaatgcccaccgtctgctgacggtcaaaaagcaacagtttgtcgaacgaagcttcacgccagtccttcagctccacgctcgagtcgtgatccaaccgttcgggtcgcacgtcagcacatttcgcaccgaatgaccacagtcgccagtccaaatagtgatggaatgcgtactcttcctcgtatttgtgccacatttcaggaacttgaaaagaacagggatactgacaaaatcaatcgattggccatcaatcaatttatcagtcggcaaagcgatcgatgggccatcaatcgattaatcattctacggagcaatcaatcggcaaaaaagcatttgcaaaactgccgtatgttttctgacctgcataaccaaatacgggtctgtcccctgcaaattccagcgctctgcgagcgagcgcacggccaagttggtggccatgataagggtccttcacgtagaacatgctccaatgtgccacctgcgggtacaatgccatgctaatgcaacccatcggcactctgttttggtcgaggacgaagaacatgctgaagttgggcccaaatgccttcttccacatgtcatagtcgtgggcggaattgtcccagccaaatttgtcgacaatctgtcaattttagggacaatttgtcaccgacacggacaattaataattcattaatgtctgagaaatacctcttggacaatgctcagaaaaatttggttttcggcacagttacgctcaattcgaagtccggcctttttccatttgggcatcggtcgctgtgccatcgccgcgtcctcgtcgaattcgtccatcgttttcagcgaaaagggcagcggagaatgcgccgctttttgcgttgttgcagcgaagttggcacagttgcggagaggcgaagacactgcacggaaagtaaaggaaaaagtgaaaggagagataaaatggaaaaaaagattaattaatttattaattaattggctatttgagcgttcatttgtgaataatgaatagggatggtgatattttttaggctctaaaaaccgccaaaataggtaggactttaggctctaaaaaaacctaaaaacaggcaataaaaatggaaaataagctctaaaaagcctaaaattagggggggggggagagntgtaaaaaaaaaaatttcaaaaagttaatcctaatttgtaaggggaaatttttcgtttttgttacattttgttaataaatttaggcaaaaacactttttcaaaattttttagacttttaggctctaaaaataaaaaacatagaaaataggctctaaaaactcgaaaaattggcttaacaaccaccaataaaacttgttttatatgtatttcaggacactgggagctcaggaaaaaattgtaaaaacctaaaaatatcattgctaaactctaataatgaataatgaccggaaatcagaagtggagagaatttgttgaccaaatgttgttgaaaggccattgataaaggcgaaaatgcaaatacaacaaaaatattgtccgatttgatcagaatttattgggaaagaaaatgatggattttattggcttttcccatttaaatagccaattaattgagtggggtgagcaaaaaagggcaaatgaactttcgataagtgagaagcaaaggaaggaaaatggagggtaaaagttgcactttcgtacacaaaaaataaaacaaaaaacgaataaattaatggccaatggaacgaacgaaacatttaattggcagaaagagaattatcataaaatatttttatctttttcttttaattcttttggaaattaatgaaagggcaacgaagcgaaaatgaaagtgtaaaggagaagaaaaagtgaaatgtgaaaatggaaaacgcaattttgagagggaaagttggacaccgaactcccgggcattttcaagaccgggatttgattttgaaaatccaactcgcataagccggtagatcaaaatacactgataagggggaaggtgacttggcgtaatgagctttctgacgaacgcctaaatttaacattttttgacccagaaccccattcttaccagtgtacttttggacccggtcgggtacccggaccccggccaaccctaattttgctaacaatggagcacaatcatttataaatttattccacaacattatgacaaaattaaatattaatcaaaattattaaaccatttattcgaaaaaacttttaatgtttttcacaatgtctattgcattttcctaatacataacaaaactgtgacttccttccgtttttcagtccaaattaactgcatagacataaacaaacgccaactcggcaaaattacgtgtcaaaaattgattgcataacaaaattattttttataatagctgatttttcaatcatcaaattaattatcatttttaaaatgcatcatactttgaccattttattgtgctcattagtctcgacggttgcttcgattgaagaagcgaaaattaaaattgagccgaaagaagaacaatttacagcagaaattaagaaagaatttgctccaattacaacagtaaaagttgaactcgaattagagcaaagaaaagcggtgaaaaaagagccaaaagaagaagccaattattacggtttaatggaaagcaaaagcaaccgatttagggaaattgaagagggaaaaaacgattcgtcttgtgttgatcactctgacgaagattcagccaaatctgatcagtccgaaggaggtttaaccctatctgatcggcatacagaccaaaatgggcaaagcagaaagcgaatgaaggaaaatgatcgaaaaagatggaaatttacaaggaatatcggaaaatgaaagaaacaacggcaaaatctgaccctgaaatagcgaaaataatgggtgtaaatattagcatgattcggaggttaaaagaaaagtttggacaaagtgaaaaaattaaatttaaaatgattataaaattaatttccaaatattttcagcaaatttaaaaaaagcaaaaaaactcgcttttttattttgttacaatatattacattataaataaaaattaattttaaagatttaaagtccgaaagaaaaaatgattgtcagcgacgtgaaattcttagcaaattttttaaaatgaaaaaggagcgttttttatgtgatggaaaaaataaaactgtccataaaattgaagaagaaatatcggaggaattgcaagtcacacgaaagtcaatttacaattggataaaaaaattcggaatgaaaaacggtatgatttagtcaaataaaattagtaggatgattctgcatttgaaaatcactatgggatttaaaaacaaatttttgtgggttatttgttttacagaatttctcagaaatacctgagaatctaagagaaatcaaatgcttctaagttgagcttaggtgatttttttactgaatattgtatacaaaacatttatttaatttcggggattaatttttagatttcagactaaaaagataatttcttaaatttaagcctctaaaatatattccgacgaagacaaaagaagcattgtgaaacagtttaagaagctcagaaatgaaaagcaaaaagttaaagaaataccaaaaatgttgggaattggcgttgggaccttttataaatggaaggatgaattttccggtaaatttacaaaaatgtcatatttattttcttanaaagagtaaaaatttcataattttcattagtaaaagcttcttttaagttaattntgttttagatgaagaagacagtgaaaaatcagtgcaaaatgactctaatgaatctgatcgatcgatactacccgaaactgatcagtncgaggaagaanaattnncagaactcccnaaagatgatatgattctgctgatgatggaccaccacccgttgatagcaangcgtgggcatggaaatttagcgtgncaaaaaggaaaaatcatttaaaaaacgnataaaaattaaaa

SEQ ID NO: 3078 - DNA, 1833 bp, Heterodera glycines
ggaaaaaacgattcgtcttgtgttgatcactctgacgaagattcagtcgaatctgatcagtcgaaaggaggtttaaccctatctgatcggcatacagaccaaaatgggcaaagcagaaagcgattgaaggaaaatgatcgaaaaaagatcgaaatttacaaggaatatcggaaaatgaaagaaacaacggcaaaatctgaccctgaaatagcgaaaataatgggtgtaaatattagcatgattcggaggttaaaagaaaagtttggacaaagtgaataaaactaaattaaaatgattataaaattaatttccaaatattttcagcaaatttaaaaaaagcaaaaaaactcgcttttttattttgttacaatatattacattataaataaaaattaattttaaagatttaaagtccgaaagaaaaaatgattgtcagcgacgtgaaattcttagcaaattttttaaaatgaaaaaggagcgttttttatgtgatggaaaaaataaaactgtccaaaaaattgaagaagaaatatcggaggaattgcaagtcacacgaaagtcaatttacaattggataaaaaaattcggaatgaaaaacggtatgatttagtcaaataaaattagtaggatgattctgcatcactatgggatttaaaaacaaatttttgtgggttctttgttttacagaatttctcagaaatacctgagaatctaagagaaatcaaatgcttctatgttgagcttaggtgatttttttactgaatattgtatacaaaacatttatttaatttcggggattaatttttagatttcagactaaaaagataatttcttaaatttcagcctctaaaatatattccgacgaagacaaaagaagcattgtgaaacagtttaagaagctcagaaatgaaaagcaaaaagttaaagaaataccaaaaatgttgggaattggcgttgggaccttttataaatggaaggatgaattttccggtaaatttacaaaaatgtcatatttattttcttaaaaagagtaaaaatttcataattttcattagtaaaagcttcttttaagttaattttgttttagatgaagaagacagtgaaaaatcagtgcaaaatgactctaatgaatctgatcgatcgatactaccgaaaactgatcagtcggaggaagaaaaattcaagaaactcccaaggattgattatgattctgctgatgatggaccaccaccgtttgatagcaaagcgtgggcatggaattttagcgtggcaaaaaggaaaaatcatttaaaaaacggaataaaaattaaaatttagaaactgggaaaatgaggcccaaaggcaaaaacatacaaaagtttagtttttcgaggttgtggaaacgataaaaaaatcaaaaaaaaaatgcagcaaatgtttaacagatttttgaacaaaattatatatcagtggatagaataagagtgatttgtattgtgaaattttttccttttataaatttttttttaatatatggaaacaaaattaagttaataaaaagattcaaatataagaattattttgtcagaaatgacattcttttgatcggagttttgttaagagctcaaaaatgccgggggagtgtgataatcgcggatcaattaatattgtatatgtgtgatgccagaaggaacggagtgtgggagaaagtgggataaaggacctgagagaacctctaaaagaggcgcccgtagctcagttggttagagcacggcacggattgctggggtcgtgggttcgagtcctaccgggcgagttaccttttatgttctacatatgactgtaccgaataaa

SEQ ID NO: 3079 - DNA, 1639 bp, Heterodera glycines
ttggcacattcaactcacaaaaagataataaaatgatacgaaatgtttaaagattaaagaataaactggaatacaatcagtaaataacattcaaaattataagtttgttgacaaaataaatgcgatttgctttaaataatttatttttattttcgttttttaatcagtatattaaattctatttgattatctttgaactgaactacgaattaattgataaataagagcgatactttttaaagatggtgataatattaaggacaattatttaatgctggaaatgaattagtgtatcacgacgaacaaatggaattggaaccatcatccgataagctaaaatttgaattaccaataggcaagaaataaaaaatattaatttttgttaaatattttttcttatggaaatgaaaaaataaaattatttttttgtttaaaatttagttaaaagtatttgcagaaattttaataattaattgtaaagacttgctaattagtcaaatttttataaatcaaaaaactagctttgcaaaaatttgtcaaggcttcatttaactgtacggaggcatttaatctaaaacttaatggttgaaagagggaataatattttttttttcaatatttttttaaatttgaagtacttcttattaagagattaacaacaatgttgacctccctttttcatatcataatgttgaagtcgagcgaatgttagattttgggaatgttaatgggatgccttctgcatctgttcagcacttaactgatcaaccaggtaatagtaagaaaacggtttcttttattttatctttaaatttaaaatgggtttaagtaaaataaatttaaaaaaactaatacaaaattcggatgtcacgcaagctaattatttaaatttagttaacaaacaaaagtatgggccaatttagacccaaacttttgtgcaaatttcaacattgcatctatgcagaatactcaaaaaatgcgaaattaagaaaataaaaaaatgaaacatcattagacacatgctaaaaatcctaatgggtccctaatttttactggcatagatttaacaagacgagatcgattatttataatgatccattttaaaccagaatttgagggctccgatttgtgaaggcacaaaccatattagggataacatagtaattagtttcattgagtccatagtaaatttaaaaatattttcgcttattgattgctcttttgttgtattttcttttatttttgaatcgttataatcctcaagggcctttccttaaattttaaatgaaaaattatggggggggttctaatgtcggatgaaatatgtacagaaactttagtttataaagcgaaatacggaccaaaaactggcaaggaatcattgcaattaaattaacaataaaataaaattaaaaatggaatgtgaaaatttaatatgaatttaaatttagacccaacaaacttttgtgaaaattttaaaagggcgtatgcagaatattcaaaaacaatgaaagataaccaaattgcggcacaaatttacaaagtctgccagtctaaaattagttattggaaaaagatatgcggaattgagtttaaataaagaaaaagatgacgaagaattaaaaaagcattgactttc

SEQ ID NO: 3080 - DNA, 2656 bp, Heterodera glycines
  unsure (1)..(2656): unsure at all n locations
ttcattttaattatgtaaaaaacaacattcacttcgtgatgtttaactttttttctgcatgttaaatccacaccaaattttgcatatcgatagagaaaagaattctgcataatgtaatacagccattttatgttttatacactttttcaaaagatatatataaaacatgaaaatgcattactttttctctctttttggcgtactattttcacatctctaacacacaaaaaacatcaaattcgtaaatgctaacaattttggttatatggataaaaaatcactttggacatttagaatcaatagagaaattaatagttttagcatttttggtgaaaacagcagtttaggacttgagttataacataataaaagtttgaaattcccacaacttttttctgagatgacaaattacttaacattagcttagaaaaagattccccttttcaaaaacttttttagataccaaatttgttcagtttagttgggaatgaagcgagttatggcagatcaaaataaaaaatacaaaaaaggcattttccagtgtaaattttgaaatagcgcgcaaaaatttacgccaaatgcgctatttggcgttatgagtaattttgtctaacactgggcttgacccatagtgccatagtgctcttttttactcaaattttttttttttgttttttattatcagaattgctttaaataatttttagcagacaacgaattctgctcataagacgagatttggcacacacagatcacttttttccacatacatttctgattttttgtggcgtaagcaatttggaggactcaatttgaattatcattgaaattcaaaggttcctcttccttgtgtgtaaagtattattttgttccctaaaaacttttttgtttgtttatgccaacttttcttcaacttcggcgtcgctcttttcccacaccaaattctgcatctttctcctcaactgttgagcaccatttaccaagcccaaattccgctcgaggaatctacggatttgcgctttatttgggcgtttggattctgtttgtcctttacctgatttgggcgttggttcgtttttatttaatttttagccggactttcttttttcaaacatatttcattttttacgcttcatccttttatgtccccgattatctgctgaaatctcttcacttaacctatcttccagcaaagtattgggcgttagctgtgccttcgtttttagtcttttccatttgtaaggatttttttctttactttttttaaaggtttcctcttttttagttgcatacattttggtgaatttctttttcaatttggtcaactttcactcactttatgaccaagaaacaacaaaatttcaattggtgaatgatttcctcgattggttcgttttcacatctttttaattttcgttattttttaattttgtcggtgttttctcttcccatttttccaaattctctttaattcatttgaaacagaaatgttttcttctttgtgcccttccgttgtccgtcacaaatgccttcgctgttctactcgcactttggcattttctggccataatttgtccgattatttgcccgctgctcagccgtcttctcgctctcaaaaagcacgcgaaattttgaaacgccatcagtacgcgttgaagcgaaggcccaaaaagtggaagggagcggagtttggcacatttgttgaacaaatggactcaatcgcagcaaaatgctatttggggtgagcacaatttgcattcgaggcaatcatcaagaattggtgtcccgacgaaaaaaatgttaaaattttggcaggtattttttctaggcttaaaaaatgcgacgatcacgaatctgagctcagattttgaaaatcattgatttttatctaagatttttcgtcaactacttgatttttttcgatttttaaagttattttttaaaaaaagtttagcaatgaatttgggttaaaaaaatattctgatcacgaatctgagctctgattatgcatgaaccttcattttgtctatgatttttcatcaagtgtcataaaaaaataaaccgcagccaaacggactcgaaccccaggtctccgtctcatctgacccctagggattaataattgaatttgaaaaaatcgtaaaaaatttaaaactacttctttatacattcaatagctcattcgaaagctctttttagtcactacaacatctgtgcatggttttttacgcccgactaaattccttaaacttttgaaaaaaaatcaagtagttgacgaaaaatcttagataaaaatcaatgattttcaagatctgagctcagattcgtgatcagcgcattttttaagcctagaaaaaatacctgccaaaattttaacattttttttcgtcgggacaccaattcttgatgattgccgactttttcgtgcatagctcgtcgagacgaattcgaatttngttataatttatgtcatttttttccggggggttgactatagtatatccgtcttcttttgtttttcttttttaatgacaaaatagattttttgtattgaaaaagttttggttcgagaaattgttttgactttgaaatggagttttttttgtttttgtaattaaagcggatatcaattatgcctcttttaaaaggattttct

SEQ ID NO: 3081 - DNA, 5830 bp, Heterodera glycines
agaatgaagagaatgctccgacttttgcgtcaggtactgccctttgatttgttggggcattttattgttgccaatttccttgggtattattcttgaccaatggcaccctttcagacgaagagaagggatttttcatctgcgaggaccctttccaggacgaatacgcggcgggttcaaccgcggaacttccggaggaggaaatgacagagtgccctttctgtcgaattaattcattgccttatttattcattcccttcaaagagttccctttgcatattttggaaatgtaaacgaagcggtggaaaacattgaatttcaactccccggccaatcgcccgagaacaaagtcgtttaaccccaaaatgtcctccttaagcactcacttttagaaggcattatccattaaagagcagaatgaagtgttagaaaatgaagaagttggggattggctgagtaattacggggaaacggtgccaacggagggcgaagcgaacattaggaggacaacgtcggaaaatgcaaagtgtgccggatgcggagcaaatttccactgccacaatccgtctctcccggggtaatttttgcgaaaataatacgtgttcacggggttgaccagccgaccttcgggtgcactacgttttgtgtttcacttcccatcatttacccccgtatcgtccccccttcccaaaatttttatgtttgaattttttttaatttggctggtgggtgagctactcctttctctacctttccccgggattcgttataaaggggcgtggagatggcgcaaagggtagaaaagtgtctatttttgaaatttgaaaattgctttcagatttatgccgttggaactttatcaagaagttgagaagaatgccaaccaattgcccaaataccaaaggacggattacctgtgcagacgttgctatttgctgaaggagcacaatttcttggtatgctcaactttacatgacaagctgttattgttgtttatcggtgatgatatttcagttgaatcttaatgtgtctccggtggattacgagtcaatgatgggacatctcaaaatggtccacgaggctctgattttgttgattgttgacatgaccgacatggaggcgtcaatcaaccggcagttgccctcaatcattgggaccaaaaaaccgatgattgtggttggtgagtttgtccttcgtaaaaaaattccaaattataacacttttttcattttaggcaataaaattgaccttttgccccccgacttccacaagggttatttgcgccattttctcgcctctctcaaggcggccatgcacaaagccggagtcgcacagcaattcaacattctcaaatacttgctgttgagtgctaaaacgggatttggcgttgaggatctgatcacggcataaatcttttttatacgcccaaaataaatgcctattttcagaatatttatcaaaaatgggtcagtccgcggggctcaattcgaagtgacatttacgtggtcgggtcgacaaatgcgggaaaatcgtaagcaaaggaaaacacatgcaattaaacagattgtaatcgaataattttagtacacttttcaacgccttccttcagtccgatttgtgcaaagtgagggccatggatttggtggagagagtgtcggtttctttgttttcatttgtcgtcacctttaccttcccctctttaggaccacttcaatttggcccggcacgactctttcgctgctcaaatttccgataatgaatccgtccacgcaacagctggaagtgcgaagaagaaggcttttggcgatgcaagcgtggaagaagaaggtccagctattggggggggggagttgcaatgggaacacccaaaaacgggagacagtccatcaaacatttagagaccgtgataaatgccaagaggaaaagtccgccttggacctgacagttacaaccgaccaagagggcaattactacatcttatttttgtatttaggagtccctaatgctgaggtcggccttcagtaccaccaaacatccgaaatacgttgtgctccaagggatcatcggcagctcttttcgggttcgcctaacatcacttgcctacaattttgctttcattttccaaggaatgggaagagaataaacagcccgtgtccgtggacaaaaccatcaaatacttcgatgggcaattggaaaatgccgacgaaattgcccaaattgagggcaatggaccgaaaaagcggcccaacatgaacctcaacgacttcaccttcaaactgggcaattggtgcttcgacaccccgggcactgttaacagcgaacaggtcgacaaccataatttgttgtgagggcggtaattattgttgaggcatttttcaattccaatcgccgaaggcccattttacaatatttatgggatcaataaaccgattctcccccgcagttttcatttgttttaaacttctaggattttcaaaaaaaaaattaattagtttttattacgactatttccgcgcctttcatttgcccatctttcttttgcagttgttagatttgttcaccttagacgaactgatcaacgtcgtcccccgttccatcataacccctcgcattttttccctgaaaatgtgccattctttgctgatcggcggcttagtgcgaattgatctgctcgaaattgacacacaatcaattacacatcagccgacagtttttgtgagttcactcgcataatttaaccccctttttttgcaaaatatgtaattaatttattgaaattcacttttcagcttacagtgttcgccagtaaccgtctcagaattgagctgatggacacggcccgtgtggatggctttttgcgccgtttcaatggccatccttcgcttggcgcgcccattggtgggccgaaacgaatggacaaattcccaaaggtttttcccattcatttgtcttttacgatttgttgtatttgcctatttcagttggaaccttgcgactttgtcgtccaaaatgagggggcgttcaacgaagaagagtcgggttttgcggacgttgttttctcctcagtcggctgggcgttgctcacttcttcggcggattcggtgaaggtaagcggactgacaatgaggaaaggcatttgacacattgtaacagttaacgcaacgaagtatggcatggcatttccatggctcttttcagatccgtgcctggacacccgccggcaaaggtttgctgctccgacaaccgccgctgctgccctacgcggcgaagtatcgcggacagcgacagccaggcacggacatttaccggatgcgaccgttacagcactgcgagacgttcagcgacacgcaacggagcgagcgaccgaaacgaattgtcggagaaaattacaaagcaccgccaaccgctggccaaattatggaatatgtgaacttcgattttgattaacaattgcacgtggatcactggtcactttctgcttccatcgtccaaattgtcgttttcgaatgtttacaatgagtaaaaatatatgaatatatgtaattaattattccgttgctttatttaatccaattatttaatacttttgtccgtatttttcttacaaagacaatttgtcctttttttcttctcttttcgttccctttggtgtgatgagtaatcatccccattctttgtcaattggccaaccacaacaaaaaagtcgtcgacagcgatggtgcggcgacggtccttttctgctgcttacactgacaatgagcatcggaggggccctcttctgtttgttcgtcgctttatgggcggttggcattgagtgagtggggaaatttgaaattgaagcagggccatgacggaattgcaaatgattttggaattcaaatctttcccaattttctctgttgtctgaccaatgatcactctcgttgtctctttgtcgtgtcgttcgttgcccactctcccccttttagcgtcgtttttcccctttctctgcttctgtccgcttctctcggctttctgtccgcttcttcgctcgtccacaatgcccacctgtgcttcggtgctcaaattgtactcgcccaacttctcaatttgttgccctccgccgatgactccgtctcaaaagggcaaacggcggacgaacagcagaaaaatggtggagacgaagagaacaaagggcaacggcacttcgccactttcaaggggagtggccatgccaatagaaattacattgtaccaccgtgggaacgcgttgaactcgacgcacggctaaaccacgagttggaggagctgtttgagacacttttggagagctatgtgagcagttggtcagttcttttctgacaatttgaccaaatccgacccaaaaaacaaacgacaaaggtacaacgggctgatcagcacggacaccgcctttctgctggaagtgcgtcatctgatccgccattcctccgccaaactgatcaatcgtttaagcagtgtcgacctgcgctcgcttctcatcaacgaactgttcccactggtgttggctcatgttgaacgcatttgtcgtcttacaaatgcaatttttgggcatgaaaatcatcaagaaattgcacaattggtcatctcacatacgcaatgattcagcaatcacactttttgctttggttttagcccgtctctctcatcgaattcaaagtgttcgaccaatgggccgacgacgtgcactgggcgatgcggtcggaggccaaccgcgacgcgtacttgcgaatggtggccgatctgttgatccgacagtttgtggacgacattcgaatcggcggatgctttgtggacgaagagcacgcgaaaattgtcaaccgaaacggggagggcaccgacaattatgccggtgccggcggcggtgctgcagcaatgcccccggcgacgtcgaaagtgttttgccattatttgcgcattttgccactccctcccatgtcagtggtcctgccacagttcgcggcactttctgcgcgagttgctcttttcctctgcgcttctccccactcttgacgccctttccgatcccgactcgctgaaccgactgatgctaaacgcactcacaattagcagcagcaacagtggcgactgcaacgaatatttgacgacaatcgccgacggagtgtcggacggagaaggaacgcaccgagaaacaacgccacgaaatcagcaggtaaatgccgtaaggagaggtggcacggcatttgtggcaatttaattttaacccatttgctgaaattgaggtgcagccctcgtttttgagccgatttgtggaaccctactacaccaacacgcccgactcgttgctgggcctgaagcttaacgatttggtggagaacccgtacctgaccaagctgttcgagttgtatttgcgcgatttgagcggaccgactcatcttttggactgttttatgcaggcacgcgacattcacatgcgcattcaaatggtaatttacaaagggaaatgatggcattttaaattctgaatttgcattttcagttaaattccgccaaatttggtgaaaattgtgaaaatgacaaacgacttgaacaggaagtgggcgaagtttgcttggattcttggcaactcttctcaacttttgtccattcaaatggaccaaatcgaattgcattcaatgaacaaattgagaaggaatttttgaccgtttttgagtcgttcaaaagcaaaaattacacgggaaaaaataatttaaatgcaaatgatgaacgaattgtggaccaacaacaacatcaacaacaacaaagaaatgccaaagggttgaagccactcgaaaaagtgatcgaagccatttac

SEQ ID NO: 3082 - DNA, 1489 bp, Heterodera glycines
attgaaaatggaaaacaaatgtttatttagatttttcacatgttttttggcggtcgctacgtcatctttcttatgggattgttctccatttacaccggtctcatctacaatgacgcgttcagcaagtcgttcaatctgttcggcagttcctggctcaatccgtaccccgtcgacatacttgagaaggcggacccggagcaaattcttacattggacccatgggaaagttatgtaagtgtgtggcatttaattttttgagaagttttaaaacaattttgcaatttgttctcaaggcttcgtcaccctacccagtcggtgttgacccggtgtggaatttggccgagacgaacaagctgaacttcttgaactccatgaaaatgaaggcatcagtgatcatcggcatctctcaaatgacttttggtgttgcgctcagttactacaatcataagtcggtgcttctttttgtttatttgttcctttctatcttcaaatttgatttggttttcaaggtattttggctcggatttggacatcaaatttacgttcatccctcaaatggtcttcctttcctgcatctttatctatttgtgcttgcaaatcattgccaaatggattttctacgatgcattggtcttttttttttgaataattttccctcaaatttccctgttataataattagaaattccctctcattattgtcagggcggtcatccggtgttcacctacgaataccccggcgccggctgtgccccctctctgctgatcggtctgatcaacatgttcatgatgaagtcgcggaacaaaggcttcattccgccgggtggcaaggaaccctacccaaattgtcatctcaactattggtaccctggtcaggtgtggttggtttgatggtcattcataaattgggaggggccgcggttggagccgccgcggacaatagtgagccgaacatacaattcttgtttagatttctgttatggagtttggaactttgacaagaagttaaaactcggttctcatccttttatgaatctgaaattaattattaacgggggcggcgagctgctcctgtttttgaaccatattttttgatagatcaaggcccatattcttggtaacaattgaaagagtagtcggaaaatcgttaattttttagccgtttaaacacttacaaaaaaagcagtcttgatcgacataaaaatggggtggttaaggtctcaaaatggaaattaagcctcttaaaaagttttatacagacatttacaaacagacaatggcttaatcaatcggaatttagtcattttttgaatcgcttttcatcccaaccgctgtcggctgcatttttgtgatgctgtttgccaaaccgtatgtgctttggcaacagcgtcagcagcacagccgttcgttgtccggcgggggtggcggcgtccacacccaattggtatttgttggcaccgcatttacccacatttatagggcgtagcgg

SEQ ID NO: 3083 - DNA, 2709 bp, Heterodera glycines
gttgttgggggtggccttcccggccattccgggtgctgtttttcgtgaaaccgttgttgttgtggcgtcggttggagcgtcgtcgccaggccgtcgaagcgacgcttcgacgtcggcaaagctccgccgcgcacagaggtggcggcacggacaatgccattgttggcggcttggccgatacatttgccattccgcaggacgaaggctttgttgatgaacatcatcagcagcagcacattagcactgtccgtttttgtggtggttacggtgcctttggacatgtaactattggggattgctgtcatttatttttttttgcttttccgactttttgtttgcttgctgttgcttatttttgtgcgctgtttatgttttaagatgcttttcagttttcgttcttttcttcactttgtttgtgtgcatgcttacaattagcttgtttgcctgagttttacggcatttttgcagtttttttttggttttttgcattttgatggatttgcatcactaattgcatgaatgctgttgctttttccgctattcccttcgtttataagtcccccattttttgatagtttatgtatcaaaatacagtcttttcattttcagagtgttcatgccaatatgcaggaagacggagctgaagttttgcaccacgaggacacttcgacaacccacaaaaaccacgagacagcgacgggcggagagaagggcggaggtcaaggccaacaacacggggacggctcttttggggacataatggtctaccaggcgattcacaccattgaatttgcgctcggctgcatctcgcacacggcttcctatctccgtctttgggccctgtccttggcacatgcgcgtaaggaggccaattggatgggggaagaaagcgcattttgaatttgaacagtgtatttttgcgttttttagctgaatttctcatttatgtctattttctaaagcccggaacgaaccctggaacctttaggggtttccgatgacttatccgaaaaagtttttgaaaacataatccttgatatggatcgggaaattttaaacgggtttgtgttctttttccattattgcttcgtatggttgtactctgaccacctttaagaattgtccgacgtcctttggtcaatggtgctccgcaatggattcgtccaaagcggttacctcggcgccgtcatcacttatctgatcttcattgtgttcggcacactcactctgtccatcctcgtgcttatggaaggactgtccgcctttttgcacgcgcttcgtctccattggtcatttcttcattttagatgttttgtttactttttatgcatttgtttagggtcgagttccaaagcaaattctacggtggaatgggccaccctttcgtgccgttttcgttcgagaaaattcttgaggagtcccgtcaaagtgaagacagttgattgatgctctgacttatcaccgctttaccagtggcaatttgcttccattcccttccccctccctcctaaaattcagtcaaatttcgttagaaccaaaggtgttactataaaatgtacacatttgtcaaatttcacccatttcttcccaatcccttccgctttttgctaagtcgatcaccaaccaatccgaatgtctccctttcctgtcaaactgttatttaacatgtgtcaaatccgtcatatttagttcactgtattttactgtcactgtccccaccccgccaaataattgtgcacgcacgatacatccgcgttaagtttctgttttcttctgatgtccaaatggctgatcacaccaaaatgtattggctctttcgttgtgagcttatttgccatgattttaattttataatgcatttccaaccttttcactaagcattattacttgtcgcttcatttaaaaagaatttcatagtgctaattccctttcttctgaattaaatataaatggtgggcgaatttaaattgaaattagctcggttttggttagtcttaatttaaaaaatttatgcactgactacaaaataaaatttccaaaaggaaatgattggctggtcttcgtgatttgtcatgttcatcgtgtgacacgtttcgtgttctggcccgacgaaatctgtttacggctgcctttcttgttgctaccagatgaccaaatgttagccagcatgtcggccatgtctgaaatttggcaataaaatagcttaacatttgctggaaattcgtttttattttacgtccagtgagtgttttacctggcatgtcaacctttggcagctgcatattttgcatttcctgaaatacaaagaaagggaaaagtcataaggttattgaagaggaagcccaaagaaaattcgacaaaaaatggaatcaaggaagaaagtaaaaccgaccttttgcacgttcgggtcttgagcggctaatttgggctgaattgttaaaaaaacaattttgtgattaattggatttaaatctgaccatcaacacaacgaggataaatgcggcgcccatcatcagcatcatcgggttcatcaacacgtcagtgacacgccattcttcgcgcactcggaaatatctcatcggatgccgtgcggttaatttgacagggtaaggcaatgtggagacgacattcggcttaaaattggaaaatgcatggctctgattgtccatgattttcataaaaagctgtattttaagtatgatgagctat

SEQ ID NO: 3084 - DNA, 4110 bp, Heterodera glycines
  unsure (1)..(4110): unsure at all n locations
tgtgatgtccacacggacggactcgaatgaaagtcgccactgcccacctcgagaatgtaggagccggaaggcacgtcgggaacaatgaaagagcggtcctgtctaaaaggaacggcaaagttatacaaacgacatatccttattgtaagccaattaaggtatgcagcaaaatctcaattaatctgatttaacgggtaattgaaaatttattgttttcataaccaaatgatatgagaatgatggttctcccgtatgacaatgtatagaattcacctgataaacccaacgaattttccgtagtccaaaaatatcctcgcccccgccttccaatttggctttatccgctgcaattcggcattgacaaccgttttgccctcaatggtgaacaattgttgttgcttttgaagattcgcattttgttccgctgctgatgaaacaaaaacggcgaaaaataagggaaaagagaaaaaagagaggacaaaaagcacagaaaattgatgcataatcgaaaacggagagtacaaattaggtattgtgggaaagtatgcaaaaagtaaaggaactggtcgacattaccaataaacaaataggcaaaacactattaattggaaaacatttatgccatattttatataaattaaatgtaaacattctgtgggtattgcatggacacagtcacagtaaaacaatttgtgggaagcaaaattaatcaaagggagcaaccaagggcatagccggcctcaagttgggggattataaccgaccaccaaaagatcccgcgaaacaaaaaacgaaggaactgtgcggttggtggaagcctaaccacttgaaaaacagagcccggctaccctcatactatcatgcatattatttcaagctgaataatttagttgaaccgcttcaggaactcctcagccgatgttcgcgccctggcgttcagtgccaatttcatttcgctaatttcctgaatttaaatgttggatcgatgagaacgtaaattttaattaatattcagctgtccatttcaattttgttgctttaaaaaactttaatactcaatttataccactgggacagaccttgtcaatctcttgcataaaatggatgagaaagtcgatcaacttgtgcttgtacatgacttgggtatgtgttgcggtgatcagaaaactgatgtcaaagccgggcattggtttgcgcctcaaaatgatgaaattgtcagcgcgttggcacataaactaaaaaaagcactgattggcgatggataacttcgatcaaaaactgttgattttaaatttttacctttacctagaaatagatttgcaatgggttttccctttttttgtctcaccctcgtgaatttgttgcacagaattttctcaatttcatccgcctgtttgactctgatgctcatccggaccgaatttatggacggctcaatcagaacggcttcctgtttattgcgacacaccatcaccggcgtcaacagcagctctttgctggtccgaacttcaacctaaaaaaatgattgaacaaaaccaaaagagcaaaacaatgaaattgactcaaaactaaatgaataattgtttggagaaatgtcagcggaaaacctttgcccatggctatataaacaaataaattgtaaattcacaacgacggtaaccactttcttgcctctggtttgttgtgccgttcaacaacttgtgaaccaaactgctgaagacagagtgccgcctccagggaccgacgaaccgcatcaaggtatggttgcaaagtggtgctctaaacagaaatgaatgggtaaaaacaattggacttaaaatgagtggcccttaccatatcagtttttgaaaatcagtaatttacaacaaattgactttaattaagttataataaatgggaatcagtcaagcggaaaagcaaaatagaaaggtaaaattcaagaatacttgtacctcaccaaatttcgccaactagtcataaacagggatgccaaaaatatggaaaatttagcctcattgacctatcaaaaaaccacaaaatgaggctaaagcctcagatctgggagccctgtgataaatcctcagatctgggaaccctgtatattagcaaagtgcatatggaaatgaatgctcttaatttttgtaaaaaataattgtttttgtatatgcaaagtcaatggaaatgatcttacaattagttttggtattgtattgaaaaagttttggttcgagaaattgttttgactttgaaatggagtttttttgtttttgtaattaaagcggatgtcaattatgcctcttttaatggatatggttttaattggatggatttatcgcacttattgtttgttttgacaaaaagaagttacttttaacgatataagatcagtttatttgttctttttttgtatgcagatgtttatgcaaaagaaattattaaaatgtaagagaacaagtatttataatgaaaaggattttctacgcaaattgtatttgataattgaaatacatttttaaaattccaaaattatgccgaacaggtctgaattaagtcccggtgattgacatgtggatgaatccataaaattgagttcattgtttggaatagtgaaggattgagtcccggtgattggaatgccggataattgagtcccgttgattggaatgccggataattgagtcccgttgattggaatgccggagaattgagttccggtgattggaatgccggagaattgagtcccggcgattggaatgctggtaagttgagtcccggcgattggaatgcaggtgagttgagtcccggtaattggaatgatggagaattgagtagaattgagtcccggtgattggaatgtcgcagaattgagtcccgatgattgcgatgccgaaggaccaggtgaggttaggtcccagtgattggaatgccgaagatttgagtcccagtgattggaatgcaggagaattgagtctcggtggttgcgatgccgaagaatccgtgaaattgagttccagttttttgaatagtgaagaattggtcccagtgattggaatgctggtgaaattgagtcccgggaatgggaatgatggagaattgaatagaattgagtcccagtgattggaatgctgctgagattgagtcccattgattggaatgtcggagaattgagtcccgatgattgcgataccgaagttggggggtcacaggttcgaatccagtgaaagcttcgaagcatgtgtgagcccacaacatgtgtcgtttctttgtcatgccataaaaattcggttgaattcatatcataattgcttagaaagtccaaaaatattgagaaaaaaatgagccttttctgggccggtgagtgctcagttgagctccatctataaaagtggaaactttgaaatggctgagctcccttatttaaaaatccaaaaagtttaagaatatttgaatcatatgaaattcatcgactggattctctaaaatctatatgccatatttttacttgaaagcttcgaagcatgtgtgagcccacaacatgtgtcgtttctttgtcatgccataaaaattcggttgaattcatatcattattgcttagaaaagtccaaaaatattgagaaaaaaatgagccttttctgggccggtgagtgctcagttgagctccatctataaaagtggaaactttgaaatggctgagctcccttatttaaaaatccaaaaagtttaagaatatttgaatcatatgaaattcatcgactggattctctaaatcgggagatttacttgtgaataaaattcaattttctttctaatttttttttagatttttctaaaatcttttaaaaaaccaattttagaaaagttgaccgagaaattcaaattaatttttctgttgggcgtggagaaattctttttatgaaaataccaccaaaaatagatctatcaaatgcgatttttttttatccattcgtaaaatttcattttgcatcccttcgctataaatttttcttgtgaaaatttccaaaaaatggccaaaatatggactanaaacccaaaaatggcgaaatatggatttattcccgaanacccccaaaatatggatttatatggact

SEQ ID NO: 3085 - DNA, 562 bp, Heterodera glycines
attggcactttgtccccatggcattttgcttttgtttatacggaagaaaaggaaagagagaaaatagaaaagaaacatcgcagggaacagctgctgggggtgaaaatgaaagaatgaaatgaatggtcggagaagaaaaccggcaaaattggagaaaattgaaagaattaaagtaaaaagccaaaggaattggacaaattggaattccacttccaatgtactttcattgccttcagatttattatcggccgatgaatttcactgatcagtgccatgccattccgtccggtgctctgatcggacggactccgtgtgcccattcagtgtgtgtgacagtgatcgaaccgcgggtgttggctggtcggtgggaagggcgaaaaggggtgaaaagcaaaaatggcacctaatcaggccaatatctgggcaacaacgtcatccggggctgcttctcttccgtattcaaatatggcgatgcacccattgatcagctcgtcggtgagtggttccatcggcatccggtcaatgacattatggcattatgaggaccctcccccccccctac

SEQ ID NO: 3086 - DNA, 3710 bp, Heterodera glycines
  unsure (1)..(3710): unsure at all n locations
ttagaaagtgttgacagatgtgtccccgacattgtccgtaactattgaagcatgaaattgcgagaggggggggggggctttgtttgcctaattggctcggatgccctcgaggaatcgtgaaaagcgagtgaatgttgaaatccaagcccaaccaaatgcttgggtttgttttttacatttcgcatttaaataagttcttatataatttgactttttgaattacaatgttaatttgtataaattgtcgctttttcctgggaccgttaattgagctaatgacagtctcaaacatttttggcgccgattaggatttttgtgccgtcattgaaaaattaaaattccaagggctgatcactcactgaccaacatggctttattccaatagaataaattgccaatcgcttttccattgaattaccccacagatacgagctgttccaccttcccaatgcgcactttgctgccgcgtcatttggctgtgaagtcgtccaatcggacggtctgtccccctttccccctttgaactgctccgtctctctctctcttcagattgaattgtgtcgctgtctcggcaacctctgtaatgactatccctggtctcccccgttgctcagttcgtcgccccgtcgtttttttcctccgttttcctttttttcgctgctctttctcttccgctgttgtgcatttgtcctcgctttttcattacatttcactcattttcatcttttcactgctttcttttgacccgaaattccgacaaaaaaaataataaaataattttaatttataaataaattgaatttatttaaaacactaaaaatacaaataataaaacaaaaatgcataaattggggacacaattaaatggacggctttttaattttaaattaattttgcgttcattcccttgtgattaaaaaagcaaaaaagtggcgacaaaacaaatttaaatgtgctgtgcaaaacaaaagaaaataaaaatgccaaaatataaaataaataattgggacaaaaggggcggagatccaagggaaagtgaagaaaggggcaattaaagtgaagaaaggggacaatttgtgggtgcaaagtgcggatggaaagtgtgggacggaacgacaaaagcaatcgaaagggaacggtccaatggtgtcatgaaaattcgtacaaaggcaactcgtacaattgcttaggtttgtcctaggctttaggcttgggcttaggcctaagctttaggctgagtgtacgagttggcattgacccgggtccaatagggggggggggagtgacttgggggacaatcaaacggacaaaagaggaaaagcgggggaaaagggggggagggagggagggaagcgcaaaaaaacaaattgccgaaattgaactcgttcacgggggctttctctgatgctgctcaattcaacacttgcaatgggatggcatttcctccgtttatggcgcccgccagcgaaatgttagcctcggccatttcgcccttctgctgctcccgctgtgggtcgttgtctgtcgcctccgcgtttctcatttgcatattcctcgcttctgttgttttctccgcttccgcgtctttcttctccgcctccgcgtcctttttcttcgcttccgcgtcgttattttccgcttccgtgtttttcttttccgcttccgtgtttttgttttccgcttccgtgtttttcttctccgcctccgcgtcctcttgccccgctttgttcgcttccgtttgtgccgcgtgcgtttccgtctctgccccgcggcagtgtgcctctcctccgccctccgtctgttgttcctccgtttcctcttcgtatccttcatccaatcgctgactcctctttctgtactcgtccaattcgtacattagtgcacctgaaaaataaataaaaccaaaaagtggttaattagtgactaattaattgcccagtccattcgtacgctgctgattgatcgattggattgtccgttggtattccgtcagattttcctcgctgcgctccgttaggacggataatttgccactttgtgcgtcctgttgctgctcgacagtcgtggtgggcctcttcactttgtcctcataatcacctgacagaataaggattatcccggataaggtgaaatttgaattgccaatccgccgattttcccttttcgaaatgactgacaaatcgaccaaaatgatccccaatttgcgaaccttcgttcttcagctgacttcgttggtgtctgtgcaccatgggaattatacagctgaccaagccggacagaaaaatgagaaggcccgcgtaaatgaaggaagcgccgtacgaatcactcaagtcgtagacaatgccggcgatcggagtgccgagcaaagaggcgaaaccgcgcgaaacgaccacgaggccaaaagaatttgtaagacgttcgacacccaaaagatcagccaaaacgatggaagtaaggcaaacataagcagctaaaagtggcaaaatgagaggcaattggacaatagaaaaaagaatggcatcgaccgacgatgaaaccgaacagagaagcgtagagagacaaggacaaaaaggagggcagcaggggacaaagggcggtgagcaagccgcacagcaccaaagaacagttggtgatggacagggcactcacccagcgacggtcggccatccaaccgaagaaaacgcggcctaaagggggagggagggaccaatcagaaacggacgaaccgacggcgaatagcacggcattggcacaaagtaccaaaagtgttggcaattccgatgaacggcaaaaggaaagttgcctcggcgttggaaatgcctttggaagtggccaaatcggtgaggaaaacaaaaggcacgtaaaagccgagcatcgcgagaatgttggacacgcaaatgatgcacatgacaggctcaaacagaagcgaaaagtcgaccatttgggcgagggcgtggcgaattgggaagggaacgcagcgccaattgctgaaggacggcattccctctgagatggacgacggcccaattgcctgtcattggccgtgccaagttcgtcctcctcaacgccaaaggcaccgccagtcactcggctgtattggctgcccccgaagcggcaactgttcgactcggccatttctccggctcccacttgggacattgcgcacgacagattttgtgccgcgaccgtcaaagggatggaaatttgcgagccgcggtagcggtggtaattgcttccttggaaaagagggcgtcagatgagcgtgcctcaaaattggccaaggaaagagcagcacttcttaatgctaaccgggccgaaaccggacacccggctttttcaagagatggaactggctttctgaaaacccaaaacccagaatacgacgcggtaggtccgagtccaaaaattaatttgagcagtgaaaagcggtgccgaaattggagtgaaagagccacccaccttcgttctcaaactccttcaggtttctgatgctcccctgcaaaaagatgtcgtttctcgacaatggacgagcaaattccttcggttcggcgccgctcaaagcgattgaaaggacggaatcgcccgctttgatggactgagccggggcttggcttatccgactgagcgactgggcgtaggaccgtgccgagacgcgcgaaagttggctgcaaaggntgagccgactttggcgcaattgcgtgctgctgccc

SEQ ID NO: 3087 - DNA, 2104 bp, Heterodera glycines
gcccgtcggatgtcggcccaacgcggcccccgcttcggcaaccccggattgctgctgctgctgctgctgctgctggtggtgcgggttgtgatgctgggagccgcccctctttttgctcagtcggcgcaccactctttccaaaatgggcgacagcggagggcgattgtgtggagtaatgggcgaagagtccgcctcgttggcctcctccgcgtgctcccctacggcgccaagttccactccgttggccattagcaacggttgtccgtccgtacactccgaactcgtccgagtggcgcccgaccgacgcggtggcgaaatgcccccgttgttcgcttcctcctcctcttccgatacattcgactcggactaaaattggttttttatgtggatgatttgccctacaaaaagtctttcaatcggtcgtctcaaatcgtccgtcttttttctcatcacctcaacttgctgtaaagcagcgatcagtgcttgttgcttcagttcctcgttgagtttattctgtttctccaagtcaaacgtgggcattggcaacggacggaagagaatgccgcaaaaggcacaggaaagagtgagaagggcggtgacgtaaagggccatttgccagccgaatgcttcacaaattggcagtttatgtgaacagttcagctaaagcaaaggaaaagcaccttcgaggaaaaacttcaaaatgagcggaatcaaaaaagtgccgaatccgctgcccgccacggaaatgccagtggcaagtgcccgtttggactcgaagtattggctgacgatgacaattgctggcagatagatgaagctgaaaccaatgcctggagatggagaagagcaaattgttaccaaaacaaaaaaaatgaaaaggcgcccaccgccaaaaacgccgtaaagcaaataatggacgaaaatattcggtgaaaatgcggacaaagcgaatgccacggaggacagcacagtgcccgcgatgaccaccttgcgcgcctcgaaattgtttaaaagggcaccggagagtggaccttaaggcaaatagagaaagtgccaaagacaagtgaaagtgccaattttggcaagcgaagggaggaatcacccgcgagtaaataaactccaatgagcaaagaaccgatcaccgaagtggcagcctttgtggtatgaaatgccgcctgataggcactcataaaagagccgaacgaattggaaacgccgtccacaacaaagttacagacgaaagcagcagcaacaatgacccagccgaagccgcctgaagaaaaggcttaaagcggaaaaagaggcaaaaacaccgtcgggaggagttggcaattggttgatgatgaggtcgcccttcagaagatagccttaattagggaaatgaaaagcaaaagggaggggaggggcaccggcggggagctcattaatggagtaattgctttggaattcgctgttgttgtccggcaaaaggttgttctcttcaatgcaacactcagagcacgaatcctcgtggaatttgttgcacacgagcaaagatttcccttcaaggataagccaaatattctttttcagaacgattctttcttccattgtttgtttgtcatcctccccctccctttctatttcatttttgccatcatctgtccctctctctctcctctgtcgtccatttgtccgttaatcatcccctctatcccctctctgttttgtcatctatttatcattaatcaatcatcccctctctctctcccctctatcgtccatttgtccttgatcaatcatctcctctctctcctctgtcgtccatttgtccgttaatcaccccccctctgccattaatagcgctcatattggactcttcggcgtcgatgagatttcatcggcgaccgataagaatggaacagtagcaatttctgacgcttttccaaagtaaagatgcttaattttaattccatgatgtcaatacccttttgttacgcttttcctcggattggcattcgccgaatgattgtcctcttcagcggcaatttgctcattttgtggcatcgaaataaaatgcccacacccaaaaatgggtggccaaaccaaacaaaaagaggggagg

SEQ ID NO: 3088 - DNA, 1720 bp, Heterodera glycines
ggggggagttggcaattggttgatgatgaggtcgcccttcagaagatagccttaaataggaaaatgaaaagcaaaagggaggggagcggcaccggcggggagctcattaatggagtaattgctttggaattcgctgttggtgtccggcaaaaggttgttctattcaatgcaacattcacagcggagactctctctctctcactttatcgtgcacttgtctttgatcaatcatcccctctctctctcccctctatcgtccatttgtccttgatcaatcatcccccctcctcctctcattctatagtccatttgtctttgatcaatcatcccctctctctcctctgtcgtccatttgtccgttaatcatcccctctctgttttgtcatttatttatcattattaatcaatcatcccctctctctttctctctcctctgtcgcccatttcatttcttcaacgtactgtttggcgagaaatcagcctccgcagatgcttctgccattatttgcgctcttattggactcttcggcgtcgatgagttttcgtcggcgaccgttaagaatggaacagtagcaatttctgacgcttttccaaaggtaaagatgcttaattttaattccatgatgtcaataccttttgttacgcttttcctcggattggcattcgccgaatgattgtcctcttcagcggcaatttgctcattttgtgccatcgaaataaaatgccaacaccaaaaatgggtggccaaaccaaacaaaagaaggtgaggggatggaagtgaagccgttcagaaacagaaccgtactgaggagaaaagagcaaattcaaataggagaattaatataaaaggaaattgtgaaattaattagtcattgtcatttgttaattatgctttaattgccttttgctgactaatgaatcgatgcgattggactgactaatgacagacattcgaaaggcaaaaccgaacaaaaaagcagaataaatacaacagtgggcagaactgttggctcactcactattcattaacgttttatttgccaaatcgatcggtggctttggatttgcaaaacgcagacggagcaaatggggggggggggatgacagccgaacccgcgggggcagcagcttcgtcccacgtttattattagtaactgcgcttttcgcttctccgcgggattaaaccaattttgccttaagcaaaatttcattggcaattcgttggttttgtgcctttgcgaacgatgaaaaagccaattttaaattatgtgcagatgaatgatgatgattgacgtgaaaaagaaggctcatttatcagatcgttgagatggaaaaggcttttaataatgggaggaaatgaaaaaatgggaaaagtgggaaaattgcgaaaagcgaaacgcacgacaataaataaacaattaataattgcaggaatttcccatcctatccatcgaatttggaaatgctataaaagaaaagccaatgaaataaatggggaggcaatgaaaggaaaagaacactttgggaacgaacgaatggcctttgaactcggagttaaacggagcataaatttggaaacaaacatttcaaaaataaatttagaaaaagaagggaaaaaggaaaagtgagggatctgatcagatagagggaagtgatctgctggtcactgatcaaaggagaaaaggtataaaagtcaatggacgacgaatccgaatttatc

SEQ ID NO: 3089 - DNA, 1578 bp, Heterodera glycines
  unsure (1)..(1578): unsure at all n locations
tccccctgcctctctctcttccctgacacncgacagccagcagaaaagcaaagaagggattccctcccatcgattgtatcccccccttctccagaaatgctttctcccgttggctttttgtttgggtcagacagcaaaaagaggacgccggcggcacgactaacaaaaagagtgacaaaaagaaaaagcagcagcgcatcttgtcaacaattggcgcagtgtctgtgttaggtctgtcatccgccgaataattcaaattgttcctttcctcccccgcggcgatttacttaattatggcacaagcaagtggggtaatcattttattgtattgcattaactttagcaaattaggcaaaaataacattcacaattaaaaatttacaaaaaagtcatttcaacaaaaaaaaagtaaaagaaaagaatacgaaagtcaacaattaaagtaataaataacattgtaattagtgaccccacctgaaaaactctctaattaaaatgcaaaattcagtcactaatcacaaatataaaaactgtcatttgtaagtctatttttctgcttcattcgaaactaagaaaagcttctggcaaaagatggtaatggacgctgaaatttgagaattattaaacaaaaaatgttcaaacaaaggaccggacgctttgttgaaaaaggaaggcctttccttccaacaaatgaaaacgaggtaaacgggcaccgaagtgagcataatcgcaattccaattgcttacataaattagcattgtttctggctttaggtgtaaaaagggactgacccgtgtcttttggcttgccaacgattggaataaccaccaaagcgacacagccgagcagaaagatagcggggaaaatcaaattgaccttacagaaaatcaaatgaaaatcccattggagcattaattagcctctaatcacttgaactcactttgattggcctcggtgcgtttggcattttcatacggaaataaaacaacgaggcaatggccaagccaatggcaagccaataactaatcgcaatgtaattgatcagagtgagcgcattgtcaccaaaggcgagataaaccaacgacaaaaggccctaaacacaaggggaacggtggaagggagctgaatggcaacgaagaaaagcaccagaaaaacgacggcgggcacgggggtacgcgttcgtcggttgatcattgtgagaaggacgggcatttgctcctcccgggcgccaacgtaaaaaagtctggagacgacgacaacgatgagaatggcatggccattccaaagtcagaaagacaaaaccgacctggatgaggtgaaaatgctaaatgggaagaaaagccaaaaatgtgggaggggaatgcttctgttagccttacactccgttggctgagccgagcgtggaacacgcgacgaagaggggcattgtaaaggcgaacggaccgtacattttgttggcgaattcctgtaaggcaaacgaaagaatgaatggacatgggaagataaaagagggagagagaggggaagagaaagaagagggggagagagagagagagggggggagggggagggggagg

SEQ ID NO: 3090 - DNA, 1767 bp, Heterodera glycines
actgatgaccacgtaaagggcgatgttagtgagcacgtaaatgacagttacagaaacagtggaaatcaaaatggccaacggcaaattcctgaattggtaaaatgccaacggtgcaaaaatataaagaccgttttggattttgcaattcttcaacgatgaaattgaggtagttccagccttggtaagcgaagagtccggaataaaaagcaatggaaactttgccaacgtttgtctcggaattttcgaaaacatttcgaaaattgactcgatattgcggatcgccttaaaaagtaataaaaaatgagaaagactattaaattacaccttggatcagaaggtaaaagccggtgattataataaaaatgagggcaaaaattttagcaagtgtaaaagtgtcttggatgaaagtggccaatttgacggaaagacaattgagagcagtcagaaaaactaaacggaagcatttgcaaatgaaagcggcatttgaaagtgccaacttatcagggcagccgcaattatttgagcagaaccatcaggggttttgcaatttgagaagaacgggtgcaaaatgtatttggcaaaagttaaagcgacaattgtgcaagtgcacggtctaaagatgtcataaattcgcgtttaaattcaaatggacaaaattttagcagccgtccacctgacgacgaatgcttcgacccaaagtcgtacgaatgccaaaaaaggaccaaacgcctccattatgtaggcatagtcgccacccgactttttgatgagagtgccaagttcggcatagcaataggaaccgagcccaacgaagaggccgcaaaagagccaaatgagcagggaaaggccgatacttccagcatctaaagcgttgatttccaatcgcaagttaaacaacggaatgtgcacctttttggacacccgttggtgacaaaaagatgccggagccaataatacaccttaaatgacacatgttaattacatgtttaattattggacaaatgacttattcttcccgaattctcaaattcctcttcagttgatttggaaaattcttttttgagtttgtttgagtcagcttttcccccactgtatgcatggtgctagggcacttcgcgaatcggcaaataagagggattttcgaatttgacaaaataattaacaaaaagagaccggccctcatcagtacggtgtctctttgtgtacaaagagccactcgtaaaaaagcaaagaaaagcattttattatgccaaaataaatataatttaatagatattatactattttagttgattgaaattactttaataatgaaatatttagtttattaattgattaaacacatatctcttgaactaattattttatatattaaatcgaattatttatagtcctctcctccttaatcatgtatctgtattcaatggactcgcaccgacgattcgctgaatggggccaccttcaaaatatataaagatggattggaattctctttcctgaaaatttgcccctaattttgttgtatgccctttccaataacaaacgcttggaactttatttggggagttaatttgcaaattttgctggttagagccttcagcaagctcaaaataaattaaaaaatttttaatttaaataatggcttgagttgcttataatttgacattatgaataaataataatttaattaaattatatttatttttgcttaataaaatgctttgctttgcttttttgcagtgggttttgtacacaaagagaaaccgt

SEQ ID NO: 3091 - DNA, 751 bp, Heterodera glycines
caaaaagatgtcacaggccgcaattacaaacaaatgtatggaaactattatagtaagtaataatacatatgaacgcaatgaacgaatggaatggttactctttggtcttttattttttgccccacgtgtcaatcttttgtgcttaataaaaaaatatctttaaggtcaaacacgtgatttattgtttaagaaaatttttacaaaggaatcaattccatttagttaaaaaaaagtatgaagaaaaggcacaacggagggcaatgaatgtgaagcgaagggcaaagggggggggggagaagcatttacggctttaagggggacggacggaaggattgggaaaaaggagatggatgacataataaaagtaaaaaataatgaagtaaaaaggcaaaacttctgctgtgtgggacctaattaggcttagaataaagcaaggacgtgccagccagacccttggctttggcttcgggggggggggggggggtgaattcaaaaattcgatttttaggggtgtatttttttaaatcccgagaattaggagatttaatatgtgttaattaaataatttacaattattatttttttgttttaatttacttattgattgatggcttttagtttgtttccatgtgtttatgccgtttttgaaccaaaaatgcaaaatttaaaaatttgaattttcaactttttttcgaatttgggtctgggtttagggattggtcgaaatgaatgccggattcgtgatcaacag

SEQ ID NO: 3092 - DNA, 2561 bp, Heterodera glycines
  unsure (1)..(2561): unsure at all n locations
tcattttgaggacacagcgacgcatcagaagaagaagaatggggggggggggacaaagaaaaagaaagcaacatttgttgaaaagggcttctcaccatagcatggaaaatggaaaacttttatttttatatgtatgccattttttgatttcggtaatcaaattaagcctcacaaataacccaatggttaagtgacaaacaaacattgaaaccatgagaaactctcattgggttaaacttctttaaagcaggctttgaactcagcttttaaaatcctcatggagccctaaatagcccatttgtcaattaataactttttttaattagaaatacatatgagcaacagagaccaaaattttaaccacaccagcggactgccaattttaataactcagcagaattgcgagccctaaaattttaagttaattttaaattattatctaaaaaagttgcctaaagatgcatcaaagaattagcgagatgaaattaccatattgctaattcctaccgtaaaagattaattttgaattaaaatctttggcattatgttttatctttctgtctaacaaagttaccattaataaaataagggcggcagacactgtgagagtgtgttttgctagcaacgccatttccacttacctaaattgttaggaaattcctttgcgacgaatcgatttttattttagccatttttaactttgtgtgttcaaatgtttgtccatcaatgtctttactatgatatcaaattcagttcattagttttataaaaagtaggtgcttagtcgacctctaaatgcatcagtgtctgtttcatacttttaaagcgtttgaggcatttatattgatataatttgtagctaaaatattacttttgacttttcaaatgtcatctcgacgtggcggtggtaataatgttgagggaaaggtttacgttggcggtctgccagaggacgcaacttccgaagaggtttcaaataattttttagttaaattagaatttacacagttcatatgtcacaatttcagctcgacgacgtcttccacaagttcggcagaattcgtaaaatttgggtcgctcgtcgtcctccaggttttgcctttgtcgaatttgaggacacgcgcgacgcggaagacgcagtgcgatcattggacggaacgtaaaatagttgtttttttctgggaatattcaaatggtttaagacgaatttgcggtgttaaagctcgcgttgagttatcaacgggccgttctcgccgcgatcgcgatgaccggggcggtggtggtggcggataccgaagcggcggcggtggtggcggcggcggttaccgtggcggtggagggaaccgcgactattcaaggtttttgttcgaaaagtggccgaatttggaggatcataagaacgcgaaattgcagagtagcaaagtcattcgcctttttcagcaaatcctccactcaatcgtttcttcaaagcgtcctccaccctttttcctccactgttcctcctcttcctcctctcgtctttttcttcccatccttctgaccaatgtgttactataatgtgttgctttgtccaaaatggcaaggcattagaagtgaatgattggacctacgcgttttgcccctaagttcggcttaatacgattgtttcttcgatacaaaacgccaatttgggcccattgttcgccttctcaatataacttcactccgttacttccctccctccaaactcttcactctctccgcttcactcctccataatcgttccactctccaatcagatctcgttcgcgttctcgttcgccgtaccagcgtcgcggaggaggaggaggccgttctcgctcgcgttcccgttgaaagatgggaggtgaaacttaccgaatttaccaaaaaagtgcgaacccaattttagggatctacaatttccgaagaagttgtgacgaactgatgcgatttcaaccattggcgattttaaatttgtttcacgtttttggtataattttgggttaaataaatcgcctataaatattgaatattcttttatgcgaataattgaatatatggctctagtgcactttaagcgtccaatcaatgaccatcttcaattcttttcaaatcccgtaaattctaaaagccgaggacggagggccccagtcgcaaaaaagcccatgtgatgtggagccggtatgttgtagcgcccgagcgagcggtgccctacctaccaattgcgcaacgagtgtggactgagtttgngccctcagattaatattatcacggaatttttcttaatttacatatttttttgaatcaacaaaattcattntaaataggaaagacaccctanaacagccaaaggagttgcccctgtttgctgtgnncaacgtgaatttgatagaanagcaagttncagaggaaaacgttagcttctcaaaaaagggtatactggagaatatgggctcccaggctggagcgcggncgcgatccgcgatttcgcggcgtttttttttgcgcgatccgcggnccgcgcaattgaatgcgcgtgggngcgcgcggttttttttttt

SEQ ID NO: 3093 - DNA, 3677 bp, Heterodera glycines
  unsure (1)..(3677): unsure at all n locations
tcttcagaaaatgcactttatctctgatgaattatgatcgcacggtcatttacaattaatattccatcttatgcgtctgatcatcgatattgttcttttgtccgtcactcattgtcagcagaagacgtcccctttgtgatgctttgtcccgcttcatcttccacttcttccggtggcggagacaatggcctaaattaagcgcaaaattcaaattcggataaaaatcaaatgctttttttaattgctcacccaatgcaattagtgccagcaacaagccaaatgaacacattgttacaattgttgtcccaatttccgtcttcccaataaaccgccgcggtctccccaataattttgcatcgtttcattatccatcggttgtccaattcatttgctttggccaatgtcagcttttcctttgtccattcgttcaccaattcaaatggcaccatttgtattgacagcgcatgaacagaaaaatgaatttggtagctaatggaagaaatggcattggcacggagaaaatgctaaacaatttggaaaacaaaaatcagtgatttgtcgaattatggccacacctccttgaaattgttgacccaatcgaagtccgtttgtctgtataaatctgcgcaacgcaatcgtttgggttggccatcttttctcggagagtgcaaccatttggacaatgcttggccagcagaaattgttgaatttggcacatcaaaatcatcaccaatcgcagcgggaaacaaatcaaatgaatggattgaagtcaattggttgagatcagtgagaattgttggcgaagtgcgacgaagcaaattgtccaaatgatcaccatgccataaagctttgatttttaattactaaatccgaaggtgattaaaacggattttgctgggcaacggacggtcgtctgggaatggaaatggcacaaatttgtcacccatttgtacagatagtttcggttctggtcctttgtccttgccagggctggagcgcggccgcgatccgcgatgcgcgatccgcgattcgcggcgtttttttttgcgcgatccgcggtcgcggccgcggcaatttgaatgcgcgatgcgcggtgcgcggccgcggttttttttttgcgcggtgcgccgcgcatttttaagcactggtaagaatgggggtctggtgagaaaagagaagggaattggagaggaatgagaaattttttagaaaaaaaaatattttttttatttcatttaaagtattcctccataatcttatgtgttgtagtggctaaaccttctgaccttcagtgtttgtctcttgggttcgattcctcaacggaacagaaagttttttcatattttctttacattatttcaattgaaatttaattaataaagaaaatattccaacttttatttttctttaatttttaaacagcctaaaatcacaaattaaccttggtcattttttgacaaattatgttaactaatctcgctgaaaatatcaaaatattccggcggcgcctatcggcaccaccgccccccccccccacaatgttcccaaaaagttttttggaaccgcccacaaaaacgcgatttaaaaaattaatagattgttaatttattcaaaaaaaatccagaattttgggactcagaaaatccaagattcccccccccccccccgcatgaaaatttaaaaaaaaatttctatataatggaaaaattcttcgaatgcctcccccaatgagtacatattttaatataggcaattttcgtaacaaagtgcagtcaaattttcaaattttttttcaaaaaaactttcacttgggaaaattttattgattaaattgaaatttttgaaaattttgtttttaaatgcgcggtccgcggccgcggcaatttgaatgcgcgatgcgcggtgcgcggccgcggtttttttttttgcgcgatgcgcggtcgcggccgcggcaatttgaatgcgcgatgcgcggccgcggtttttttctgtgcgcgctccagccctgcttagtatagtggaagggattgtgccactaccccaaaatcagaacatttcttagaaataagaacaaatcgaagccatgtatattcgagttctgctgctctgagattagaatcgggttaaatggggagtgatcagagacccagaaaatatcctgaacacatttcccgacttgacattctcttaaaaaattgtttgcaaactaaaaaactaaattcaaactcgacaattaaatagtgcctgcctaatagaaaacatgaactactatatctaccagccctttttgcaaaaattaataaaaaaaaatttttaggagttttcgagattactgatacgagtattcagaacacaaagtcgaaattaaatgttttcgttttttccgcttaaaaatggtttaaatcagggttacacggatccgggtacccgaccgggtccagacgcggatacccggctttttcaagacctggacgcgggacccgactttttgaaaaaccaatacccggttcccgacccgataggtctgggtccactggtatgaatggggggtctgggtcaaattaccgttcaaatttgagggaaggaaaaattataaaaattaattaaaatgttcaggttcaaatccctcttaatccagcaaaatgtcctttttggataaaatctgtaaatatctagcaaaaaatcccaaaaatcttaccggcagcgcctgtcggcgtcccaggcgcccaaaaatccactaaaattaaaaaaaacaaaaaatccacaaaattgtcattgcgcctatcggcactgccgggtttcaaaattctcacatgtttaaattcataaaatcgacaaaaactgatattgactatttaataaatctattcattagagctcgagctggacctggatccaaacctagatttttcccagatccaggtccaggccatttttggcaacctgacaagtaattgtccaattaaggtacttggacattccacagtannatgtggttcgnnttttggnnctgtcccgcctcncggttggncttnnntttttnccgccnnnagtatnagtggcncatgcccttcttttggttntttttntttttgnntnnatnnnatnnntnnncctgctgggttggncctggggttctggntttttgtccnggtcnttcggnnnntcgntttttnncgntttttttnntgnnnnnttttnnnttcttcntttnnntncntntnttgnnnnngttcctttttgtccnncttttggtgctgntcnngtctttgcntcnntttggtcngntctcttcttcttcnnggtgttcttgncnctgnnngntncncttcnngnnnttcttcnnnnnnnntcccttggggttggnntttttgtnnnnnntngtcttntggncgngcntnnnnntttnccgnngntttttttccgtctctgcntttgctntnnnttcccnnctttgttngccttnnngggnttgttgtcccnntttggccnnngtctgtgcttcnctgncnnngccttgccnnntgctnncnncnnntttntttgnngtcntcccttnttntttgncnccttntnctttgttagagtgnttgtgntntgtgtggctnngnnnncggccctctaaagacaatcaaagctgtgtaatcaatgagtttatggaccgcaggcagcaagct

SEQ ID NO: 3094 - DNA, 2078 bp, Heterodera glycines
  unsure (1)..(2078): unsure at all n locations
ggaaggcanttgaagaaaaatttatttaatttatttccttcatacaatttcgcaacacagaataatggcacttggataactggatttttaaaaattaaacaaattctgggatagaaaaaaatgtgataaaagataagaaaatgatcagcattaaattgctcatgatcagagaaacaattaagaaaggactgatcaaaaattgtacgcaattttcctgatcaaaattgcttatgggacaatgccaacgttttggtcaaagacagggaatgagaagggaattaattgcacaatatgtatgtatgtgagtttggaaatgtcagtattttacccaatcgatcggttgatcgatcaatggcaaacgccagttgatcaatcaataatttcgctacagcttctggaaaatttcctttattttttaaatcgactcaaaaaccgtgaatattctaagaagtataaaaatttacaaaatatattgctcaaaaagttaattatatttatttatcgaaaagggttggttggtctctagaaactagagaccggcgcgggattttgcgggatcccagtccgcaatcccgcattttttgaaaaatttccgatttcttgcatcgcaaaaaagtggttttgaaaagaaaaaaaagtcaaatttatgaaccgttaataatttgatttccgatcaactttttaccgtcggatccaatcgaaaaatcttagtcgacccatcagccccttttaatgcatcccgccagcccctaaaaatttattttcagcattttttgatttttggaaattttttgaatttaattgaaattttttcgattttccaaaatcccgcacgggatcccgcaaattttaaatgcgggatttccgggattaatcccgcgggattccgtccctcaaaaaattttgagttccaatcacgcagcgggatccgcaaatttgaaatttccggtctctactagaaactgcgtcaattgataaaatttgatatttaaccgaaattatgtgatgaaaaaaattttggaattaaaaaaaaattttgaaaaaacttcggcttcgaaaacttcgggttttgtgggcttcgagcttcggacttcggcttcgagtgctaagccgagcttcgcccagcataatataaaattacattaaattattttgaaaagcattaaaaaaaattttcaaataaatatagaaatatactaaaaacagtttgaaatcaccttttacatggtttagaattttaaatttgcctattaaatatttaaaaattttttattatattgtatatttttgaaaaatttccgatttccgacgtttttggggttggaaatccgatttccgacacttccgaaaatttttggggcctcggaatgccatccctgataaggaccgccggacccctgtatttatttttcagcattttttgatttttggatttgactttaattgaaattttttcgattttccaaaatcccgcaatcccgcacgggatcccgcaaattttaaatgcgggattgcgggatttccgggattaatcccgcgggattccgtccctcaaaaaattttgagttccagtcccgcagcgggatccgcaaatttgaaatttccggtctctactagaaactgcgtcaattgataaaatttgatatttaaccgaaattatgtgatgaaaaaaattttggaattaaaaaaaaaattttgaaaaaacttcggcttcggcttcgaaaacttcgggttttgtgggcttcgagcttcggacttcggcttttaattgatatatatattttattattttttaaatgaaaatccgtacaaattgagcctaataatcccaaaaaagaagccattttgttgaaaatctgttaacaaatctcactcaaattttcaaaatttcccccggcggcgcctaacggcaccgccggaccaccttttttcccaaaagttttctggaaaaagcgcgccggaaaaagtggtgtgataagtaaatttaaatttcaaataatattcgaccatttagcccaaatgattaattgcttgaaataattgaagaaattttgatttgaaaattttcattaatttaa

SEQ ID NO: 3095 - DNA, 3707 bp, Heterodera glycines
caattcaataaaatttaccagagaagaagtatttggtaagaaagtaataaaaaaattagttatactattatctatcgagatataattcaaatgaataaaaaacagaaaaatttgaacaatttgtaaatttccacgccaataataaccaagtcttaaaacttatgacggtatttagttttttggagttaggtatattattctacaacatttataaaagagaaagggaaattaacaatcatttttgaatttaaatcaattattcactcattaaaagttaataattatttaataattttcgcgtaaaaattataagcaacatgttaatataaaaaatcaattactgatgcaattattggtgggggaaaatgaaaaaaatatttttaaaataatttttgtcaaatcataaaattaatatatgcagaaattctaaataatttaattttgaaaatactttgactcaaaaaatgttgaaaattatttttgagattattttcttcttattcattatcgtactaattgatggaattgatgaagatttatttgatgatttgttgaaaaatctaaagccatcaaattcaaaaaacatcaaaaaaccgatatttggagaaattaatacgataaaggaagaaatagttgttaaaaatgaaaatgatgaacaaggaaatgccaatcaaattgaaatggaagacataaatccaaaattattacaaaagattaaaaaggaaaaaacattggaagaacaaaataataatttaaaaataaaaatgccaaaaattgaaatggaacaattggaagaagaatcatatgaaaatgagtttgatgagcaagctgatcagaatgtttcgtctactgatcacaacgattctgttgatcaagcgtattataatattatggtaattcaacaatcctgtaaaaaattatttaaaaattcattggttctaagttttgcattaaaatttgcacaaggtagtggcaacgaggtccggtcaggtatggtcgggctcggtcgatgggtcgggggcaattggtcgaacacacaattcacacaacaaaataatgctttattgttccctctcaaacttgggtacagtgccaaagagcgaaaccggggaatgccaatgagggaccgggatgggtaatgtatcacaattggacagagaaagggactaggaaaagaaatggttaaggcatgggtaaagggaaagagaaaggaagagagagagtgtgagagcgggcaaagggataggcattgattgcccgtaaaagcgaagtgaatgtgaattgggagtgatttgggggccatttaaatatggaatagggaaagagataaaaaattggggcaaaaagtgaatattgttaatttacaattaatatgggctgatcactacaaattgggggagcaacgtactttggagggaaaatttggcgaacaaacgtgttcggtctttgaaccgactcaataaaatgtttatttgtaaaacaaataaattaaacaatttaaataaaaatgggcgaagtcggtggcgcgaataaataatggaggagaacaaatatttaggcgaagtgaaataagtgcataaaaagcaactgaatgaatgaggggaaaggacatgagacataataaatcaatagtgtcttacattaataaaggaagacacaacaattagagagtggggaaaataagaggaaaagaaagagacaaatgcaaagggaaaataaatgcaattgtgaactcactgctcctttttaatcgttttaattgatggaactgatgaagatttttttgattatttgtggaaaaacctgaaaccatatatttttaaaaaatcgctaaattctcagatttttttcttaaaaatgaattatttcaatagaatatagaagaaataaatgaaatcgaaattttaaataaatttaatttgatgaaaaaggaattgcgcaaagaaattttttattaaaatttaacaatgtttcaatttgaaagtgaaattgcaaaaaaattgggcacaagtcgctggaaaatttataaattgaaaaaaaaattggaaaaaaaaagagagaagagaacggaggaaagtgaagaaacaaaaatgcaactgatcagaaaatttgatcaaatgagaaaagaaaaaatttgtggacttaaatatgacgagaagaaaagatcagtaattgaacgtgaaattgctaatgaattgggaattaatagaaagaaaatttataaatggaagaaggaattggaattaggtaagagaccaatggtctaatcgaattttgacaaattaaaaaaatcaatttgaaacaaaattggaaaattgataaaaaaaatagcgtaaaaattggggttgtgtggaaaacaatttatagatggaagataaaatcgatcaaaatttataaattgaatataaaattaagaaaatttccaaagaaaaaagaggaaaatgaagaaataaaaacggaactggtcagaaaatttgatcagaccagaaaagaaatgatcaattttaggaaaaagcatcggtcacaaataattttatcctatgacaacttcactattcagagaaaagcctagtgtactatctctttgtttcttttttctttgtaatgcctttttggctaggattaaaaaaagctctaggctaaatattttgttgaaaaccaaaacaaaagtactgatgaaattctttttttttcggtaagacaatgcacgaccaaaaaattgagagttcaattcaataaaatttaccagagaagaagtatttggtaagaaaataataaaaaaataattatacttattatctcattgagatataattctaaaaaacagaaaaatttgaacaatttgaaaatttccacgccaataataaccaagtcttaaaacttatgactgtggaaacctccacaaaatttgcacaaggtagtgccaacgaggtccggtcagggatggtcgggctcggtcgatgggtcgggggcaattggtcgaacacacaattcacacaacaaaataatgctttattggtccctctcaaatgcgggaaaaaccgggacagtgccaaagagagaaaccggggaatgccaatgagggaccgggatgggtaatgtatcacaattggacagagaaagggactaggaaaagaaatagttaaggcatgggtaaagggaaagagaaaggaagagagagagtgtgagagcgggcaaagggataggcattgattgcccgtaaatcgaagtgaatgtgaattgggagtgatttgggggccatttaaatatggaatagggaaagagataaaaaattggggcaaaaagtgaatattgttaatttacaattaatatgggctgataactacaaattgggggagcaacgtactttggagggaaaatttggcgaacaaacgattttttattgggggagaaaatgggcggacaatttcgcacagttgcgattgcgggagaaaaagtggggcaaatttgcggcggagggaaacttggggaggaaacaggatgtggaacgggcggggaacgggcggggaagggattaaaaaccaaacaaacaacgggagggaaattgagcagtcacgccacctcccttttaccccttttatcattattttaatgctaaaatcaaaatttgatttttcgagtttcgacatgacggtatttagttttttggagttatgtatattattctacaacatttataaaagaga

SEQ ID NO: 3096 - DNA, 3474 bp, Heterodera glycines
tgatgtccatcatgcactttgttctgttggatgtgcgcaacgcgtcaatgctctccccgtttttgcctccaccaaactctcggtgcattccgcgttggcctacccatttgcaacaccaaatttcaaccggcaatcctcgacatcctcaacagcacccatggccggctctgaaggagtcggccaacaaaaacggcaaaatcatcatcttcagcatcatcggctaactccagtgaaaaggcacgtgtttcatttgctttttctttctggtcattaaaaatttgttcccttttttgaagttgggcgtcggcgggttcagttttttatttaaagacgaggattaacccgtatttttgtttaaatgtagaggatttaaaaatttcattgtttttttaaaggatgttgacggattttgtgcgccgttgcggcagtcagtcgatcatcgaggacaaacagatcagcaagacaattttggaggtttgccaaagaggaaaccaaaatgaccttttgaaaaattttaaatgaacaccagagcagctgatatccgaacagcgcaaattcctcctgcatatcagtgcccccccagaatttttttttgaatttttaaaagctaaatttttcaagaaaaaaactgttctcggcggtgtctcttccgttggtggggcatccattaacattttaattttgccggtgaattgtcctatttggaatttcatattgttatattgaaaatttattccgaaaattgcagtttttacaaaagaagggagcagggaaaaatctgaaaatttttttttttttttttttttgcgtcggttatgtccaggcgacgttttggaatgtatccacaaaagaaattcccaaaaatctcttggaaaattctgtgcattaattttttgaactgctttctctgccaaattatttaatttttcacttcagctttgccttccacaacctctgccggtggtggcgctgcttcgtcttccgcctccgtgttgcgttctagcatcaaagacagcagcggcggtgcggccaacaaaaaggacccgtccgactcgacgcaggcgctgtttctgctggctgaggtcagtagttagccggccggctaatcaaattaacggctacttaaatctgatacctaatactcttccagaatctggctgaacttatcgactcggtctgcaaaagtgaggacaaagaaaaactgttgcccgcactgcaagcagtttggaacaacacattgccctattcggtcgaagggtacgggggcaattggtcgaacacacaattcacacaacaaaataatgctttattgttccctctcaaacttgggtacagtgccaaagagagaaaccggggaatgccaatgagggaccgggatgggtaatgtatcacaattggacagagaaagggactaggaaaagaaatggttaaggcatgggtaaagggaaagagaaaggaagagagagagtgtgagagcgggcaaagggataggcattgattgcccgtaaatcgaagtgaatgtgaattgggagtgatttaggggccatttaaatatggaatagggaaagagataaaaaattggggcaaaaagtgaatattgttaatttacaattaatatgggctgatcactacaaattgggggagcaacgtactttggagggaaaatttggcgaacaaacgtgttcggtctttgaaccgactcaataaaatgtttatttgtaaaacaaataaattaaacaattaaaaaaaaatgggcgaagtcggtggcgcgaataaataatggaggagaacaaatatttaggcgaagtgaaataagtgcataaaaagcaactgaatgaatgaggggaaaggacatgcaatggacataataaatcaatagtgtcttacattaataaaggaagacacaacaattagagagtggggaaaataagaggaaaagaaagagacaaatgcaaagggaaaataaatgcaattgtgaactttcatctctcggggttgaccacccgaacaaaacgattttttattaggggagaaaatgggcggacaatttcgcacagtttcgattgcgggagaaaaagtggggcaaatttgcggcggagggaaacttggggaggaaacaggatgtggaacgggcggggaacgggcggggaagggattaaaaaccaaacaaacaacgggagggaaattgagcagtcacaccacctcccttttaccccttttatcattattttaatgctaaaatcaaaatttgatttttcgagtttcgacatgacggtatttagttttttggagttatgtatattattctacaacatttataaaagagaaagggaaattaacaatcatttttgaatttaaatcaattattcactcattaaaagttaataatttaataaacaagtaaaaaaaagacgaaatttccaaaaattttttcgttcttaacattaatgacacaaacatggcaaaatttttggagtgtcaatcaaaaccgtcccaaacatacgatgaacttttaatggtcgctaatcgtcttagtttggtggaagagaaaacatagggacgttcggttcaaatcagaaattcacaaaatccattccaattgccaatcgcgaaccaaatcccataccaaaacgaacaaattcgttattttggtaaaagaatttccaaaattcgtgttctcttttcaaacccattccaaattttgcaccaaaatcccagggtttcgtctttcctatcttaatttgggttgatcattgtgccattgcttttcaatcccttaaaaaatcaaggatgaaaaacaccaaattccaagtcgcaaagacaaacggcctctaccggttcggagagctgataaacgaggctatggaagaagtgaaagccaaaaatattttgggttttcaacaattggaaaaatcaaaaatggaaatatttgcaatttttttttgcggtgtgtaaaattttatttgtgggccataactctttcctcaaccgattaatatttcttaaatttaccatatataaaattttttggaattccataattgtttttcaagggtttactatacggaaacggaaatttacatgtaaatgaaattattttttaatcaattatttacgattaaaaacaagataaattgcaattaatttgataatttctactttatgaaattttttttttataaattacataatatatatatctatctataataaatataagctgaaaacaaaaatcatttgatttttttgactcaaaaaaatggaaattaattttgtgattattttcatcttatttctaatcgtactaattgacggaattgatgaagatttgtttaatgatttgtggaaaaatcttaagccatcgacctcaaaaaacttcaaaaaacaaaaattcggagaaataaatgcaataaaggaagaaataattgttaaagaggaaaagtatgaacaacaaaatgccaataaaatagaaat

SEQ ID NO: 3097 - DNA, 1950 bp, Heterodera glycines
gttccgcttcgctgttcaacatcaaaacgttgacttcataccaggagttgcacccgttcttccatgcgttgaccatgcaaaatggcactggacaaaagcagcgacacatttgcaatggacaaaggcagtaattctcggagatggacaaattaatgagaaacaaattgattggtgatcaaagaagaaaaaaaaagttatttgtttttatttgcatgccttttttgttgttgtttttatattatttgtgttttttccaccatttaccgctgcccatagtcttccccccccctcggcaacaaaattccgtgatctgcaaaactggaacaaaaaaaccaaaaaaggaatactgaatggcaatgataaaatgaaaaataaataaaatggcggccaagaattagtagtcttatcttgtagcgtacgctgacccctcctattcctcctgccttccacttacggtggttgagttgactgctgctgttagaggcagagatgacaaaacatggaaagactatttgtatatgcccgcggggcagtgtctaaccaaaaattttgcataaatctaaggcaggaatgagataaatagtaaacagattttcacttcatcagcaccgcaggcaaattcattctcctcattgcaacgatgtcgctccacccctcactcttggctcctcctccctttagattcaactgattcgcctatttttgatttagatattaaagaattactacaatattttcagcaatggcggcgcaaaatgttgacaatgtaaaaaataatagtaaaattaagcttagtgtcagaatgcccgattcaggcacgacccctccacagcaatccaaacctttttcctaaatttgttaaacttaaaaattgaaaatatgcgcaaaatgcaaaaaaaaaacatttgtagtctcaacctctgaagattccaacacttgaggactccgatatctgagagcctcgacatttgaggactcctaaatttaaggactccgaagtttgaggatccccactcgaggatcgatacctgagggcctctaaatttgaggacatttggtgacccgaaacttgaggattccgacatttgattgttgcccaacattgtagatccgaaatacgaggcacgcaaaatttccaaaaggctgactcagtttttaatcaaaaaaggatgccttttccaaggcaaacgggattattgaccatttaaggacattcataaatttctaaactccctgtcgaatggattacaaagcaataagtcctgatatcaccttttatgtttgattttcctggttatcattatgctaaaccatatgcaatttctttcatagcaccgtgctatgtaatacaatggtgcataattgtgcaccctaatttcaacaaagggttctgatgaccattttaccaaaggtttgcctaattccgaacccctgactcaacctggaatatttctacttgatttgactctaagaatgaatacgatccggtattccgtattatataaccagagaccgactgactaaaaagggcatcaaaaatcgcgaagaagacaccaaaaaaattcgacaatgattgagttctacagtagcgataaatttttacaaacaccagtaattaaaaatttaagcataaaatgaagtgatatgagcacgcaagtatcacgactttcattcagaatcttcgacgagggcttgtggatcgtgatttgctctccctgtcacgcttcctttatgatttttacaattttttcaaccaattaaaactttttatgtgcaagtcgctaccattcaaaaggcaatccggtagtaaattttgtgctcttccaatgagcttattcaaatttccagaaaaatttttccaaccccctagaaattttttctaaaatttccccgattttcaacgtattttgtggtgtcccgatcactatgaagaagtgatctaaacaagtt

SEQ ID NO: 3098 - DNA, 2402 bp, Heterodera glycines
aatccgggttgacgtaacatatcatcacatttggatctccgctggtggactcagccaaaaaattgtgtgggattatgcagccagaattgatgcagatgtagccgagtatctccgccgtcctgaatttgaccttcgtggaactatgccagagcacttgcttcgatggttcgcgcgcaatgcaggtctcactaaccaataaaatgtgatcccaatacattttgccaagtttctcctcccaaacatggcagtttccttttccatttgttttggctatttgcaaatccaattgagtctttgcttcctttttcataaaccataaactcttcaaaattggcaatccgtcaacatattttttcttatattcccgtgcaaaagcacaaattcgtgacaaatctatgaacaaattttgttggtggcattttatttaataaaataaactaattttttataaattaaatttcaattgcttaccaaaacaaagttctttaacaattttccagatctttaaataactgtcggaaaattccttcaataaaaaaattttgtttttgttttcctcaacagattttttgtagtttaaataatcattattccttattaatagcaagattcaaagcatttaactgttctttaattggtaccttgcgcatattatggctatttgtagcgacaaatgcggctttaattacttttttatggtgaaaatagtcataaaatggttaagccacaaaataagagcattttcaaactccaattttgaataaaaaaatacttatgttttgttaaaaaaaatatgttctgtcgagataggcacgttgtttagcagaaacaagtgaaaagtacccgaaaatttttaagaaaaaattctgtaaacttataatgtgccagattgttcccttggaaatttttattttccatttcgggggattgggacccatctatttttttccaaataattacaagagagtatcttccgaaagcattgaaacttactcgacacaatgtcaaaacggtcgctgtcatttaaatcgtttatcgaaaaatttgttgaagccattaaagcatcaaatttttcaacactttttgctgatggaattgcaattcattctttaattcactgagttgttcataggctagatttgaaccaaaaatgcaccaatttcccaatgcttttgattttctaattgtaccttaagaatttgttttttttattttataaaattaaattttacatttattttcaagtgatttcccgtgccacaatcgaataggtctcgattagctgctttgatcactagcattgctgaactcatttggagttcgccttgcccgaccagcaggaattttggcttcatgcaatggcattccaatggattttctaataaatttaaacaattttttgaatttttaaaaattttatttagtgccattttcttccgtcttaagtgtgtcttgtgcccttgttgaacttgtgccaacttcagcttcgttctcctgttttggtccttttttgcacctcttccaacttttcacatatgcttcagctgctattgataacattttccaatattcgcaaatttcaaccaattcttggtaagattttttgaatccaatttcttctggctttttaatggtattatttttgcaattcattgccattataactcgccaaaagaatcttttgaggattttaattgctttttccatgtcttcctcctccgttgtgtcatcttcgatcacttcaaattgggactgctgatcagtgtcttcgtttgaaagtaacggttcttttaacttttcatatttgtagtccattccattcgcaacattgacaattccattcatggttatcagaagaagagataggtggatgaaagggatttggcacattttattaaaaaatatatttaagccttttaaattattatataagttttcatttaaaatgccacttttatttaacaagcatttcacgtgctccacaaatgtacaacacaacatcaattttctcaataatatttgcatttatctgcaaaaaataaatgccaaacttttttttataataaaatatgttagaccataattcggtagaagattctttcgacaacatattttcaaaaataaaaatttcaagtttgaaatgtttcgtaataaaggcattattaaaaatttatttttcatccaaattattttgcgcgaaaaactggcggaaattcatgtattatataattaatgcaaggaaatttccagaaaatatttgcatacactttaaatttgggtaggtctatcctatgatgaaaaaaaaatcctgttttgggacatgctcattttgctcacggtgttgtgttgcttgaccgttttggtgccgtcaattttggcctgctgttgcgactgttgctgct

SEQ ID NO: 3099 - DNA, 2136 bp, Heterodera glycines
ggggctctgttttagggaatatggtataacaattcttacattcgccaccatgttgaggtggcggtggaggctgcggatgttgtggttgttgcggttgtggcggtggcggtggcaacaacaacgacgccgcactgttagcagcaatcaccgcagcaaccgcttctaccacgggtcgacgtcgtcgacgacagcccggcacattttgggacagtatcatgcaacgtttggcacgtgcaacagcgataacaacggcaccaagccaggtacacgtagaataagctgataatgacaatcttatagttcgttttgatcagtggaaaatcaaaatgatcatatttgcgaaatgaaaaccacaaatagaaaaattatacctatcaaattctcgacattttttagaattctcaagtttttgaataaaaaagtatttataaatttgatcaaattaactaaatttttatttcttcctttcattaggtagccctaattattattctctattaatctgctagttttcaaaaatttttttgtttcaaaaaaagttatgactagaaaaattttagtgttttaaaaacgatgatattaaaatagtttaacaaggtttttataatatcggaaaattcttgtgcataaatgaaaaaattggaaaacaaaaggtacaaaattcatctgccctcggcggaggagtccaatgcaattgttgttgtgagaatggacaatgtgtgaaatgtgcccagggacagtgttgtgtgaatggaaaatgtggccaatgccaacagggaacacaacaaaaacagaagcaacaacaagttcaagcagtacagcaacaagcgcagcagcagcagcagaaacatcgattttggcacagaatgttgagaaagaagcgcggagcggacgacgaaataaacatttgaaaataaaattaaaaaagtggcaaattgcctgtttttcgtgtataaatttgctttcgtaatgagttttatatgtatgtatgttatcaatttgctctattgattaaaccaataaattcggttcggaaaataggcactaaaaactttcgtaaaaaataattaataataaaaataataattaacaatattaccaataaagatttcctcccttcctcaattcttatcatttctgaacatataaaagcaaaaaaaaaaaaatagaatttacaaattattaaaaagacaaattataattaatttttaataaaaaatttttaaattaaaaaattgacattttcttcatttatttctctttctgaagtgaagcaatgcgccaaatgttcgcagaaaatttcccatttatatacatattcagggaaccagtattttttctatggacaaatttggtgaaaaatgatcacacgatcactattgtatggccaatggtgtcaatggtcaatgaccggaaatttttatgagacaataaatatttaaaaaatgtacacctcaggagacaggaaattgtaaataaatgaacatatttatctaaacaaatttcgcctatttaaaaagtggctgatcaattgaatattcacagccattttttgtcatttctgatcacaaaatgcggagaaatctaagcctagacaaaaaactatttagcatggggcagttcaagttttctttattcttttaaaaaatttagaaaaaaaaaattgattttcaaacttctattagttttatttttttaaatttatgcccttttgaaatttatccataaaatttttccacataatttctatttgaaatatttcacgttattatatctcaattgctcaaatgtaaaaatattttaataaaacaaaaacttttactattatttaaccaattaaaacacattaagaaatgccatcaaacaaatcccatgttaatgatatttccctgccgattctcttcgcgctttgttgcttgaccatcttggtgccgtctacgactttggattgctgttgcgattgttgttgcggttgcggtggtggtggcggaggtagcgtgggcaacagtgcccataatattgcaactgcgacagcactcgccaccgcgttgaacggctccttggttacattcccgggcacgagcagttcagttgcctcattattccattacaaaattatttgctcgttatttttat

SEQ ID NO: 3100 - DNA, 1099 bp, Heterodera glycines
  unsure (1)..(1099): unsure at all n locations
taataggccccaaatgtcggagggagggatcggataatttgcccaaatctcgggggtggggtcggataataggcccaaaaatcgggggtatgttcggatgggtcggataataggcccaaaaatttcgggtggctcgggatcgggaggtaaccttaaataatttatgcttcatttatctcgaaacttccaataggctccacctcttctggcggtggatgttgctgcgactgttgctgttgcggtggtaacaacaacaacaataacaataatagcgatgccgcaactttggctgcacttgccgccctttcctcgtcgtcatcgtccggcgcgccaagcacaatgtcttccggcggtgttccgggaattcgtgtcgtgcaaatgccgggccgacgccgtcgtcgacgacaaattgcctccgttcagacactgattgcccgtgcaacacgttcaactccaagcaaaccagtggtaccaagcatggtaaaagtttgacttgtgtaattttgcataaacaaaataaaaaatgctaattttaaatatgaaaaaacttttaataataacaattaattggtgaattttattaggtatatgcatataaactcatgaaattttaaaaaggtgattttcttattcagttaatggttgtcagaatgacttaaaatcatgcagaaaaaaaccttggcaaattaggactgccagtagcaaaatttccaaattaattcagtcattctgataaataattaaataactgaaaaagaaaatcattttttcaaaatttctaagttttatttacatataatttccagcctagaataataatctgtttaaataccccaaaaagcacaaccgaacacatgcccaaattcttgtttaagatgttgagaaaggcgcgaaggatggacgttggaaaaaaacattaaatagaattgaaatgaacaaaatgccaaaattagcaaatctgttgttaatgccgtaatttttgaattgaataagaaaatccgcctgtttataaaactggactgtcctgtaaaaaaccatgactgtttgtaaaaaatctagtgtgaatcaaatagtttgacaaanagttttcccgactata

SEQ ID NO: 3101 - DNA, 3140 bp, Heterodera glycines
  unsure (1)..(3140): unsure at all n locations
gggaaaagatgagagagtaagagaaagagagtgtctcaacagggaggaacagagtcgagaaaagacaaagagtagaggagagagatagagaggaacaagagagacgcataaaaaagatggtggagagagagagagagcaatggaaatcagatagatttttttccctttcactttgcactttcttcaatctcctccagtgtttgtcctcgcaatggcaattggattagcccgggggattacatctccggagtggggggggaggagggattagctatggaaatgtatctgaaaatgggagcatcggatggacgagaaggccggccaattccaaccaagccatccacttcaatccacttcagatgaagcaaagaattgcctttcgttcgcctaatggcatcgcaaagtcgataaatcaatacaataaaaattcactttgtttattttttttccatttttctattggcataatatttgaaactctccattaattcatatatagatggtaataatcttttttcgttaaaatgagaaaatcgaaaatatgaattttcgacttcttgtttgaattcgggcaagcggttcgaaattgggtgaaatggatgttatattcgagttacagcggccccgaaaacctattaatatttttttacgacttgttacatttttgaaaaaaatttcaaaaagttgtgctaccatcggaactagggttcagccccgaccccgagccccccgacccgacccgagacgtttttgggacctattccccgacccgacccccgacatgtcgtcccccgaggtccccggcccccgacattttccccccgaccccccgacactaattcgggggaattgggactccgaacgttgatatatttaaaaattaatgcatcgatattgtaaactttacctaacactaagccaaaataaatgcttttattactcttttagaaaaattaataatatagctttacctatttaactttgcacatattcacaattttcaatgaaatttaatagattttcacccaattgattattaatggcttcaaaagcatctgatatttggaattttttcattaaaatttcttcagaagttgctaagtgccggctttgtgaaaaccaattagcatgtaagcaatcgtgcaccaaaggattgtgggggcattttaaggcaaaacacgctaaagaattcgaaagctatttgcaaaaagccgatccatcaacggtagtaatacaatatttcttttattgaatataaaaaatttcagaaaaaccaaggcattaccaaaatttttggcaaagaagacccacaaaaaaaggcggatgaacaaattgcaaggctgataataagaatgaattgctcttttttgtttgttgaggcaccggaattacagaatttgttctctttagcctatccgaaactccaagtaataattttcacccatttttactagtgaaataattttttaagcttcgcagcaacgattattttcggaggaatttaattcccaaaatggcagatgaaattcaacaaaaaattgttgagcgaattggtcaagacttttttgctgtgacctctgatggatggtcgcaaattacaaaattacccgcactcttaaagttctctattccttttcatagtttataaaaacagactttagtgttactgtacaccatataaacaacaatttgtacgcgccgatcttgtacttgatgtaatcccaatgacaaatcacacaggagttgacatagcggaagaaattggaaatacacttcggacaaatggattaaacccagaaaaagttatttgtttggttcgcgacaacgcaaaaaacatgataagggccactgatattttgaacatgaataggttttacctaattctggttttttaattactattttttaagctttcaatgtgtgtgccattttcttcatctggttatgggagacgtattgcgactgcctgagttggctggactcattttcaaaattcggtcttgggttaccttttttcgtacaagtaaaggcctgccctgtccttgctaataggtcaaaaatcaataaatatattaattattttataatttaaggctttccggcaatactgtgcgcaaaattttgattgtgaaggccaatttggacgcacttttactggcaccaacgcatgaattagaatcagatgatgaaaatgaagaaaagacgatttttgagttcttaaaattttatttacgtgcatttaaaaagaaaaatttgattttttgttaaaaattttagttgatcactacccgatcggggtccccgacccccgacaattgagctcccccccgacccgacccccgacatgtcgtcccccgaggtccccggcccccgacattttgccccccgagggctcggggctgaaccctagttaaaagcgccgccgcaataattccaagaaaaacatattctaaaattttcagttacataggctaattcgaaaaaagtttaatgatgaaaattacaaaaaaaagagaaaaaaaaagcattttttaatgtaattgatgaaattttgtgggttttcccatagtaacttgtgaaaatttaaatttttaccaacccggactcccgggcccggcaaagtgccgaaagactctggcaaaatgacaaatcattctgacaaagtgccgaaagactctggcaaaatgacaaatcattctgacaaagtgccgaaagactctggcaaaatgacaaatcattctgacaaagtgccgaaagactctggcaaaatgacaaatcattctgacaaagtgccgaaagactctggcaaaatgcctgccgaaatcggcggcgagagagaatatttgttgctcgaaaaatatggacaaaagattctaggcaaaacaatcaaacacagtgaacaattgagaaaggtcattgaatggatttacaaaaaacagtgtctattggagccagttttcgataaaatttcaaaggtcaatttcaaaaatttcgtattttgggacaggcggtgccgaaagaagccggggaatttatgaaatttaataggatttttgttaatagaatacgttctaaaattgcgaatttttggtcttaaattaatttcttaggaaaattaagcccaactgntatcataagtt

SEQ ID NO: 3102 - DNA, 1664 bp, Heterodera glycines
aaaaaattttgaatttaaaaatttatatatgcaattttgattttttttttttttaattttttttatgctcaaattaaaatacttttttttgtatttttgcatcaaaattttttttcaaaagttcttataaaaagttaaaatttctcgattttcaagagtgtattttttcatttttattgcatttttcttatgaaaatttgccaatgaccgaaatatgctttaaaaacgaaaaaatgctttatagccctaatcataaggtacagcggggaaaattttttttattgaaaattattttctaacgaatctcttcaaaattaaaatgagtattgggggttttcgagggcgctaatcacgaatccgaactgggatttgcccaattccgaatcccggacccgaataaaaatgaaatatttttccagggatgaatttttctgaggtaaaagctttgaatttatttaacaactatttattttggtgtaaaaccagtgttcccaactctgcttatttgtaagcattttgctgatttctaggggtcaaagatgatttttttttgttagattctgatttgctgctttttgagaaaatttgctgatttttggaaaaaaatcagcaaaaatatctgtttttatgtaaaattgctaccaaattaccaaattttcaaatttagggcgatatgttgatttttttgtgtgtgactttttattccctagaaattttatggcttcattgttattaactaattagtttctcgattttaagtacatttatgactgtaatgcgcaaaattttcaaaatttgctgatttatgctgatttttggaacaaatctcaaaatggctatttttaggctatcggtccaccggtccctaaaattccactgaaattttcaaaatttgactaataaattcccaattttcagtgaaaatctgtttaaaaaggttcaacatttccaattttttccacggcggcgcctatcggcaccgccggaaccacgccccatgtttccaaaaggtttttttggataaatcgcgccgcaaaaacctttttattaagttttatggaataaaatttaccaaaatgctgatttcaaagcatcaaaatttatgccttttttgtggtgaagcaattaaatcggtaaaattactaattaaaaataattaagaaaaaaataataattaggtggaatttgttagatccatcgtcaacacaaaaagcagcacaaacacgagtcaatgagttgacaaggattaacgaaattcgacagccacaattattccaaaaaaaataataaataaatgaaataaaaatgattgcagaattttattaaaaattaaattcgcttgttttttacaaaatatttctaattcgtgcaatatgccttaaacaaattcaatttttcatggaaaagtcttgttaatgaattaattaatcacttcccaataattaaaataacaataaaatctttttgtttttaatattaaagcaaaaaaaaaaagaataaaaatccttctcattattaatcactcaaatattgcataaattatggaaaatgtataaaaataaataagcaataaatttggccaaatttttatttttttaaatcaaaccaagttataaaaaacgggaatagcacaattttggtattgtaatttcctttaatctctc

SEQ ID NO: 3103 - DNA, 1651 bp, Heterodera glycines
ttaataagattattataaatgatttgtaaataattcttcaatttaaataattaaattttttgtcatttcattcacttttattaacataaaaatcaattaattggagaaataattcggcgaaattatacaaataaaaaacataaattaaataaaaaaaaattttattttttcatgaaaataaatttattataatttatttcttcataattcgctcaatcaaagaaaattcttcagcagcataacgtctcgaactgtgcatccgcagactgcagcaggtgcctgcctcatcagtcgccggaatgggcatttttggagtgaaaagctgaaaaattataatttttatcaaacaataaatttatttttttttttctggggagtgtaagggaagcgtggtgagccaaagtgacaaaagtatcaatgttcataataattaaatttaataattattttaatttaatttgctaaataattaatcataaattagcttaaacttagtctaatttaccaatcttggtattaaaatgttgctttacgtaccctctactacttatataattttagaaataagtaaaaatttacaaaaagttgtaagcaaaaaactcgaaaaattagacttcaacccctacttttttttgaaattcactaaaatttttcgaaatttaactgaataatagagaaatctttgtgctatcttttcttatcaagtgcgatgttaagcattgtgggtgtttttcgatagctctatgtgtttattattaatttgtaaaatttcaaaatttttcgttaagctttaaaaaagttatggccagaaggaactcaaaaacccagtaattcgaactttttttgctcagatttttttgtgcataaataaaaatttttgaaaatttgcaggctaatagcatttttcgaatgctttcgaataataccaagaatgtttaatttggttgagaaagaaaaaagttatggtcgaaaaattcgttcgacgacgtttcggctgacgacgttttgtcctactccgaccagaaagacccaaatatatagaaaatatgtattataatataaatataacccgaaaaaaagtaaatataaaaaaaattctccgcttttatatatttttttcccttagaacagaaaaaaagtacataaaaatttcaatcataattataattcatgccatgagaatattgaactttttttcaaaaaaatttatcgagttttaaaaaaaatatagacaaaattaatgagtctaacaataagtctttcggatgtttttgtttacaactttttgtaaatttttgttagatttttaagttataattagggcatccaaaaatatggatataaaatcgcaaaatatggccataaatggcaaaaatatggacataaatttttccaattttaggtgtaaatttttcaaaatcttcaaattcactaaatgtaaagtaaaactttcataaatggttaaatagcattaaaaatcactttagaagaaaaaacacacgataaagctaaaatttactcattttaacaaaaaattaacccgaatatcaaatatttcgttttttcttttttttcatatttttgacataaattaaccattttttgagaaatttaaatttattcagtattttcgagaaaatttgataaaaat

SEQ ID NO: 3104 - DNA, 3510 bp, Heterodera glycines
tcaattggggttcgattttgaaaaccattattttaagtctcaaagaatgtgcattttgaatataattataccatttttctatattttactattttttacagggagtggacgaagtgttcgaaaaatggttgcccgaactggtcgaaattgtcaaaaaacagccggtaattcaacaatttgcaattttacgcccatttttctcatcagattaggcctcgaatcgggatgaaaatgttcgaattttggaaatgcaaaaatttttggtggaatttgcgccctcaaatttggccaactcaagccaataccatccaatttcggtggttgccaatgaccgactcactgaccaagcgcatttccaagacacgcgtctcatcactttggcaacacgtccatttgagtccgagctaaggttcatttttcacatttttgagtagggaggggttcggtatattgtttttaagaaatactgtttttttttgaaaatttcaagcgaactgaaaaatcctttttaataaaaaaatgggtggtttttttgaagacagtgtcgattttgataacaaattcgttaaaatgtgcaaatttttctcctcggcgctttttgccaacgcctaatgccaaaagccgttaattttcaaaatttggctcaaaatacaaaaaaaaacggtctttttttggcaaaaattgcttaaaaatgccattttcaatgtatttcctcttacaatttcggctattctcccggcgatgttctgatggtgctgccagaaaaccttccccaatccgtccgaattgccaccgatgcgttggaccaatgccggcaccgtttggatgagccctttcacatttgtcgtacgagcccaaatgtgccattgcgtccccaattttcacgctttttctgtaagtttttttttgagggtttctgcctcaaaaattttctcatagacttttttttttcaaaacccactcgtgtgcagataattgcgccccggacattattttttttaacaaataatctctgggggcacttggagtatattttgaatttttctaaatctttttcctttttcgctttgtttaagggtaccaatcccaacccaaaattgttcaaacccgttgaatttgcttaaaaattcccattttttagcttcggatgttccgctgactctccgcgactgtctctgcttttattttgacctccaatcggtgccaaaacgttcctttttgcgcgcgttggccaaatgttcgccctcagaaatggagagggaccgtctcatggagctgtgctcggcggagggaattgtaagggacagaaaaaacgggagcagctcgtccccccgtataatttctcccgaaatcgttttaaatttctaacaatattagaattttaaaaaaaattcggatcggccaacgcagttcattgtcagctagaaaaataaataaaaattttttccctaacaaattgctattattgtaaaaccgtatgaataatttggactaagctttgggtcatcacaaaaaaattcactttttacgcttcaattcaacgcgaatcaaatcgtattgttggctaaagaatccgtgaaatttctattttttgaaattcgtagctaaagaacccataaaaattgctacaacttttctcaaaattttttgtttcaaaaagattgtttcggtccatttttaggacgatttccttgactattgccagcatccgcggcggacattggccgaacttttgcgcgactttccgaacactgcttctcgcctgggcccgtccgaactgttcgactttttccccgtcattcggccccgtgcctttagcattgcctcgtcgccgacggcacatccgggccaaattcaaattttggtcgcacgagttgaatatgctgtcaagaaaatggcctccttgaggtacttttggttgggtggagttgggcgggggaaatttcatttttcgaaaacatttgaaaatttttggcgctatttgctaaaaattttaattgtaagattttgtctagtcatggaaaattgttcccattggttttcgagattactgaccacgaatctgacatccttttcaaccaattccgacttcctaacctaatttgtaaaaaaatcgaaaaacatgaattttcgacgttttgttcgggttagggattaggagaattagtcaaattaggtgtctgattagtgatcagggacccaaaaacttttgggtttgatccaaaaatccacaaaattgccaaaagactgcctaacgaatgcccctgtaaaattccaaaaaaaaaaaaattcggatcggccaacgcagttcattgtcagctagaaaaaaaatataaatttttcatgtgtgcactacgtttgcatcttcctcttttctctctctctctctctctaatctttctctttccttctctgtttctctctatcaccacttttctattccttttctgacatttccttccttttctttatcattctcgcctttagttctctttcttttttatcgtctctcccgacttatctcacactctctctccccttcactcttcctccatctccctctcttctctcatctttcgctgtctttgtctctcgccgaccgctctctctctctctctctgtctccctcgcttctcgctctctctcgattttctctctattgtcactctcatcttttctcaatatctcttatttctttctgtctccttctcttcctttatctctctttctctctcaatctaactatgttttaattttctttctctcttttctctcggtcaacctctttctttttgtctcactctcttcctccatctccctctcctttaatattaatttaataaatgatttaggagcagcggaggacgcaaacaagaagaaaaaacgaattaagcgcaaaaagcttactcttggagccatcatgaaaaaaacgggggaattggtcgcacccgctgcaattttcggagcggttgatgtggcaataggaggacgaggagcccctgctcttccgacgccccctcttccgcccccgccccctcctcctccgcctcccccgtccgcgatcgcgcaatccgacctgatgtactacggtggcattggctactcggtttcaattgccctgacttcttcaacaagtggcgcaaaaaggcaaaaattttcatataatctttaataaatttcaaataaatttttatagtttcccagtggcaccgtcagcctctttcattttttgagggcagcttttgtgaaataaaatgccgaaattcgccttcttgaaaatttccatatataataatcttttaaattgaattcactttttttaatgcgttttttataaccgaaaaagagtaaataaaattatttcggtaaattattattatattttcaaataaaaataattgtttcgggtcagatgcattttagtaaaggaaaaatgagagtcactgtaaggttgaagaaaatacagtatgccactaatgattaagtgaattcaatttaaaagattattat

SEQ ID NO: 3105 - DNA, 5484 bp, Heterodera glycines
agttaatgcattgccagaaaaaattaagtacggaatccctcttttagaacaaatgtcccaacattggcatagaactccaatactacattcaaatatcttttcattaatttctcattttgtttaatttcttttatttaatatattagtttatttattaaattaatttattcatttgcttttttatcttttgttttcatcagtggaatttccacagttttccaatttatcatcatcaccatttttccactgctatcaaaaaagcatcaggcaaaaatcggctctgattttgctgatgaatctttcaccattatatgcataaatggtgcaaaaaaatatgttaattcaataccaattatcgaaaatagcaaatgataaaaaaaataataaataaatggaaaattaaaaatgctgaatatacaaaaaatgatgtttttaattcattttagtctcggcctcgagcgcaaattcacacaattcaatcatattctctagctaatccattgactcattgttcaacaattttgtttcatttgtgccccaaaataattctgtatacgcacattgtaaaatttctgttaattaaaatattatggtaattaaaactgtattcatccaccaacttatccacacaattcatccatacccaattaatccatatcaattaatctaattaattcatttataccacttcatccatgccatcataaccgcacatttcggttttcgcgtcatggcatttcttttgcatggatgaattgggtatggaggatgagttaggtttgcccccacccttttgcttataatcaaattccaagatccccaatttgttgcaaatagtgccaaaatgcgtgtcactgtttttcattaccaattcatcataaatttgtcatttttagccaatttatttgcctgcacataattattaaacaaacactgttgatattgccgaaaataaaggcaaaaattttcatataatctttaataaatttcaaataaatttttatagtttcccagtggcaccgtcagcctctttcattttttgagggcagcttttgtgaaataaaatgccgaaattcgccttcttgaaaatttccatatataataatcttttaaattgaattcacttaatcattagtggcatactgtattttcttcaaccttacagtgactctcatttttcctttactaaaatgcatctgacccgaaacaattatttttatttgaaaatataataataatttaccgaaataattttatttactctttttcggttataaaaaacgcattaaaaaattcattcgttttcgatcgtcgctaagtaccaactgccatcgactcttttttttgcactgctttcacgggatcggtggaaatttttacataacgtgtcacagtaccacccaccgcccattccgcccgcccatggggtggtggttggggacgagtgggatgtacgcggtacccgcccattggccgcactgcttttgccgcagggaccgcccatttgggcgctgccggacatcgcatttaagcgctgtacgatcagcgaaaaatcagtctgttccaaatttcctctacaattaaaatttttagcaaatagcgccaaaaattttcaaatgttttcgaaaaatgaaatttcccccgcccatagaattgactcttgattctgaaagcaccaatgtataaagcaattattaacttttgaggcattttattgactttgacctcgattttattttcatataaatttttcgttattgtttatttttaacctgtgatctcacttgatattttttcacttactctgtgactattttactgtgatcagtcatcagagtaagtggttcccgcccttctgatggcaattttttctttatcgaaaaaaaataaataaataaacattgcttttgccatcttttcctcggcttcttttcggttgtctgacattttgttgagagtaaattattaaggacagtttttgaagatttaaattagccttagtaaaactgaaaaaactttctggatttttcatagacaaggtaataaaaaaatttaaaatttgcttatttgtgtttttcttcaaaaacattaagaaagacactaattagtagggacggatttgtagggatttccatatttttttagcacacttatttcggaataaaaaccacgtaaatagtatttttagcttggtttgatgcttctagaatgcatttttatttccatatttttccattttcaggtttttgtccatatttccatatttacttccatattttggcattttcactaaaaattccaaaaatacaaccctagatggaaaatttttggaaaatacgcttctaaaatcgaattggaaaaatatcaaaaattatgtaaaaaaattttcatcagcaaaattcgtgtaaaaatgcatttttgaaatttactaatttttgctttttttctaagtaaattcaatttttttagtatagaataaatagaatgcctcaattatcaaattctataattcatgttaaaatgatttttttctttcttgacaaaaaaatttatgggtttatgaattttttcaaaaaaattccaaccaattttcagaaaattttggtccatattttcgtattttttgtccatattttgcatttttttcgtccatattataatccatattttggctttttttgtcaatggtccctactaattaggtatgtatctaattaaaagttggttctcggtgacggtgatttagtcgtcagtgaatgatctcgtaatttaaatttttctgttcccatgtctgcctttttgaaatgcagagacgcatattttgagtgtctctctccattctctccaatacaaacaatggaacagagaaaacaaattgtgaaaatagtgtgtggaaagacaatttctgccgttcaaaataatttcgccaaaagtgggacaccaaacttaacaaaaaaaactacttgaaaaataatttataaagccaatcgctaatgattattttgtacggctctgaatcgggcactgcccaagattttgccgaacaaacttggcaaaccttccacaggaatggcacaaaaattgtggccaaatgcatgccatttgacgattttcaaattgcggtgggtttaatttatacaaattcctaatttaatgccattttacagcaattatccgatgaaaaaatgaccatttttatcgtttctacgagtggacaaggcgaagtgccgacgaatatgcgcaaaaattggcgctatttgctgtcacgcaaattaagcgctcaatggctttcaaatgtaattgatgtcacctttttgataattggattaaggggattttcacatatatttgtgaataagaagggccgaaacgaagggcgggattggggttactttttgggttcgaaatccggggttttttaatgaaaattccggcaaaatactgaaaagtttggtgtaaatccgctatgaaatcgggtgcaaatttcgaagttttcccggcgtccgcctatagttcacctccgcaaaaactcaccactatagaaatttgaagatgtgttgaatttcgtccgatttcttatacatgaaattattaaaaacaaaaaattcgttatttataacattttatgctcttcccctcctgaaacaaaacaaaaaatatttttgatttaatttgccataaaattaaaatgccgttttttagttgcattttgccgtgctcgcgctgggcgacagttcctatcagaagtacaattttgctggcaaaaaattgtacaggcgtttgttacaacttggcgcaaaaccggtcatggagttggtattggcagatgaacagcacacacttgttagttttgccttgattttgagaaattgttcgaaaatttattttttcgggatttttcaattgggttcgattttgaaaaccattattttaagtctcaaagaatgtgcattttgaatataattataccatttttctatattttactattttttacagggagtggacgaagtgttcgaaaaatggttgcccgaactggtcgaaattgtcaaaaaacagccggtaattcaacaatttgcaattttacgcccatttttctcatcagattaggcctcgaatcgggatgaaaatgttcgaattttggaaatgcaaaaatttttggtggaatttgcgccctcaaatttggccaactcaagccaataccatccaatttcggtggttgccaatgaccgactcactgaccaagcgcatttccaagacacgcgtctcatcactttggcaacacgtccatttgagtccgagctaaggttcatttttcacatttttgagtagggaggggctcggtatattgtttttaagaaatactgggttttttgaaaatttcaagcgaactgaaaaatcctttttaataaaaaaatgggtggtttttttgaagacagtgtcgattttgataacaaattcgttaaaatgtgcaaatttttctcctcggcgctttttgccaacgcctaatgccaaaagccgttaattttcaaaatttggctcaaaatgcaaaaaaaaacggtctttttttggcaaaaattgcttaaaaatgccattttcaatgtatttcctcttacaatttcggctattctcccggcgatgttctgatggtgctgccagaaaaccttccccaatccgtccgaattgccaccgatgcgttggaccaatgccggcaccgtttggatgagccctttcacatttgtcgtacgagcccaaatgtgccattgcgtccccaattttcacgctttttctgtaagtttttttttgagggtttctgcctcaaaaattttctcatagacttttttttttcaaaacccactcgtgtgcagataattgcgccccggacattattttttttaacaaataatctctgggggcacttggagtatattttgaatttttctaaatctttttcctttttcgctttgtcaaatggccttaaccttttggccccgattttgtcgaccatttgtccgttgtcggccatttgtcggttggcgaccatttttcggttgtcgtccatttgcccccaccccatttttatcgataatttttcccctcatcttaaccatttgtccctccttaaattaaataatttttaaatgtgccagcttcttggagaaccgaacatttgtccacaatctggaagacaaaccattaggccaccgtaacataagagattttatgattagtttgttaattctggtgaagctttaacaatccaatatgcattggaaatcataatcactttataaacatgtaatttagcaacataagtttgggtatttaacgatcgtagtataattacgagctaaaaattttaaacactccatcaagttgttcacgacaaaaaggacaggtaccttcgatttctaccacttcagcgcatcggttacaaagcgcaaaaagaccacaaggaatataaacataattgcgctaaagtag

SEQ ID NO: 3106 - DNA, 2090 bp, Heterodera glycines
  unsure (1)..(2090): unsure at all n locations
tgattagacagtgagtgattttgacagtnaactatttagcttttttcattgtctacgcgtaattttgacaatgaatgaatttgacaaataatgatttggacagtatcaaattgtgatttcgacagtaccgataagtttttttttaagacgaatatattaaaaagtgtatcgaaaaataaaggtgaatgaccacgcccaaaaaaatattgtaaatcaaagaattacggttttcaaaatcttcgacgaggacttgcaaattattatctaggcgaaagtttttacaattagcaatattcttgtggccgaaagtacggtgttcgttaaggttccaaaaagttacggcaaaaatttttcgaaatctgattttttgtattcttcgggccataattttttcgaaccttaacgagatttttcgaaattttgcaggctaatagagaacacttagggctttcaaatgataccaacaatgttaggtttggttggcaaagaaaaaagtatagtccaaaaactgggctggcgcccaaacgagcggcgcccaaacgaggtggacccatttaagaaacacgccagcacggtttgcaagttttacatctggggcctattcaaattagcatcgtatcaacgatgcgatgatacgatgatcatatgcgtgttcaaattaaagactttcgccatatgatgagctgtcgtttgcagctcatcatacgctgaactttgaaaaaattctacccaaaaagataacttaattcttggacgaagattatatttgattgtctgtcaatcttcatatactttcatattcatttaattttttaaaatttatcggtactgtcgaaaatcaatcattgtcgaattcaaataaatttttgataactgtcgaaatcgctcgttgtcgaaatgctcctgtcaaccacgatgccctctctaacttcaaatgggctcccggacaatccgtccagtggacaatccgtcagtggtcaatccgtcagtaatggacaatccgtcagtggataatccgtcagtggtcaatccgttggacaatccgtcagtggataatccgtcagtggataattccataagcaaatttatttttaaaacacccggattaattaaaatcgtgtgaaaaataatttattttgctaaaaatatgaattaatagttctgttattttataaaattataaaataatcatttttaaaagaattaaatgataatttctcgaaaaagtaaattaattaaagtataaaacaactagaaatgttaggaatttcataaaaaattatatttattaaatttaacaataatttttgcaaatttttgatctttgctcaaaaaaaatttgctgatgaattgcccaactgacggattgtccattactgacggaaaaaatttaattaaatttcaaaaatattatggacaaaaaacttaaaaaaaaatcggttttccgaatgcgcccaactgttggcgcccaatcgacccccaccgcggaattggccgaaatggatgccggattcatgatcaacgaccccaaaacccctgtaaacttgtttttatgacaaaaaaaaattagtattcagtgacccagcaaaccttaaaatactcatttttcaagttttgataagatttaaattttcgatatttcgtggttttttactcttatggacttttcgtggcttggacattttgttggtaatttattcctcattattatttcttataaataacaatagttgatccgagttgtaattttagccttagacaaagggccacagtggcaaaaaaccttgacccaaaatgattgggctaaaacggtaaggtttaaacaataattaaagttgccattggcccattaatggcggtccgttagtgtcttttgaattttgcttatgcatttgaagttccattgcaatgcaattcaattttttaatttctcagttgttttaaaatggtcttttattctatttataaattcagattattttgcctgcagcaaaatggggtattgcgctccatgccgtcgtgtttctggcgttgatggttcaccagcgacctttcgctgttgaagtgctcagtacattgcacgttattgc

SEQ ID NO: 3107 - DNA, 1183 bp, Heterodera glycines
ataatgagtactgatcggaaagaggaaataaaaaacccacaaaagttggcccttaattcggtagtaaattcttattatttaactcgttttgggcttaatattaaaaaacaagttaaaacgcaattaataataattttatttttaaaacttgaactaataaaaaatcaaaataaattttcaaaagttaattagcattaaaaggatttctatttttatcataaatctttcggaccgggacagtatagtccgttataatcagggggtggtttagtctggcaagctgttttcgccatcttacaaatatttttttgtcagtcataaacaaagaaaaaaactttaaaacatatacgttaagctgcagacaggctaaaccgcaaaggtgaaaaaaaacatttaatttcacaaaatatctctgccgtctgttggctcaatgttttcgatttgtttccacgttcagctttgcttatcattacgctgatcagccgccaatttgactatttcgttgacgaacacttcaaaacgcgcaaaaggacattggacaaaatgtaaattcgacgcaaaataggaaagaatggcgccaatgaaatcgaatttttattcgtctttttcttatttttatttcattttttggcattttctctacttgttctcctgctgttttctttatctcgatgctgcttccccttggccgagaagtgatcactgatcataaacagcaaaaaatgaattgtttggttgattcactgtcgaaatccctcctcagaaaacgtgcaaatatcatgctggcgatgcgttaattcttcgactcttaccgcgttacaatgccatcaacaataaaccggctcaacaaaaagactacaataccaatgtgtgttaatcccgagaacatcatcaattttctctttgttatttctcgaaattatgaatcccgtaacccggttcttagatggcgtcgatttaactttatttttggatttttaaatgtcactcgtcaagagctgtcgaatgataccaaatttgtacgggtttgatctttttaaaaggtttagagagccccattttgttaattttctgagttttgaacggttaaaaaaccggtttaagttgaagcgagtaaaattttttgattgcttaatcgttttcagcgcataagaaaccctataaaagtggttttgagcaattt

SEQ ID NO: 3108 - DNA, 5293 bp, Heterodera glycines
  unsure (1)..(5293): unsure at all n locations
atattaattatagttttttttgcttacaaattgtccttgtccatcggcgggttgaatttgctgcgccatgtgtgaatncgaatggatcgtaaataactgtattcactaatttactgttaatacacgagtttttcggataaaaaggagaaacggagaaaccgtgactcaatcgtatatatcaatgcaaatgataaaaatgctgttaagtatgcggtgaacctctcggaacaaaaacaaagaaaacatagtcaacacaacatgaatacgactatgatgaggctgctcggttatggggccgaaaactgaggtaatagttaagctggcccgcgcctgtccccacatttctgtaaaaaatccaactttaaaatcatccaaaaaatgtgttttaatattttaatttttcaatttaaccaaattcactttattgcccaaatttatctaaatgcacgaaatgaaagagaagcaaagattacaactcaattgctaccagccttcaacagttaacctgacaaaacaaccccactctaacggcagcagcgtccgacggacacaaaaggcgttcaaaaacgcagccgcaatagacaaagggcagcagattttgaattcgagaggcgaacaagactaatgaatggccatttcgtgcatttggatcaattttgggccataaatgtgatttttggttaaaaaaaaatttttgttgagtttttttgttcaagttcgagtcagggattcgaaatgggggcgtcttattcgtggtcagcgacccagaaaaccccactataaatatgtttttggtgattttaacttttgtaatttttacaaaatggaggcagggaccagcttagctattatcagctttgatacttttatttttgagaaaatcactgcccttgaattcccttaaaacggaatcaaaaaatccattagaatttttcttatggataagtcattttcatatacatatactccgttgtaaaattatgtataaggcacctcaatttttcgtgagtttgagtacgtttcataaaataattgagctgaaattttaccaatatcattccccttaaatattattaattacagaaaaaaaaattaggtggtttcacataaaagttgtagatagtgccttacaattttgcaacgccaatttgttgccattttcgaaaatagtaaaaaaaacaaacattttttttacatattctacttgctttttatggttacgaaaaattattggaaaggtatgcgtagttaaaatttaagctcgatcagtttactgaaaatcgtcaaactaacgaaaaattgaggtgccttataattttgcaacggagcatatgtttttacttctataagattggaaaagaaaaataaatcgaaatttgttcaaatttgaatgattaggaatcaaaaatatcgtcggttccgttatttccaatggaaatgtaaatttggttccactgtttttaaccaccgcttgaccatccgtcgcattggcattgtcatcaggcggaaattcggggaaaatgtcgctaataatattgaaaaaacggagagatggacactcgttgagaatacggggccaattgacgcattcggcgaaaatgaaggtattcaaagacatgtgccgaatggaatcgccgaacattggccaaatggtggacacgaagaactccgaaatgcgaacattttcattcttaatgcgcaaatatgtatatgttgtaattgaagtgaaaaagcggtgaaaatggctgagaaaagtgatgacattgcggtcgaagtaactaaaataggaaaaagtgatcaaaaaaaaatttcaatgtgtctccattcttacgtgatcaaaatttctttgaatccgatgactttgttgggcacacggattttgtgggattggcaaacgcttccaattgacattgacaatttccatttcattggtgccattccatcgttgcgattccaaggccaagctgagaaggcggaagtaaggcgaacacttcgagccaacaataggcggagatgaagctgaaaaggaatttccgattttattaattttattatttatttattttttacatttcttttttgtttaggcgtcgtcgttttttgacgtggtcccaaaagaaccaaagaatggtgccacagccgaccaacagaagagacacaacgtaccaactgaaaatgaatttggggaaatgaatgaataataaaaaggcaaagaaaaggccaaagtcaggaaagtccaaatgagaaaattttttaaatttcattttgaggttttagtggggctgacctatggggtaatttttctcaaatgattttttgaacttttttaaaagattttatagagtagtgatacgatgtaaaaaggaaaacgtacggaattctcgaagacattacggcaacaaaatgaacggagggaaaattataagcgaataaatgaaaggggaggaggaggaaaaagaccttttataggcaaaatgagattcattcaatcagtaattgctcctcctgacagtaggggtcagttccgtctcgccagttccgtcttagtactcaaagggccggttccgtctcaaatatttttggactcaaattttttaaaatcaataactagggctgcgatttataagaaaaatcgtaaaatatgtaaataaatatgtattaaaatatgccgaaatatgtacgaaatatttacaaaaaccttaaaatatgtactaaaatatgtaaaaaaaaattttttaatggttattttttggaaaaaaattcttcgtaaaaagtgaaataggcacaaaatgctataaaaatgaccaaaatgaatcactttttagtattttaaattaatttttgatagttaattttttgaaaaacattcgattttttagggatacattttcaaaaaattttttttaatttttcacaaaaaacttctataaaaattctcaaaaatcctcaaaatatgtaaaaaaaatgaaaatatgcacgaaaaattgcgaaatatgtacgaaaaagtccaaaatatgtataaaaatatgtacatatgtaatatgtagaaaaatcccaaaatatgtaaaaatatgtaaataaaagtcccaacttttgttcgcaaacacaaaaaagaaagtgtttttcctactaattagagcatggagaatccaggaaaaaaatatgtatttacatataaatcgcagccctatcaataactaatttagaaaaaaaagtaaaaattcttttacttcgcagcctaccgcaccaaatataaagattaatttacataaatttcgtctaattttcaaaaatacacccctgagaaatgaaaaatttcctcaaaaattttgttattttatacccctaaattgaaactttaacacctattttgaggtttttagaaccgaaaacctaaatattttggcagtttttagtttttaacacccaaaaatattaggcatattaaatatcagggctgccaaaaacatgcaaatgtatttttttcctgccttttccatgctataaataataggaaaaacacgttctttttttgtgtttgcgtagaaaaatcggtatttttatttgcatatttcgagacttttgtgcatatgcatattttggctacttgtcgtgcatatttttggcagcactgttaattatatctcaactttctgttcacattctgaaatttaaaaaaatttgggtccaaaaatatttgagacggaaccggctcttttactactaagacggaactggcgagacggaactggccagacggaaccggccagacggaactggcccgagacggaactggccccagacggaactggcgagacggaactggccagacggaactgacccgcttcgtgctgagaaccactaattttttgctttcatttttaaccaaacaaattacaaatttttgaataaaaaacaatttttttttggattcctgagagggttttttagcacctaaaaatcgcatccctagtaataatactatcgatggtgccccccacctttttggaagaaaatttttttgttctaaaaagtcgaaaacatgtttatggggagttttagggtcgctgatcatgaatctgtcattaatttaaccaatttcgaatcccggacccgaattcgaacaaaaagtcgaaattttcaaaattcacttttatcttcgtttgtaccatcggttgtattaccggggttcgaaatgtgtcgagatggatgtcagaatcggactcttatattccagaaaacccccaaaaagtattgaattagaaaaaatagaaaattttttaaatttttttcaaaaaatgggaactaccatctgggtcaatacaaagtcaactcgtacaataggcaactcgtacagaaaaaattctaagaatttttaactaaaacttagaatttttagttaaaaaaaactctaaatagattttctagctagaaaaactttttaaaacacttaaattttcaaaaatttaagaaataaaaaaaatcagctgaaaaatttgtaaaaaactaatgaattttttatgtttttctaggctagaaaatccatttagagttttttttatctaaaaattctaagttttagttgaaaattcttagaattttttttgtgtgcgaggtgccatgactagggatacgatgtttaggttttgacgtatgtttttcctgaactccccgtgacctgaaacgcacgaaaaacatgtttttttgggctgttgttaagctactttgcgagatagttagaccgattttgtaggttgttatttttagtaccgaaaaaaactacaattggcgttttgccgaaaatttgttaacaaaaatgcaataaaaataaaaatgttttaatagctaaattgcaaccatctaatttaaaagcatagttaattttaaattttatgagtttataccgaattagacgggactcttaatatttcgggcccaactaagccgggtattcaggactaagtccaaacagaaacaagtactcgtttaactctatgtttaaacagctgtaaaaattgaccaaataataagattaccaggcttttaattttcaagaaaaataaatttttaagaccgagagttgttaaatttattaaattttaatgatttatataatatttgcatatttattttatttttttgaaatccctccctctggtgcccaaacttcatgtcgcctaaactataaccggataatgaatgactcattattaatgaggctttgaccacaacaattggtagttttcatctgcatgttatattctagacataaaattgtcaattaatttgatta

SEQ ID NO: 3109 - DNA, 2354 bp, Heterodera glycines
ggcgccaaaacgtgggcgccaaaacgtgggcgccaaaacgtcggcgccaaaacgaccttggcgccaaaacgtgggcgccaaaacgtcggcgccaaaacgtgggcgccaaaacgaccccgactccccccgaagcgggtcaactccgtcccgccaactccgtcccgccaactccgtcccgccaactccgtcccaggccaactccgtcccgagccaactccgtcccagccaactccgtcccgccaactccgtcccaagcaaaaattcaagaatttttttaaaaataaatttgagtttaacaaaattttatgaatgggaaacaaaaaatgataaattttggctttattagtaattaagtttttctatttgaatctgacgcttgtacaagaactcgtacgaaaatgttttgtcgtttttaggtggaggcgggattttgtcgtttttggctgaggcgggattttgtcggggcgggattttgtccgcgcgcaaattttgcattttttattttcaaatcccaaaataagcacgtaatgctgaaataagcacaaatcttagaaataagcatattttaggtttctaagatccggcccctcaaaataagcacaaatcttagaaataagcacacttgggagccctgaaaataaaagttgtcattgtttaaaagtttttctttcacaaattaggaacttgcataaatcaaaaactaaatcggtcattgaaatcaagacttatgaattgttcataaactcaaatttattttaaaaaaattcttgaatttttgcttgggacggagttggcgggacggagttggctgggacggagttggctcgggacggagttggcctgggacggagttggcgggacggagttggctgggacggagttggcgggacggagttgacccctaccgcagtcaacgggcgatatgttttaatatgtcaaaacgccaaaatatgtgtttttatgtttaagtcgctctaaatcaaagattgtttgttcgggtaaaatgctattttggggcttctctcgccataactaaggcacaaaaatattttattatataacataaaaacacgatctctatttatgaattatttggatacttaatggtacaatttcgatatttaatcacgaaatttcatcgagcatttgcattaaaaaaactttattaatattttcgcacttacagaggcaacaaataaaagttatttaatgaagaaagagagaattttaacaaaatacaaagttataggaatatgtaatgaatgttgagcagataaattttaataaaaaacaaattatttttctttacaatttaaaaatgaaaaaagaagaaaaaagcttacaacaccttcgattcccaggacgtctccgttccaagtactaagaaggcccaacgttgcttaacttgccagatcggacgggatggcgtgctttcaacgtggtatggtcgtaagcgaaggggacccatttgaaaacaattaaatagtcaattttataatgcattttttttctctttggttaacttaatcaaaacaaggattgttaaaaatttagaattcatttaaataaagtaaaaataaaaaggaaaattcgatagtttttttcaaaatcaaagagcaaaaaattcgggatttttgaaatcttttttaataaatttcccaacagcaaatcggcagagaaattgaaaaatgaaatggtaattttgttattcatcacaaattctctttaaatcatatatgaagccttttcctaggcccaattcaatttttttaattagaaaaaactgcaaaaatcaaaatttcataagaaaattaggtttggtgattttaagaaagttatccaacaaccatttttagtggttaaagtcattcttttgaggtgccaattttattgtattccgctaagaaatccaaaaaccattccggcacaaaatgccaaaaggcaaaatggggatataaaagtcaaactaatggttcaaaaccaaactaaaaacgcattttaaaccttatcgaatgacattcttttaatctgaagatattcggagaaaaaataatggacataaaatggaaaattcaatgattttttaagaaaactgaatttaaaatttagcatgacttttatagctgctctttggaattcaaaaagattttcctgaccctttggataaaacaaattttattttaagaaaaaattttgttcacttttcatcatacattttaacaatttaattatttatttattttttctcactttctgagacaacaaataaatgttattaaatgaagaaaaatagattttatacagaataaaaacatataatgttgagcagataaattcaacaaaaaaattaattc

SEQ ID NO: 3110 - DNA, 4060 bp, Heterodera glycines
tctagagtcggaaatggcgacgttgtctggtgcccatcttcgaaatgaaaaagcaaaaaaataaaaactaacaaataaaattgaaaatgtattcggctaaacgatgcaataacattaaaatcaacaaatatcaacgaattttgatggttatgttaagcacattatatgattatatccattctgtcgatagagatcattttccacccctcccaaattcaaaaattcgtttgttcgtcttccgattccgacaacgaaagtccgtactcgtacaaatcgtcgtgttgagaggtggcctcatcctaaacaccaatttgattttttaacaaaggctaatgtctgtgcccaccatcgcttcggcgttcgtcagctcggcctgtttcgcttccgcttcttcgttctccgctgctgagacgacttcccaccgcacggaaacggactccaaatcggacctaaccaaaaaaaagggacaaaatacaatttattgactatttaaaacaaaaaaaagtccaaaaaaccctctctgtatgacctgagcaaacgcttcaactcccgctccacgtccgcaacatccatgtactttttcttcttgatcttccgaaaccttttcctccgcacatttttcaacggcggacaaatcccatccggccattggaagcgatcggactttgattctgcgccttcttcgacgccttcctttttcgactcatattttggcgcattggcaacaatcatttgacagagatcggcaattttgtagacagttttgttgtccaatgtcttcattatctgaaaataataaaaaacaagattaattagaaatgaacaaatttttatgattttgtccacctcaattacgcagggcaaatcgtacagtgtaaaacgcattgtgtcgtgctcaaactgaatcgttcccgtcctcaaattgttgtcaaagtttatgccgagtcggtcattgctggtctgatggccgtctctctccacaaattggcgtacttttgtagcaatttcgggtggaaatcgcataatgaaatgattttcccattcgtttccatcgtttgagttggacggatttgaaaaaattttcattttcggtttatttttctgcaaatgattttaattttagcaaagaaaaattttatttcatatatttatttttgtctgtttctgttgatgtacataaattaattcatttaatttgtatgtgaggcgaatgggcaacaacaattgctgtgtaaggcatacgccgagcatttccaaaaagaaatcgcaggaaaatcacacggcaagtgaacaaacactccaaaaatcaaatcaattcaaattcgattattgtatcgttaattttgatgatttaaagcccttattcaggaaaacttcctttttccggtttagtccaatcactttttcaatggccgcgattcttccgtcaattttttgccgcacattagtgaacgcgaaatccccgacggttggccttttctctcttttcatatatttgttttcttcagacactgagcaggatccgtccacccatccgtcggtgcgtccgacttttgttgagcgaagcagaagcgaattgaaatgtgcgttttatactttctttcgattctgttgagtgagctttggttgtcactttttttgaaatgcatttcattttgctaagaaatttagaagcatttctaaaaataatgggtttttggtctaaaaattttgttatttgattttaatttgtttcattcagtgcgcgacaatcgccgttcattttacgttttggaccttaacaatttgcatgcgccggtgacgttgaagaaatcgaacagttgttcgaccatttatttggacgattcgaccatttcacagccccatctgaagaacacaatcatttgtgtgtcgttggcagtgttttatcacataatcaacagaaagaatcgcgggaaagaacggctcatggaaatttttgaggaacggttgcatccgataacggtgggcatttgcaacaaaattaactgacaatgagaagtgattatcttaaaattacatctcagaaaatttttcttttaataaaattaaaattttgactctttgggtttctatcattaactgatagaaattgagtcgaaagttgttgaatttgatcctaaaagttatatttgcttccgtttctcataatcattgtgggtaataaacattttaataaggagggcatttttcagaatgaacccgtggcggctgaaaatttcacacgggatcgtaagttattttaacataatcaagcgcatcattgttctgctgattatcttcaacttagctgaacaccgacaaatttaccgcttcatccgcacacttttccacgccgcccaactgaccgcggagtgtgccatcattactctcgtgtacatcgaacggttgctcaattgtaagtgccaacccattggtccctgatgaatgcatttctgaattggagatgccgaaattgacttgtgcccgtccaattggcgtcgcattgtgctcggtgccattatgttagcctcgaaagtgtgggacgaccaggcggtgtggaacgtggactactgccaaattctgcaagacacaaatgtggacgacatgtgattcttcttgcagtttcattgtaatttttcccaccattacttttcaggaacgaactcgaacggcagtttttggagtcgttggagttcaacataaacgtgccaagttccatctacgccaaatattactacgaccttcggaccctcgccatcgccaatgacattcagttgcctttacagcctttgtacaaagaaagagccgcgcggttggaggcactaagccgaaactacgaggacaaagtggcggtgaactcgcagaaaatgaccaaaagtgtttctgcggaacgattgagagaacatcggtcaccggcgataatcccatgaaaaggggacaaagcttttgtaaatgaatgaatggaacgacttaagaaaggggaagcgaacctcacttcggaagtgctctctctctctgctgatcttgcgacaattcccaaaatgtcttatttgtattaatttgccacttaatttgcaattccttttaattaccatagtaatagcgaagtcatcaaacgctttttccaagagattttcataccaatttggacagtcatttcgccttaaatttctaaaataacatttgatttgatttctttgttattattgcacctcctttcttttatattgctttcataaccattaaattttgctttactttgaatcactcttcagtcctatccgatgttttttctcggtttttcttttttagttcggttttcattttctttgctttaacagccattcttttcgcgcaaaatgtgttcgcatgggcacggcggagcagggggagggccctgttcagcagcggtcgaatcatttgagcagcaccaggagggcatgcagtacaccatggagagggtgagcacaaaatgagggcatggaagggaaaacccaagcaaaatcggcattttgagtttatcaacaaagaacgcattgttgtgctgaacgaatcgatcgacggatcgggcaaaaaagtgttcaaaagatgggacgagcgaatggaaaagtgcgtttggccaacagacaaaaataataattcattttccagagaaaattttgtcgagtcggacgttgacgaggaactgctcttttctgtgccattcacaggtgggaaggtgcgttttcacggtcccacaattccctcccctttaggcaatgtcaaattgagcggcctttgcttcagcggtcgaatggatggtccgtcatccctacgattttttccgttttatttcccaccccaggaagttttccggcccgagtacgaattttcaaggatcgcgttaacgtatcattttcaaaccccccctcgctcgcagagggccagcgaggggggggggggtcgcaaattttgaaaattttaactaattcattaaaaaatccaaaaaatttccccggcggcgcctggcggcaccgccggaacccaaaaatcccaatttctcttaaaaagtggcttaaaa

SEQ ID NO: 3111 - DNA, 5517 bp, Heterodera glycines
  unsure (1)..(5517): unsure at all n locations
tgcaggtccaacaaantctgctaagaaaaatattgctatagagaaacgcctcccatggtatttttgttgctttatccgaaataaattaataataaacatttgttgtcacacctgaattcacacaaaaattacaaaaatgataaggtaaggctgataacaaaattaggaaagtcggggttaattaaatgcaaaacatcctccgtgtgcacgttcaaattgccttcgaaagcccaaccaaaactgcccctataattaagttttatgcgcccaatcaaataaaaattcaatgaaaaactattggaaactagcatgtttacacattcaagtattgaaaaccattatgttcccagaagagaaaaatttaaaaaataaaaaaaaatttatgtttgaatttcgacttaaaggaattttcaatatttactgttttcattcgtgttcagtaaatgttttaccgaatacagtgatgagcatagctgatgccagcagtttcaagtccctcttgtccacttccttgaagtaaagaacactccaaacggacgcgatcactccgggcgccatcgaattgatgggaaaagtctcaaaaagggtagacaaatcagtcccagttaagccaaaaactcacaatggcttgagagagttggtcattcgcaacgaacctaaaaacagtaaaacttctgcgttcccttgaccatttgcacttgtcctccgactcaccaagccaacatggcaatggcccagaaaacaccggccaaaagtgccgggaaaataagtctattgtccatgtacggtctgttctttgtgaaacaaatgtaaatgagcaagacggtggtggaagtgaggtaaacgccggagaaatgggagaacacgtagagaatggcatcctttggtgggttatcaaacagttctgaacttgaaacgagaaattgtcgcatttggaaacaaaataattatccaaaaatgttttatgcgaatattcacttgtcctgcatgtaaatgacgggagtgaaccttaaattgtaaaaagaataaaatttacaatttaccgttacaaaaaaatcacattgctccataacaaatgccggcaaagacagcagagcaaatagcactgaaaaatagcaaaagttaaatggcaatcaaaaaaattacaaaattttgcatttattactgacaattaatctcccatggccaattggggcctaattcaaacgcacaaaattcgcttttgaagattgctgtccatacattttgccccattttccgttgcaactttttctgccgattttcgttgtccattgccttcgtccgtcccatccgccgccattctctgtgttccgtccccgtctttgtccgtctccaccaacccaatccgttcttcggtcattgccccgctctccgtcgtcgtttgctgccccattaattcgttgggcatttcgtcgtcatttttggcattatttttgttgtcttttgggcgaacgagcgcaaaaagaatgccccttaaatgttgaaaatacaaacaattttttaagtaatttgtcgtgtcgacgcacccgataatgacgaaaaccagtccggcatagttaagaatcggcgaattcggcacattcggattcacctgttggaaagatggaccgtacatttgttgtgcatggtaagtgacttgaaacagtgaccccgaatagtccgaagcgaccaatggcccacccgaccacacagccgcacaccccccaaatcagaatgcccattccgagtccaatggcatttataatggggacggcagtcaaattgccttacaatgaggtaaaaataagacttgatcccaataaacaaattaaagaaaaacgacaaaaatcaccgagtgcccaaagcgcaccgccaaacatcgcaaagtgctgaaaaggcggacatccggtgaaaaggaaagtcactgaaggaaaagaagcaaaatgaaaaagacaaaacggaaacgtacgaagtccaaccaaaaagatggcggaacaaacctaacagaaaagggaaaacaaaacggaatgccaaatcaagtggcgccccgtgtttcgaattttacattttaaattgaaactgaccacccattggacgaacattccatcccgtggatcgccgcttttgcgtacagcctaaaagccgtgaaaatgaaagtgccgtcgatgataaacagacaaaacgtaccacgtacattgagccaaaacaaaaggacgaaacgacacacgaagaaagaccgagggcaacacccatcacataagcaaaagagaaggatgtttaaaaatggaagagggaacgaaaaagtgataaaatggaaaaaaaattacaaaaaaggcaaaataaataaatggaaaactaataaaaaaaagtataccaatgcaaaaaagcaatcagtgaacaaagaaaaacaaataaaaaaccactatgtttagcaaaacaaaaaagaaaagagtttgaataagacattgaaagaaatacaaaaactaaaacattggtcagagtccctcgggaatgtcgtccccctccatgctaatcgacaattgttcattttcactccgcaccgtaccaatgtcgtcgtaccgtagcacatattccgcaattgcttttcggtagtcgcccacctcagtgaacaatttgtcacctccgtcgaccaattcacgcagtaacctacggagaaaagcaacaaacattgaagaaataaaacattgtttgacctattcctcagcagaaatttgctgtaaaactcgcgtccccctcgcgtgtgcaattgcgacattttcgccgcctccatatccgcttgtctttcattggcataactgaaaatataacaaaaaatggatgcgtttattgggggacggacaaacgtcgcaaggtcattccattgtttggcggtgagcacggaaagcgcggcgaggagcggataaacgagcacaaatgagaggaaagagcctttgaagacggtggcgtgcagaacgtaaaagcaactcatgtaacagagagtctgagggaggaaaataagcgaaggaaaagcaaagggaaaaagggcgtagccagggggggctgagggggctaaagcccttccctcccttgaaaattcaaaaaattaaaaatttcaagaattttcttaacaaattgcattaaattctcaataaattttccggcaacgtctaacggcaccccggacccatatttctgaaaaatggagaccaaacggcaaaaaatagtaatgaaaaacggctaaattttttgtaaaatacaccctcctaattcgggatttcccaaacaaaaaaaacacactcctaaaaatcgaatgaaaaaggaaaaatacactcctaaaaaatcgaatttttgacttcagcccccccccaaagccaagggtcttgtggctacgcccttgaaagggaaggaaggaatcacatagcaaaaccaagtgagcgcgtcccgggtcagcatataagtctctttgacactgaaaaggtcgcgggccaccaaaaaggcgagggcctaaaggaaaaaatgccaaaaatgaaaaggaataaaagcatttggaatgccaaccacacacttcgtcagacagcacaaaggtggacaaaagctgacgaccgacacgcgactcccaaacgacgcatgcgactttgcccaacactttgaagggctaaatgggctaattgcaagccattaatgcaacggacggttaaaagggactcaatattatttaaaaacaaattgaagacagcttcggcttttgtattcttttgggggagtggacactttttgccaatttttgagtgtggcggcgatacctcaaagtgttcctttgcgtaagcctttgcttcgtctgccgttctgaattttacgtaaaatggaagagcgatttgtgcgccggtcgaaaagctcgaagtgccaaggcttatggagtcaagcgaagcttagggaagggaggggaaaacgaaattgagaacattttaaaatagatataaattaaagggaccatgaaaagtattgtgttgttccaaataaaaaaaacacggtttttagttttctgagggataaaatgtaaaaaaaggggaggcgaagggatagaaataaagaacggagaaagaaacgttcattatttaattaaaatccttccgttttccgctatttccaaaaaagtttcacggaaataacggaaaaatgaacaaagtaaaaaataatcacccgaagcatcttttagacaagagaatgtgcagtgagtgtcgctctgaatctttccaactttttccagccaaaggaacgtttgctgaaaaacgaaaaattaaattttttggcgtttatttgaaaattcactcacttcgtttatcgttttctccaaatgttcaggcaatctaaagacattcataacgtcgacaatttgttaagaataatccaacgcaaaaattggaaaaaaattcactccgtgtcaattttaacccgccatttgaacgacgtgctgagcaacgggcccgagctgcacactttaatgacgggataagctgaaaaagtaagagaccgatgaaagacagagaaattaaaaaactaattaattttaaaattgaaattttttcaaattggaatggcaatattttgagattaaattgtaatgcgttcaccacaaacagttgcagcaagaagtcctaaacgcacatatcttccagttttagtaaacataaatttgtctgcattttctttgaaagaactaaaattagttttttaaatcataacaaaaaacaaaaatgaattaaacaaaccaacttgaacttcatataaaagtgctgattattgcctgattttgctttcattctttggaaatgacaaaaagggacaaatggactacaaatgctaaattaaaaatggcaatgaaatgtttagtttattattatgttaaataattcggagaactacggattttaaaaatggacacagaaaattaaaattatcactcaaaaacaaaataatgacaaacaaaaagagtgaataaaatttgggaaaacggaacgaataatacctaaagatgctcaaaaggtactgttgtattgcattttcttaggcttcccttctttggccatctttttctcaatgctttcgatcgctttcattcggtcggtgtatttcattttgtgtcttttgcaatttccattcgcatcaaaaggcgcttttccgtcggttaaccgataaagcaatttgccgagttcaatgctggactggagatattctcttaagggagtgtttttgttgccactcaaaaatagcaaaaataattaaacttactttgcgccagaaaggcatgctgcatcccttaaatgttaaagttaaacaattcatgcaatgagaatgtgcatctttttaaaatcttcaataaatccctaaattttagtaaaatttcaaatgatttccaattgagaatttttatatttgtagtatatattagcaaaaaaatgataaattctaggttttgaataaaaacatattacgaattgcatttgtgcaacttactct

SEQ ID NO: 3112 - DNA, 1156 bp, Heterodera glycines
tacatggtgcttttcaaatgggataaagccgatcattagatttggctaacatttcagcttcaaccaaatcgagcagattttcatcaggcatattgggaaggtcagcggacatcattttgcgaagtttgaagtcatggttcaatttatctttaaaaaattcatttttgattagcctttttatattattttgcgtttttagtgtttattagcaaggctactataatcaataaaagttattaataattgccggacccacttctctgtaaattgacaattattggcgcacacaaaataccgccttgcatgagtagtgatgtccaatgaaagaaagatctgtgcatcttactgttcattttcttatgatggaaaataaaagggaaaatatgtaaatctaaaaaaatcaataataattaacaggaaaattttaaaaatattgaaaattatttaaaatttaatttttttttctttattttagagccaaaaagcctaaaaagttttgaaaaaagttatttttgcctattttggcgttatgcctgaaatttaacaaaaattttataaaggaaaaatactctaagaattcgaccctaaaatttcagaaatacacgcttaagaaatgaaatgaaaagttttctcgcacatctccatgattttgcaaaacaaatgtatattcgtgatcagcgtcataaataaccctagaaactttttttccgaaattaaacaacaggcgagacctcccgtgaataaaaaataaaattctttttgcttgttttaggaggataatgctaaaggtgattcttcgtaattttaccgtgttggtacaaaaaagcgactcggccactttggcttttggattcatcgccggggcgggccttgagctgttcaaaatcaacttctcatgttttggcatttcattctacaaagtgttcaatgagaagcagttgtcccaagaactgacgaaattcgaagagaaattggccaatcggaactcgatgttgcgcagccgaattgatcagtttcaggacccaaaatgatttttgtttataatttaaaaaggataaaattggaagaattaatttccttttggatctgtctgcttcgcacatatttttacacaccgtaaaaacttaaaaaatgacgatattcaagaatcattttt

SEQ ID NO: 3113 - DNA, 1321 bp, Heterodera glycines
aaatttaaaaaataaaacccctaagaaatgaaaaattttctcaacaattcatctccaaaattgattttcatattttttttgccaggaattttagattttaaaaaatgttgtaattccttaatactgatttggcataatttgttgcttccttgaataaaaaaaaatcattttacacttctaaattaatttgaagttttttagtgaatgtttaccatttttagttcctgttttggcgtttagagcctaaataaagcctacccattttggcagtttttaaagcctaaaaatattatctctaactatcattggaaataattttgaataattgaattcatcctttttgaaattattcagttcccggagttcctccggtccgtttattaaatgttgtttttgttcatgttcatttattaaaacaaatcaggtcatctaaatttttaaaatttagcaattcaattttatttatctaatatggccaaaagaaccaatagaaaaaatcaaaagaaaaaatctattgacaagggacgaaaatcgagaaatcgccgccaaaaagtgagttttgattttattgtagaaatgaactgtttaaaaattttaaaactcagcaggaaacggagagcagtgactctgatgactccggaaacgaaagggatttttgcgacggagttgcagcggaactcttgcaaaaaatatgcagagccgtacgggtcaagggaatgaagcggcgaaatgatcgaacaccaacccctatcagagattacaggaaaaaaccggatagtgtgagtttgctttttcaatttttaaaattttaaaagatgctgacaaacttttaacatcccccgagggacggtcccaggaatttagcaaatttctcagtgtttgagacaggccaatagccgaaaaaatttctgaggcggcgaacttttttttttgcatttcggtcagaaaaaatttctgccaattccgaatcccggacccgaactcgaacaaaaattcaaattttcgaatttcatatttttggtttaaactttgtttaaacacatgaaaacgaagtgaaagtcattagtgcttcaataaaagatcatttaaaccatttttgactaaaaatggaaaatcgaatattttgaatttttcaacttttggttcgaattcgggtctggaattcggaattggtagaaattgatgcgtgattcgtaatcagcaactccgacaacccttgaaaacatgttttcatgacttttgaaaacaaaaaaaattttttcgaaaaaaagggaagtggggccaacccttgctattacccggattttgtggacctgccagg

SEQ ID NO: 3114 - DNA, 5691 bp, Heterodera glycines
  unsure (1)..(5691): unsure at all n locations
gccattttgagancaattttcaaaaaagaaaagattgtccagctgtgaggataagcgacgccgagaaaattttagaaattttattaaatatagccagaaaattgcaaaatttgtaaaatttgcncatttcttgaaattttttcatttaggaggtaattcctaacctctcaccccctccccttctggctaccggcctgcttggagggagtaccaataaagaaaatgggagtttttgatcaaaaattaatgtaattggtgatccatcaggaaaatttttcggaaaaaacgagagaaaaaggcacgaaaatctcaaaaggcataataaaactcagtctagaagcttcaaatcaagtagaaaatgtgtttttaaataaaaaaatgaacatccaaatgagatatcgttctttacaaaaatagttcaatttttttttcttgttagatttacaaaaatgatgtgaagggacctgcgttattaatcaataacattcgctttggtggcaatgaataccggcacggggcaaatgtggacactactggaatgctcgaattactggaacaattgggttacaatccggttcacatgtttgaggatttgagttcccaagtaaatttaaaaaataaataaataaaattaaaaaatccaaaataaaaaattaagcaaatggttgccaaatttgagtggttctcgcgtttgacggcattgaattttgcggacaggtgtatttttataaatttttaataataataaattattaattctgacgataatttttggggtgaaaatatctttttttaaaatttaaaggtatcaatgttatggctaaccttttaggagttttttaaaagttttagaaaggtaaaattaaaactcaaatgaaaaatcgagattttacaaaaacctttttgttatttaggaaattttttttcaaatttgaaatgtgccaacaaagaatggttttatttaaataggacaaaaactttaaaagcaaatttgaattttttaaatttaaaatgtggttttggctgattgtggcttatttttgtgattttaccggtgcaacaacatgtctaaacgctcctaaatttttttagtactgtcacggtggtaatgtcccacggtcatttgcgatcagtgcaagggatcgatggcaattctgtaccaatcgctacgttgaagagcaaaatgaacgggaaaaattgtccacaaatggttgacaaaccaattgttgtaagaaaatgatttggcttattatggatataatacttgggattcagatgcttttcaattcctgtcaaggagccctgcgagattatggggttgaaagcagtgaaagcccatcattgccaactacaaaacggcacgcaaaacggtgaccgtaatttctatttttaaaagaacaatgaaattgattagtaaaaatagtttatgaatacgtataaattatttggggcatttttaaaggcattattatcttttaaaatattttctctataagtaaaaccacacttagttgaaatttaataaaactcttgatgaggaatagtttcaaaatttacaataattttaaatttttatcgattttaattaagtgcataaaaattaatcgttttaccgaaaaatttacatttttttaataattttctaaaaaagcaacaataaaaattctattacaaatttcgataaaattttcatgacaatcccaattgcattaattgatttatttattaaatatcaggcgagaaactgacagtcaaagcagcaacgaatcgccaagccggccttcgtcgagtagaaaaatgtttgtttttgagatgcccaattattatacgctattttttttttaaatgcacaggtccaaattgccgcaccgttcttcgacacgccaaaaaaagtatgttttgttggaaaataaaaatagagtaaagaaagtatcataatgaaaaaacaaataattaatgaagtcctttgaaaggcattttaaaaattcttaatgatattaaataattgaaaaacaaatgagtaacaaaataacgtaaattcatatgaattaaaatcgaaattttaagcatgcttaatttttaaaatatttattataattaatacatattattataagtgaaaataaaaattattaagactttttgagaaataaaaagtcaacatattatgctgaaatgactaaataataatgggtaataaaatatatttttactattaatcgaaaataaataaataaatatttatatttaaatataaataattatattaatataatgcatgatatatgaatattttattactacgtgtaaaataatttggcatattttaaaagacattaaataagaattttattttaattatttacctgtaagaaaaaaaacaaatttgtggatgtctttgaggaatagaaaaaattttaaacaatttttaaattaccgttaccgatatagacatttattaatttattgaaaaaaacctattattataaattctataaaattttcatcacagtcgtaatttcattaattttttaaattaaatatcaggcgagaaactgacagtcaaagcagcaacgaatcgccaagccggccttcgtcgagtagaaaaatgtttgtttttgagatgcccaattattatacgctattttttttaaatgcacaggtccaaattgccgtaccgttcttcgacacgccaaaaaaagtatgtttgttgtttccccagcaaaatattaataaggctgtgcaccgggtcttagtttggctaaaacaatatggaaaaattcaatctaatattttttccttcattcacctaaattaaatattcttggcatctttgacagctataaaaatgctttattagtcacaaagtttaacaaaattcacttattcccaaaaaggtttgaaaaagcgaatttaattttggttaataatttgcatgtggttttttttaattcgtgggttttgaataagaatccatcgctagagatgtggcctaaaattttcggattttatttattttttcattttatgtttcttttgttccattccactttctaaatttttgaagaacagcttaaaattttaattaaaaacaaaaatttccattgaaacattagcaaagtgccgagcaatgccaacatgattgttggctattcgacgactcctaacttcgtgtcatttcgaaacaaagaattcggatgttggtatatacaagccatcttacgtgtctttggccagttcgcgaaaagcgaggaaatcacacagctcttcgagagagtgcacaatattgttgccaagcaagaaacgaagggacagaaacaaatgccttttttcgaaagcaaattaactaaacgtttttactttttcccaaacgagtgaaaaaatttcagtccaaacattcaatttttaaaatatttatttctttattacatttattggtattgttgaacaaaataaatgttgaatccatcttaatacttttattaaaaaaatattatagtgtttcgtattttcctatacattttggcgatgattatggaggcactttaatatttgatttattatggtttgaaaacttattgggtgagttttcaattgtttctacttttgactgcaaaataaactacagttaaatgcttttttttgaaaattttgattttaatttaaattttattggatttggcttacatgcatggaaaattttaagtaaaaaatgtccattttatgaacaatattcgaaaattaaagtgattcaaatttcgaaacatatttctattcactgtaacaatatgagcatttttgctgataattggaatctctagaggaaattaaaaatctacagaaaattcatctgagaaaataaaacaatgatcaaaactcacctttttaaattatgtgtttgtaaagttttttgtgtatttggatttcacaatttcaccattatatacttggtaattggcaggcatgcctctatttttaaatgactcggtagaaaaaagccatatttaaatttgttaataatttaaatataatttttttgatttccttctttcctttatcgcttatttggtttgttctttccaaccatctaattccaaccatgtaaaagtgtccgtacgtccccatttcttaatcatagggaccgagccatatcggcaacgaaaatctgtccggcaatttttgaaaaaccaaattgaccggttttagagagaagtacccggaaatgttgtttttaaaaatgccagcagcgttctcagtcccctaaaccaatatttgtacatattcattaatatttctttaaagaatcattaatagggaacggatttttagatgctaaaaatcctgaaataggtactaaaacaggtgccaaaaaagtgcaaaataagtggtaaaaacaccaaaaataccaaaagtgctaaaaatgcccaaaatagctgcgaaaatgggtgttaaaaattggaaaaacccagtgtctttatgcatcgaaattccaaaagtgtctaatttttatcaatttcgcccgcacaattgcaactggccaagaaagtaaacaaatacattttggagacgaatttttgtgaaaatttttcatttcttggaatatttactgaaatcttggtcaatttttaggggtattttttaaaattttctgtgatcgattcttaggggtgtattttccgtttttattgcattttactatgaaattccgttcaggacgatttcaaaatcgctttctcagtacctaaaccaataattttacataacaatatttttcttttcttgctttattgctataaattttcagtagattataattcttattataccaatcgcgtgatttatatgacgctcacaaacgcaaatgtttcacctttatttgttttattttttaaatttattctgcattattttctcggtttcagtctttattttttgcttataggtaggaatgagatttttaggcataacaatcgcagagaaggtactcaatcagcaaatggccgaagtttttgaaattttggtaattggtcgaaaagtgttagtatgttaaaaaaaaattttgattggtcgatgccacgataaatttggtgaatgaataaagaaagtccaaccgaatgaaaatccgctacattagtcaacaaggtaacaaccaatcctggagacggcgcatcatacatgccacggctcccggacttttcgacagcaaaggacttttcgacagtaaaaaaaataatggactgttcaatagtaaacataaaaacaaataatttttattaaaataaattatattgcttgtcagttttagtaaatttatttaaattaacataaaaaatgtattgctaaatcttattactagagatacgatttttacattttttacctagaaaaatttccgaaaaacataccttaaaaatcggtccctaaaattttcaaaaatatacccctaagaagaatgaaaaattttcccaaaaattcatctccaatttttatttatttatttttccaatgtcgaaaagtcccctcctcaaattttaaatatttctgtcgaaattaattatagccgacaaatataacatcactggcttggtaaaggaatgtttcgactttctcattgaaaaattgcccaatatttttgtggcttttgaacaggctttgttgttgaacatggaggtgaggaaagaattttaatta

SEQ ID NO: 3115 - DNA, 2025 bp, Heterodera glycines
gtatttaaatattcaatttttttccctgcggcgcctttcggcatcgccggcctccctcttccaccctgctcaccaccaaaaagtttttttcaaaaaataagccgcaaaaattgttaaaattaataaagggagtcaacaaataaattatttaaaaattttatttgaagcaatttgaaaaaatttctgattttcgaccaaaaatatgattttttaatttcaaatttctgcttactaaatttttctgtctatttttttctcaaataaaaggattgtccttcaaatttgtgcattaaaaatatttttgttagtttttaattaaattttcgaattactcccgctcccgcccgggactcccgtaaaatttctgcgggattttaacgggagcgggattttcacgggattcccgatcccgctcccgctcccggaaaattttgaactcccgatcccgctcccgctcccggaaatttttttttaccggactctaaaataaattaatattattttaatcatttaaaatattttagttatataaatgataaatcgaaatttattaatgctctgataaaaaaatcatttgataatggattcaacagaaacggaaaaattagcattttgtggaaaatattttacttactatttgaaggtttcagacgcggtgtagaatcttaaaaaattaatattatttaaatcttttataagatttacgcgatacaaattaaggaaatagtatgaccttcaagtacccaattctctcattttggcgtactattttaacatctctaacacacgaaaatatcaaattcgctaatacttataattttggttataagggtaaaaaatcactttggacatttagaatcaatagtaaaaatgattaattttcgtattttggacaaaaactgctgcctatgactcgagttataacgtaatgaaactttaaaactctcacaacttttttctgagatgtaaaattgaattagcattcgcttagaaaaagattctccttttcaaaaactttttttagatatcaaatttgatcagtttaattgggtatgaagcgagttatggcagatcaaaataaaaaatacaaaaaaggcattttccagggtaaatttcgaaatagcgcgcaaaaatttacgccaaatgtgctatttggcgttattagtagggctataaattatatgcttttgcatattttttctgcgcatatgctatgaaggggctcaaaaatagcatttctacgttaaaattttttgatttggagaaggttttggtgcatataaaagcatattttgggggttttcgacaaaaatgcatatttcgccatttttgcgtttttatagcatattttggcaattttttgtaaattttcataagaaaaatgcaaaaaaaaagcgaaaaatacacctctaaggatcgacttttttggaaataaaaaaatacacccttgaaaaccgaaaaatttgaactttttgtaagaacttttgaaaaaaatttgatgcaaaagacaaaaaaaaagtaattttgttttagcataaaataaaaattcagcaaaaaaattcaaaaatgcatatataaagtttgaaattcaaaattttacaattgcctaaaaaagttcattagccattgttttggagtttttaaacacggcgagtcaattttgggctccaagcgcaaataagtttattttttatttactaatcataacgccaaaacttttcaaaacttaaaatttttggggattttcccttgtaaaaatagaagagccgatctcgagttaaaaacttaagtttcacaaaataaacttggaatcgctagaggaggtcaaaatatgggcctatgcaaaattttaagaaaattggtcaataggaaaaaatttttttcaagggcaaacatttcaataattttaattcttttttagccaagtccacaatttaagcccaaaccaaataaaatttacaatattctccagaattttccccttcaaaaatgagcataaaatggttttatttgctctactattca

SEQ ID NO: 3116 - DNA, 4310 bp, Heterodera glycines
ggtactgaaaacaatgtaaaactgagaatatcgaagtcccggtttgaccgggaccgggaaaaatcctggttttttccctgttttcccagccaaaaagtcccgggttttcaacccaaaaagtacagaagtcccggttttgcccaaaattcccggtcccgcacaactctactgaataatatatttccattggtatgtacagtatgtctttcaaccggttctgtacaatatattggttgacgcatttccataattctcgaaataacccaccaccacaacaactggcaaatgcttggcatcattggcaccgcaattgttgccgacagtgctggtttcctcctgtttttcatgagcagcagtgccatttgggcagcacgacaaattgttttgggtctgattggtgctgagctaaaaaagccataaaagggcgctataaaaaaaagctagagtgtagcgggaccgggacctggacagtagttacccccccagattttgggggtgacaattcagtcccgtcgtttcagtcccaggcaattcagtcccgtagttttagtcccaggcaagtcagtgccagaccaattaagtccgacccatgcctattagagttttttttctgttttgcatgactgagctagtagtacatcaaaatgttacgcttgactgatttcataacaattagctcctgcctattattaaatttacacatgtgtatttgtagtaattatctctcgtacattatgcatgaccaattttatgaaaattattcaaaatgttatgcttcggtgatttcatagtaattatttatgttacaattgctctcaaattccattttttacagtgacctattttgctctggttaccgtcatcaaaataattattgctgccctctattgagagtataaatagacgacattcccaaccaaaagtccatttctcccattcattcaaaaaaaaaaattttcaatcccactccactttacattattctctgaaaacaaaaataaatttgagtatttaaatacaaaataattccattacttttacaattctatcattaaaaataaataaatataaataaaaatgaaacgaacttctgacgaccaagttccttcattccctaaaaagacccaatcaaataaatgcattagaaaaattgacaattttacatcaaagagccgaaaacaccaacttttccgctccaaatctaaatttgtcgtcgaggaaattgagacatgtgctgaccctacggcggaactccgttcttgtatacaccattcaattgaagaagcagtcttagatgcccacaactcacttggatcagcaaataaggtgggggtaatcatttcttctgaacttttagaccaaggcgacattattgttccaattacaccaatttcctccaatgtcgtagatgcagtttttaatcaattttgtaaagtggagcagagtaaatccaaatacgtcaacctctacggtgcgccgtttatgatcacggtcacagtacttaacactgacggacttccccgacaacgaacaatcaaaggcaaagggcaccctccttcttcatcatatgcccatatttttaaaatcaacaacaatgacaacttttgcctattttatgccattgaattaatgcgctattattcattgtataaacgtaatattatttctagagacaaatggcgttggattagtgacagacaaactacagttttgaggcaaaaagtccatcttcttctccgagaagcagggattcccacaacagaaactgaatatgacgcggaaatttacatccatcaagtgcaaggattatggaatattaaacacccgggcgaatataagatttttatcttcaacgactatcaaaaccgccctattgctaaatctgatgtcaccgactaccagtttcccatactcctctaccataataattatcattttgatggcattaaaactctttctaaattcttcaagaagcgttactattgtctctcttgtgaatgtatctacgaccgcaaaacaacacattctatgaactgtacttcactctgtcacggctgccgggaggtgggcgtcgactatccgtgtgagcctcagcaaatgtacttcaaaaaatgtgagcactgtaacaataaattttacaacatcaactgctatgaacgacatcttaaaaatgatatctgcacaaaattcccacgatgcaatgactgtggtgtaatatataacattaaatatcattcaactatgagtcatcaatgtggagaaaagttttgtcgcctatgtaaacaatttcacgtaaaagaggaagacgacgagaatccatgcagtagttgttttatccaacctcttaaacaacaaaaaatcaaaccgtaccggatcatagcttacgatttcgaggcaatacaggacaaaaaagttggaaatagtttcgaacacgaagtcaactttgcagcggctaccgtcatctgcaccaattgtattaataatgaagaatggaaaaactcactagagggaaaacaatgtgctatatgtggccccaaccgtacaattacattctcaccatttgattacaaagagacaacagtagaccaaaaaattgtcacccagcaaactctacgggaatttgtccaatggctactatttgaacaaaataaaaaatacccaactgtagcctttgcacactttgggggtcgctacgacatgacaatgatcatcaaggaagttattgcacacggtacaatttttaatattcatagattatatattttttaaggtgttcacgatccacaaattatcaaacaaggaaatcgtctttatgaactcaaaattaaggataatgagcatgccccactaacaattttccatgacagttacaatttgatgcctatcaaattatcgggtctcatcaaatcatttggactcaaaattcaagtgattcattttcataaaaattatcaattttttttttaaggataaacaacactttccacacatgtttaacaaatcatctaattatgaaaatgttcttactaatttaccgccgtgcgaaaaatactgtcccaatcaaaagaaaaaaactgatctgcaaaagttcaacgaatggtacaacaccaattatgaccaacattttgatttaaaagaaaaattacccgaatactgctgcaccgacgtcaaaattctcacccacgccctcgtcgagttgcgccgggaattcaaacaattaacacaaagagaaggaaatcatagaggaattgacattctttggcaagcaatgaccaaagccagcgcctgcgtcaaaaacgttgcccttaatcatttgagatccaactctctagctatagtcccggagaaaggctacaccccacaacaaaaccaaagtgcactggccaacaaatttcttgactggtactctcacataaacaacgttcatgtacaaacggccagttcccgctacggagaatatatgtttaaacgtgaagggcaggtttatcaagtggacggctacattaaaggcacaaatgggcagcgggacaaaataattgaagtgaatggttgtttatggcatgggtgtgaggagtgttttgatgatatggatgaagagacgaggatgccaaacgggaagacactgggggagattaggctaaggaaacagaggaaatatgaaatacttaggcggtacgtcgacttggaggtggtatgggagcacgagatcaataaacaaatgaagagagacaaagagatgagggagtatttcgaaaactggaaggattgctcacctatcaaaataagagaagcatttcacggaggacggacaggaccaatgaaactaatccacacagcaaaaccggggcagaaaatcagctacaaggacttcaccagcctctacccgtttaccaacttctctacaaaatatcccctagggcatccaaaaattatttctttcacgaccaatgagcaaacggtcaattggctttctccaactgacaacccctacaaaggattacttaaaattcttctacaaccaccagacaacaacgtcaaagttactgtaatgccaataaagtttgatgagcgcctgctattccctctctgtgaaaaatgtgccaaagttattagcaacaaatacccaaatggcctcaaagacaacgaatactcctgcccccacttcaaccccaacgaccgcgcctttgtatcaacctgcacccatcttgaaataatgcagcactggaggccggctacaccgcccgcaactttctcatgtcctacaatacgaccaatggagtgacaatgtcttcaagtcctacgtgagcgaa

SEQ ID NO: 3117 - DNA, 2119 bp, Heterodera glycines
taaatacgatattaaatttaatattttattttaaattcttttagctctatgaaaaattgttttattttaattttttacaactgtaataatttcttgactgaatttcgctgtttaacctgtttcgttttttcttgttttagtaatttttattaaattctttgatctattttattattttgaatttttattgattttaataaaacaaatatattattcgatgtccttgtttggtgttatttattttcgtatatttatataattaaaaaaaataaataatattgcaacttctctccaaaatatgttaacaatttcattgatttaaaatcgaatatcccaaaaaaattatattttctataaatgttaaattgaccaattaaattatacggaaataagggaatgtcgaatttcaaaaaaatttaaaaaaattaatgaaacattgccaattgggtcgggaatgcctggggaaggctggtacaagcatggcgttttttttcatgaaatttaaatatatgattttaatcaaatttaaaataaaaatttctttattaaaatagcttttttctatagggctccacacagctgtggcatcatcatcatcacaaacaccagcgctagtggcaacaatttcctcatcaacaacaacaaaaatttatttttatgaacggtaaaaatgtaattttaagtaaatgtttattattttgcgtttttttaattcattaatcatttaatcataataataacaaatcattttaataattatagctaatattttcagcacccaaccaccaccatttcaaccatcatcatcatcatcatcatcatcattattattattattatcaatttttatcacaattattctgatggtaatgttaatatttataactgtaacaaataaaaaaatttttgcaagatttgcactttcaccatcattggtgccgtatctttacttatggttaatttttacttattaaaagtttattatggttaaaagctactattatattcagaagagaatccaccgacgccaacacagtcaaacaatgcccgccatgcaaagagcccgaccaatcattagtgccccaataattgccttcaatgtatgtacaaatgaaatatatttaataggcccttcaataaaaagcacttttttaagcaaaactatcggagccccctgcaaaggccgccgctaaggcctgaaactttgtactttgattgtgtttaatttttttttttgcaaaattcaaaataatataatcatcaaagctgtcaaaatatgcaaatgcattttttctccagggttctccgtagggtatttaataggaaaaatatctttttggtatttgcgcataaaaatcgggacttttatttgcctatttttgggtttatgcatgttttttttctgaatatttcatgcatattttaccaatattttcaggttttttgcatattttgccctttttcgtcaaaattttccgatttgaaaatccctttggaaaaaatttgattatgtctaagaataaatacaaatctttttgtcctcttctttttcctcctcttcttttacatccaatttttcctcctcttccttttcgtcgtccccttcttcttcctccaagccagcccacacgtcgtcttccttctcttcttctatctcctcgtcatcaaacatcaagggccagggcaaattttcgcttatgacaaaagtttcttaataaacgtaaaaaaaattttttttaaataaattcagtttaaaaacaatttagactttttttatgaaatgtctaaaataacataataacaaatacgctttttaaaaacttttaatttcttttcaaaattctaattttttgggtaaaaggctttaataaatttaaaattcaaaaacaatttagcctttttgaaaatatttaatgcccaaaactgtaactaaatcggtttttttttaaattaacacctttttaaaccccaaataaacgcaccctggtcgtcggtgctaaaagcatcatctttctattccttctccatgccttccgacatgtctcctcgtctacttcttgagcctccgcatcaaacatcgagcgccatttgtcgtttatgacaaaaaattcttaaaaaa

SEQ ID NO: 3118 - DNA, 1974 bp, Heterodera glycines
  unsure (1)..(1974): unsure at all n locations
tttttgtcctcttctttttcctcctcttcttttacatccaatttttcctcctcttccttttcatcgtccccttcttcttcctccaagccagcccacacgtcgtcctccttctcttcttcttctatctcctcgtcatcaagcatcaagggccagggcagattttcgcttatgacaaaagtttcttaataaaggtaaaaaaaaattttttttttttaataaattcagtttgaaaacaatttagacttttttaatgaaatgtctaaaataacataataacaaatacgctttttaaaacttttaatttcttttcaaaattctaattttttgggtaaaaggctttaacaaatttaaaattcagaaacaatttagcctttttgaaaatatttaatgcccaaaactgtaactaaatcgggttttttaaattaacacctttttaaaaacccaataaactcccctggntcgtcggtgctaaaagcatcatctttctcttcccttctcatcccttccgacatgtcttcctcgtctacttcttgaagcctccgcatcaaacatcgagcgccatttggtcgcttatgancaaatattcttaaaaaaaaagtttttaaaaagtttaatttttaaaattttaactataaacataataataatttgaatattgaaaataaattagaccttttggcttacatatttaatttttataaaacgacatttcttcttcaaaaaaacatttaaatattctcaaaaattgttatttttttcactaaatggtttataaattaaaaaacggaaaaaattttttcttacaataaaaactgcaacgaaatctaattaaattgctttttaattgacgcataaacgcaccttgatcatcagcgcctgcatcctcggcctcctgtaggtgtttatgcgatgcgtgaatgtctgcgtgtgcaggtgcagatacaggttaagtgtaaatgcgtgttatgtgtgtgtgtttgttttggtaccggccagaggtgcagatacaagttaggtgaaatgcagaggtgtgcacgtgtgttttgggtgcaggcaggtgtatgtgggtttgtgtcaggtgtagatgcagggggtgtgtttgtttacatgcgcaggtgcagattgggccaaatgcgtgtgtttttatgtatttgtagatattcatgccaacaagacatgtccaaaaaaagcaaatacacagaaaatagcgattttcatcgaatattgcaaaaaaagatgaaaatatagtaatatctagaaatcaaaatataaaacaaaaattatcgataatgaaaaacaaaatgaacaaatataatattctatcaaaaatttattataatttaaaatcttcggcaagttttgctgggattcaaaaaattttaaatgaagcgaaaaaattaacccggaatgcttaccgaattgaagatttaaatggggataacattaaaggaatattttatgatgccgaattagtaaaggtgtcgagaaatcaaataaataaataaaatataaaagaacttgaaaaatattcaaataaaagtgaataaaataatgttcttagtattttttggtttggtatttggccaaacaaatagcaattattgctgcctttctaatgaagagaaactgcaaaagaattcatcgagaaaagtaagtgatgaaaagcagaaaattggatttatcagaaaagaaatggataagtacataatttctgggaatgtattgaagagacaaaagatggagtaatatcagtcagacgtttcttacgatcttgttttttaatcaattatttttccaaaacaaaagtgaacatacaatattcactttgttctaaatctgatgtcaccgactaccagtttcccatactcctctaccataataattatcattttgatggcagtaaaactctttctaaattcttcaagaagcgttactatatggctcttggaatgtatctacgaccgcaaaacaaca

SEQ ID NO: 3119 - DNA, 5487 bp, Heterodera glycines
tgcactgcatttggctcttttacgaggacatgtcgaaattgcgctgctgttgctgaacagggggtaatcattggcttaattatagcacataagaaggaatggtttaattaataacaataaatggcggagtgaaatttctaatgattttctcgttaaattgaaaaatgcccgagaccacacacaaaatattttatcaacaatgacctgctgataaccattcaaatgttttagctgcaacccaaacgtgcaagaccaagccggggacacaccgctgcacatcgcggccgaacgtggactgggcccggctgcacaatcgttgtgccaacttggcattccggtcgatgtgcaaaatgcggtcggtgtataaaaaagaaacaagcagcgttattgctcgagactcaagaatctcgaccaaatgattgccactaatagaccatgggatagtgacttttgctgtttcagaaaggcctttccgccctccatttggccgctcgccatggccacattgacattgtgcgctgtctttgcttgtccggcgcaagtgtccatttgaaatcgaatgtaaatgatgttggtcttttccgaatttgtgattttatgccgcctttaaggatggcatgaccgctgagattatggcactagcccaagagcagaagcaaattgccacacttttggccaaagtgaggccggagaaagcgcgcacaaaattcgtcaagcaactgtccacagtggaaggcccgctgaagaggatcaagctgaaggtgttcggacatccaggtagccgagctaaccaatgaaattgatcaattactgattggtgtttgccgatcgcattatatatactgattaatcggcttggtaataaaagccctgaaaatttcccctttttcccaacattgagtcaaatggattacttatttatccctcatccgtcccccaggggctggcaaaactcggctggtcaatgccctgcagcgctcctccgcctcctcgttgaactcgctgatggagtcggtcacgcgtcgcttctccgacaatcttttcccggctaacagcagcagtgtggtcgtctcttcttccacctcttcaggtatgtccaaatatttaaatttcgtagcattttaacattttttgcccccgctttcctccgacctttttaatttcaaattaggaccgaaaagaaaagcccggcttggccatgtcatgcaaagtttatccgatttttcttattctgcagaccaaatttcgccgactttgtgtacaatcaatggcagttcctcctcaatgattatggcatcgccttcaaaaagcggtatgttttttgtagggaaaaatgccttccccagggataaagggcagagtttttaaaaaatctaacaagaatattcatttgttaatctcatcatgggcaggtgaagcggaatcgtcggccgatgagggcatccattcgggagtgccgtcctcctcctcgaccacctcctcttcgtcaaccaacggcgtcgtcggcattggccatcggcacaaaacgtggccatgtgcggagcgcaactcatcagggcgggcgccgacgcagggcattgacattcaaaacgtggcatttccaggcaagaaagaaaagcatttggagtttccaacgtgcatccacctaacaaccggttgtgtgatgctcgagagttgactttcggtctcgcatctaaattcaaagtctcgcgcggaccttgggcaaacaatagaattattttcattaaagttgtttttgatctcgacagattgcggcgagttttccgtgtgggacttctccgggcacgagcccttccacatttgctacgaccattttgtgggcaacacggactgtgtgcatttggttgtcacccgatggtatgtcggcggcacaaaaaggaatcttttcgctaaaccgttgttttcaatatattcttaaaagaaacggattgccattttctgtatctttcggtatttttgttaatctcttttagtatataaaatccaaaacaaattttttgaaattaatgagttgggttcaacaaattagtctcgtccaatacttcgttttaatggggcagacatttttaattaaactccattaattcagttcggacgatcccatggatgagtataaggtgaggaacgggcaattagccaaacattgatacgattattcaccttcccccttgcccatttaaggagttgctgtactggctgaacttcctcaaaggccgcgtcacgcccagcgagccgatcggacattgtggacaaatttcgcgtcgatcggtggtggccatcgcaggcacatttatgggcggcgaatgtccgatcaccaagaacgaggcagaggcgatgatgaggacgttgaagatgaggtgatcaaagagaaggagagaagagaagagagagagaagagatcatcagaaatagttaaggaagaaagtgataaaaagaaagagagagtgccttgagacatgcaaaactgtagagggagattgaaatagggagaaaatgggaagagattgatcaaaaagatagttgagaaggaaatagatagagcgagagagagagagaaaacgttatcaaaataatggtaaagagaagagagtaaccacggaaaacggaaaagtgagtaatgagagattaaaagaatggctaaatggaagagaccagtgagagaaggggaagaatgagagggaaaaagaggacagagaaaagattaatatgttgaaggacaaattcaaaaactaacttttaaaatagttttaaacattctcaaactcccccccccccgcactttgcaggttcgaaacccatttcgacatccatggccaactgtttctggtcgacctttccgcgcagtccgattgtgtcggctctcgcgaattgcgtgcctttttagcgcgtcaacgggacagcattttgatggtattagcatttaaatgtgtgctaattaaactcattaccattttgttttgattttcagaggcttcaacaccccctccgaatgttggactctgcgctggcctttttggagcaactccgtgaacaatacgctcaattcccatgcatcacgtggccttagtagggggaattttataaatattttttttgaaaattgaaggatgaatttatgtgtttgaattaaatgcaaattaagtatataaatattgtattttcaaaaaagaatattgaaaatatatgaaaatttttaaaaaatctccaaatttttaccaagaattgtaaatatattttaatctttttttggacaatatgttcttaaaaaggcgttaaacaggcacaacgtgccataaaagaattaattatcatagaataatatttttgtggttttaaaaattgatttggtttctctttaaaaaacaattttaggggtacatttcaaaaaaataaatttttcacgaaaaaatttctattaaaatcttaaaacttctaatgaaaaattaaaaaatataccaaaaaatttttaaaaaatgtataaatatatgcatatataatgaaatttccagcttaataatcttttgttgatatgctaatattcagcttcacctcacttgttcgatctgaggtcaatccgctggcaaatgacagccattgtaagtaaaaagcatttttggattggttggcccatttaaacatatttgtttttgccgcatctcaaaattcgaattcttttgcctctgagaaaattcattaaaaaataattatttgtacaattttttaattattatttttcttaaaaataaaaatttaaaaaattgtaagccatcgaaaaattacaggaagaaaagaatttttaattttgccgcctaatacggaaatgattcttttcacaggtcggcagctcattcagcagttgcaactgatcggggaagttgtttatctgcgtgacgagggatccgcacttgattttattgtgtaatattatttatatatttttaaattatttttgccaatttgttaatttaccccccccctttttttgcgtctttagtctgtcccccgattggcttggcacgcatttgcttggcactttgttctcccctcgttttgcgcattcgccccgcgccagtggccgttattcactgaacgactttggcgcagtgtttccggaagtgactgacccggcggacattctccaaattttggaaacgctgcaggcaaatttgattgttaaaattgcaatttttaaatcagttttattcgaattgtaaatcaatttcggcgaaggattgagttagggtatttttgtatcccatttttcggatttaaaagtacgttagtctcgcttcctggcttcagactatggaatttttcgtttttgaggggcctcgctcttgttttatccgggcatttcgattccagcccgattcctgtgaaaaatcacttctctcacgccccttaaaaacaacttcaaactgaacaaataatcttcctttttcagttgtgctgtgtcgctgacttcgacttcgaattccccgtgttcatttcggctcccccgccgcacgacgtttggctgcccaacagaccgcactttgtgtacggcgggctcaggataaagccgacccggggcatggagcagacgatgcagtccatcttcccgcgcattcaagtggcactgcgccggtccatgcagaccttccaagtgcggcatggggcttaccaaatcgggattaccgctttatccgtttatatcgatcactcatcacgggaaaaatacagagactgaccacgaatctcacaataatccattgttattatccggcacaggactccattgaagctgagttggcacagtggaggtactgctcgaagatgcaatcgagcaaaatggaggcattgatcagattggtcggcgaatcggttgaagttcaggtcggataatttggcattaaaatttttgaaaaaaatctttgggagccataaaaccgaaaaaggctctcaagtgttaaatcgtcaaatgacctatttatttgttttagtcgttaactgtgttaataattgtgcccaatttgtccacagattcgcggccctccggaaaaggccactgcgtgcatttacttcctggaggatctgtccacattggtggagctgacgagtgccgaagtggcgcccggtatcagcacagaacggcacttcctttccccggcacatttgagggaacacagaacgagtgggtgggagggaaaggcacacaaaaaacaattcaaaactaaatttaaatttaatattttacctttaagcacctgccatttttacgccagaaacaataatggaaatgcaacagaacgagtcgctggtcattgtgaacagtgacggggaggaggaggaggagttcaccgatgtggtaagttttgccaactaattttttttgagttatttcaaaaggtattaggtcacttcacaaaaaacatacttagctttttcacgaattttgtctcgaatttaacaaaataaagaaatttt

SEQ ID NO: 3120 - DNA, 801 bp, Heterodera glycines
agtcatccgcctgtggcgctcgtcagacttcttcctccgccctccgtctcgccccactacttgctccgtcttcgcatgctcccttttgcgagagttagcttgtcaaattctttttgttcatcccttatttctttggtactaaagtgtcacttttcactgggactcagtagtccaattgctctgatggcatcggctcgacttcattccctgaattttagactaatctcgtcaagagctttcgaatgataccaaacttgtcaggatacgatcgtttaaaaaaagttatggtgccaaatctctcaattttcgagctatgaatcggttcaaaaactggtttaaacttgtcggatcaacttcccccacccctagatcgatctgtctcatcgagagctatcgattgttaccatcgagattggtccacgagaaaaaacatcgtataagtctagagaaccatatttcttttaacggattgccatcctttcatcggcgtgaaaagttttataaagttattttgttataaacaatattattataaatctaatatttttggcaccctcccgagagaaggtgcagttccaaaaattagtacacaacgttccttacaggaacgagtaagtgttgaaaaataggcaaatatatgttaatttaaaaactaatttatgatgggtttaaaatagaggaaggggagagagaactgatcctttatatttctctttttgtacgccttcttttccccctcgcccgtctcttgctcttagttcactttctctcattttcctcctcttgtcagaatggaggaag

SEQ ID NO: 3121 - DNA, 2674 bp, Heterodera glycines
  unsure (1)..(2674): unsure at all n locations
tgccaaatctctcaattttcgagctatgaatcggtctctctaggggtttaaacttgtcggagnaacttcccccacccccctatcgatctgtctcatcgagagctatcgattgttaccatcgagattggtccacgagaaaaaatatcgtataagtctagagaaccatatttcttttaacggattgccatcctttcatcggcgtgaaaagttttaataaagttatcttgttataaaaaatattattataaatctaatatttttggcaccctcccgagagaaggtgcagttccaaaaattagtccacaacgttccttacaggaacgaaaaagtgttgaaaaataggcaaatatatgttaatttaaaaactaatttatgatgggtttaaaatagaggaaggggagagagaactgatcctttatatttctctttttgtacgccttcttttccccctcgcccgtctcttgctcttagttcactttctctcattttcctcctcttgtcagaatggaggaagagagtgagacgcaagggaagagagagaaatgggtcgcggtcgttttcgtacgagcacaaatttttgtctataacttttttctttgccaaccaaatccgataatcctggtatcattcgatagccctaagtgtcctctattagcctgcaaaatctcgaacaattttcttaaggttttatggccagaagaattcaaaaaatggttatttgaacattttttgccataactttttgaaccttaacaaaattgttcgaaatttcgggttaatagagaacaacaaatttttttaaaaggctgaaattattattttctaaattttttggaggcttttttgtagtgaaagacgaaaaaaaaattttagtttattcaagtttgatttaatttttctttaaataaaaataaatttaaagaaatcaaatcaacaaattttatttacttaaaaaacctctaagaattagaaaactattaatttcagttttttattttatttttttcaacttccatttttgttaggtttgtttcggctccaaagaagctgccggtctgctcacgctcggcgtcgacatttccgtctcccaattgcaattgtccgcccgctcggaactcgccgctttgctggacgcaccgaacactttgggcatggactggagcatcctggcggtgaagctgaacttgactgaacaaataccggaggtgggttaattagctatgataattgattggttattattagggctgccaaaaatatgtacaaaaagtggtccaaatatgtacataaatatgtaagaaaaatcccaaaatatgtacaaaaaaccccaaatatgtaaataaaatttttttaatggtattttttgggaaagaaaatccccgtaaaatatgaaatagccacaaaatgacataaaaattactttttttggtatttttaggcaacattttcaaacttattttttctttataaatcttcaaaatatgtaaaaaaaatgaaaatatgtacaaaaatatttgccgaaattttggatttttttttgaggattttcaaaaatttccgtaaaaaatactcaaaatatggtaaaaaaatgaaaatatatatgaaaaaaatccaaaatatgtacaaatatgtaagaaaatcccgaaatatgtaaataaaagtcccggtttttgttcgcaaacacaaaaaagaaagtgtttttcctgctatttagagcaaggagaagccaggaaaaaaatatgtatttacataaaattggcagccctgattattatcccatccattagggagtggcacaaatgccatttgctctttttcaatggcatttatcacttcataaattttaaaattataaattttaaacattaataagttgcagctgattttaatattctaattacttgcaaagtattaaaaaacttttgggttttttgattatttttatggcaattgaattgcatgccaatctattaaatttattttgattttattaatccaatcgaaatgctcttttgttatgtcaggtcgactcgtcaggccaatcgttgtcccgcactgatcagctgctcaccgaatgggcacttcactcgcccgacagcgcttcggtgggcaaattggcctccattctgcaggagatgggccgcaacgacgtcaaagaggtggcagagcaataatttcattgacttaaatgaaataggttggggggatttcgcattggttggaagaaaaatgtgaagcgattagtgaagctcgagagtctcggtctcaattcttgacttgagaaaagtctcgtttttgggtctcgggttttcggtctcggagtcactctcggtctcgaatctcgggaaattttctgtctcgagcatcattagaacgaggcggggaaaggtcagagatgaaagggataagagagaaaagcgatcgtaaaggcgaaaaggacaagattttcaaaatgaaaatattgagtagatgatttttggtctcattcctttaaaaatttcatcaatttcatccaacaaaatgggacttttcaaattttttctcggcgatgcccacaaaaatcctaatcattaaaaaataggcgcaaaatcgcaaatttggttttttggtgaaaatctaataaaaaaccagaagaaattttcaaaaagtttttggaaaaagcgtgccgcaaaaa

SEQ ID NO: 3122 - DNA, 1556 bp, Heterodera glycines
catgactttctgaaaaaatatttatgaaaacaaaaaaatcgattttttcaagtgtccgtttggggtactcaaacatttatggggagcaaaaatccaacgcagaattaaagtacaggctatagggaagctattcccgaaggattcggtctccccataaatctgggcgcatcggttcggggggactgccccgaaaacaaaaaaatcgattttttcaagtgtccgtttggggtactcaaacaattatggggagcaaaaatccaacgcagaattaaagtacaggctatagggaagctattccggaaggattcggtctccccataaatctgggcgcatcggttcggggggactgccccgaaaacaaaaaaatcgattttttcaagtgtccgtttggggtactcaaacaattatggggagcaaaaatccaacgcagaattaaagtacaggctatagggaagctattcccgaaggattcggtctccccataaatctgggcgcatcggttcggggggactgccccgaaaacaaaaaaatcgattttttcaagtgtccgtttggggtactcaaacaattatggggagcaaaaatccaacgcagaattaaagtacaggctatagggaagctattcccgaaggattcggtctccccataaatctgggcgcatcggttcggggggactgccccgaaaacaaaaataaatcgattttttcaagtgtccgtaaggggtactgaaccaagtttgtggagaaacagttcgaccccccccccccccttactatttcatatacatatcggggcttcaaaaattgcttattagcagcagcatttaagagatttcttgcttttctggcgccaataagatcataaataagcccggccttatcatccttatcattcattatcagtcctatttttcataactttcattacgattttcagttgttgttccgcagggtgcctctgtaccttttaacggttgatcagcccaacggtgattgaccatcgcccgaaatgatcgattgatctgtcatttgtccgttcattctccgctttttctgttcattcggcgcacacaaatgagctaacacaaacaaaaaagaaaagcttctcccccttttttgttcttccctctcccaaaattgttcagcttttgtacaatttcatcgtttgatcactcatttctccccccccccaaaaaaaaattatttatttaaaaatactttctaacggaggaataatttcgagagatttattccattagcctttaaagccaattgattttgttggcggcttctttttttgaccttttaaaaataaaattgaatatttgaagattaaattgtaataaaaattccttttttgcccaatgcattaaataattgtgagtgatctgagcttttccaattagtcattcattcattcgttttcccattttattttctctttttgtcacccttcgcttcgttcactttttctccgtccccatttttcgcattcattttttagctgcaccaacattttttgtgatataattattattatttttattatattataat

SEQ ID NO: 3123 - DNA, 1783 bp, Heterodera glycines
caatttaaaacaaaaatcaaaaattctttagagtaattaaaagccaaatgactgaaaaataaaatatttttttttaataaatagttcataagcgttcgataattttgataaattttagccgctttgacttatatttacttttaattgtgtaacttgtgatctctcttttaaatattttattcatttttttaattttatccgtattactttttgacaattaatttatacttatgttgtccacaaagtcagcggattttcccttttgtggaccttttctttattgaataaataaataatgcgatttccctcttacattttaatgaccaatttgtcatgggttcgagtccgcttgaagcatgatgatttattttgatttttttttcgtaagattattccatcaagcacatttttttattcagagttgagtgctttgagaaattcattttttgttttattttatattttttccaggaagttccgcttgtgcgcgacgctcacaactcgctgggactgtccatcgttggcggcattgaccactgctcgcacccgttcggcacgcccgccaacccgggcgtgttcatctcgcgcattgcgtccaactcgccggccgacctcacgcgacggttgcgtatcggtgaccgaatactgaaggtagtaggtctagtgagggagaaaacaatactttgtactgattacaaatttttttctataagtttgaaattttcccagcaaatttaggcgcaaacgagctgctcttcctccctaactcacctttgcaattttccgaaaatttccattaaaataccaaaacttaaacattggcatacatctttaaattttatggaatttaacttaataaaaattattttgtaaaacaagattggtgtgatggcaatggaaatatttatatcaattttttaactaaaaatttttttcttaaaaactgcactctaatttgtaagcgaagtatttactagaaaaaaaaaattatcgtgtctcctaaaatatagccaccctcctccacctaaattgttctgaaattaggacatgttttcaaaaaaaaaacaaattttaaaatttaattttctagcggtgttcaaccacctgctgctgagctctccacctttttctatttgcctaatttttaccgaaaattaattaaggtctgctcgcgcgacatttccggcgcccggcacaccgacgcggtggaggcgttgaaggccactggccgcgcgctgaccatcaccgtacgccatgagcgtcaaccggacggtctccgtgtggttgttgtgccgcgccgggacacgcacccgctcggcctaagcatttgcggtggaatcggcagcacctcaatgaacccgcaagtcggaggtgccatttttaatgatcacccatctaccccacacctgtgcaattttctaaaaaacgctaaaattcccattcaaaatttagaatgtttgacaacaacatcctaaaaaatgagagatgaaccaataaataaagagtgcagagaaaaaaacatctctcattttggcgtactatttctgtatcgccgttaatagagacaaactgaatttatatttttctaaaaatattaatgttgtcgagcggactcgaaccctcacccttgttctcttcgtgtggtgtattgactaaattgtaagactaaaaactgggacacattgaaaattattaaaaatttaaaaaaaacattggctttgactaattttcctggatttttttttgaatggggcattatttctaattcctaattcgtccctaa

SEQ ID NO: 3124 - DNA, 1864 bp, Heterodera glycines
  unsure (1)..(1864): unsure at all n locations
gcctgctcttgctgcaccatcatcatcaagtgctattggcatcgattccggtgtcaaaaatgggtgccaatcaaaacatcactcgtcggggaagcgtcagattattaatggcagtggtgccactaccggtgccaaaaacaacaacaacgccatgtaccagaacattgctgttggcactgttggaggcgatcaaaatgccgttgaagcatcatcctcatcaacgatgatggcaccgaagaatgaatcaatcggaaaaacggtggtggagcgacagatgtcagcctcagtctcattgttggacgttggcaaacagtcggtggaagaacagaaaaaggtgtgtgtgatgtgtgtgtgtaacaagggttgcgttttccgaggcccaaaaattttttggaatttgaaattccggggtgtaaaaattttttgtatgtgatatgtgtatttttgtttgcacacaggttcgagcccgctctgtgcgatgcgagaattattttattcttttctaatgacagagaaaatgaactgtggtagaaaaaaatgcatttaaactccctaaattaaaaaattatgcaaaattaaatactctacaattcgtttttaaattaaattatattaaaattagttttaaactttaaatttatatttcttttgtagcaatttgaagtgacgaccttctccagcgtgtcgtcatcgcacaaccagcacaatcaattgccaaacggcaccatcggcaacaaccacaacaacaacggtgccaatggcaggaaagatgacgacgattttggcacagagcataaaaaagtggcatcgtttggcggttctcctccgcctgttgcgccaaagccgaaaacgaacgtgggtgcctatacttttctctttggatttttactacgggtgtttgttttttgtaaatgtttttttcattttttcaaaaattttgcgcatttcctgccggtttcagtttacatcgtttgccgtcaacgccgctccccataatcataaacaaaatggcaatagtggcggttgtactgacacgacgacaacaacggcaatgatgaatggcggcgtcgccaccatcgccgacggcactgcgccggaaacaacaattggcgacttttcgagccgtcttcgcctcttccaacaacaaacgcagcaacatcagcagcagcaaccgataatgccgaaccggacaacgagttcaacaagtctccagcagatggcgggggcggcacagccaacagcagcagcggcggcagtactgcccaagctgaaacggccattgctcagcagcgacgacttggccaagctggccgaggacgaccaaatgaggaccaaagcggcggaagctgccgctggtgatggacgccgtagggcagcggcatcgctgggggcggcggcgggcagttcgggcgacgcgtcctccggcggagagcaaccgttcccgtcgccgccaccgccaattgctgctgctgccggaggcggcgcgaagacgacgacgttgatgctttcgcccatgtcaccggttgtcgacggcggcacatttgagcatcttctcaatgactggtaggccagcaggaggcgtggtcaaagtgccaaatttctatggtatttgccatatttttgtgccttcataattaaaaaaataaataaaaagctacgtgcaggcgaaactgaacccgccagagaataagtccatgtggtgcgctttaccattacgctattatttgcacagcaactgattctttgaatatttttatttccctttccaatttttcttttatttatgtttaattgtcacttattgctttgaaattgacaaagtggtctttttttgaacaattnttgttaaatacaccccctaatt

SEQ ID NO: 3125 - DNA, 4703 bp, Heterodera glycines
tccaaaaaatttttggaaaaaatgggcgcggcaatttcatattttacccacatttcagtccggtgccgcttggtccgtcctcaattggttcaattcgaacgaaaaagaccgaaaatcggttcctccagcagcagcagaacagtgccaataatgccacggttgtgccaacatcgacttcttcaccggcaccggctgccatcagccaattggtgttggagcaacagcggcgccaggagtggcgccaggcgcgcatggcatcgctggaggccgagtctcggcgggtcaaccaactgttcagcgatgtgcacgaaacagcaacaatgggcagcggtgccggtggcggggcagtacaacagcgccactcgcctgcaggtgtgtgacaaatcagatgaggagttggagacgaacgggtgctgtgcggttgtacccgccggatatgaccgcagcggcgtcggtctcctgaattgaggactttttaccccctccccctccccgatttataaattccaaatttaagaatcgaaaaagtgataaaaaattttctacgttttcttaatttctgaattttttccagcgagcaaaattaaaataacaaatatttaaataaaaaaaataacaacaacaataatttgtggttttttcagaaaatttcaacgtcaaatgatgaaaagaaagatggaaagtgtgatcacatatttttggctgttgctgcccagtttgcatttgcgccgaaggcccgcccccctttttttatttttcgataaatgtgcaaaaaattgtcccaatgaatggctgatcaaaaccaaaaagaaatgtcctttatttccctcttctgtctctttctctttctattcaatcacttattttttctgtagccaaaaaattctcaaccaaaaataacgcgccttttccatttgctttttttttctcattattcactcatatattcatgtatttatagggcctatcacagaaaattttaaaaaaaatgtatttttagggagggccttgagccaaaaattgaaaaaaaaatggaaaattttctgtgacaggccctgtttttcattcaattttttgtccaccattaatgtgcaaagaaaggttcaaattttgattgatttgtatatgtacacaaaatgtttgttgtttctcatcacacaatttaatgtgcccattttttgttttttccatcattttttgcgccaaaaattctcacaattacatatttaacctaattattgtccgcaaaaccaaaaaggaaagcattcctcccatccaattatcatcatcattatcatttacctataattaagtgtttgtttctttcttttagcctctttttttgataatttttgtttttgcctggtgctccatttcacgttacacatacatttgattgggaccaaataaaaaaattttgtaaaaatgttttaagacaatttatttataaattacattgcgcactaaactatttaatttttgtttttaaagaaactaaattggggggtggagaccgacacactaagacgaagcaacacaatatttattcaaaagtccgatgagatcaatgcgaagcaaaatgaggaacaaaatttgagattaattgaaagaaattaatgagaatttaaagtgaaaatacataaattaaggaggtcaaaaacataaaataaatagacaaaacgccacacttaattaaaattaaaacaaatgtcaattaaatctcccacagccatcgtagtgcactcctccgtattaggggtcgccgccaaaaatggaggaaaataagtcgcacgacgatctcatcgaattgaaagagctgagcagaaaagtgccttgaaaagaaagagggaaaataaattagtaattaaaacaatggtaattagtagagaccgaaaatttcaaaatttttagaggctggcgggaagcattaaaaggggcgactaagatttttcgaatggatccgacggtaaagagatcgggaatcaaatctgttaatgtctagtgcccggatttttatgtgctaaaaatgccaaaatatgtgctaaaaaatgtgttaaaaattggaaaaacttcaaaatccaataatgaattcgatttgattactagggtttgtaattatatggatataaaatcgcaaaatatggccataaaatatggataacaaatcgcgaaatatggacataaaattgcaaaaatctcaaaatatggacataaaatggaaaaaatatggacattatttttcaaaattaagggtatgctttctctaaatttcctcaaattcataaatgtaaaataaagcgttcaaaaatggctaaatacggtataaaaaatcattttagaagaaaaaacacgataaagctaaaatgacttattttaagcaaaaaatcaatccgaaaagcgaaattttcgcttttttgcttatttgaaaaattgctttaatttgattgaatttgttaaaaatttatttaaaaatatttggcattttgtccttaaaaattttcaaaaaatcaatgaaatcccgcagaatcccgcacaaaaagtcaaatttgcggatcccgctgcgggattggaacttaaaattatttgcgggaccggatccggcgggattaatcacgcaaatcccgcattggatcattcagcgacaaaaggaaattagaggaagacgggacaaaatcacgccacccgaaaatctatttaaagaaatttcaagcttagaaatttcgatcaaaattttttataaaaaatttaaagaagaaatatttaaaaaattttctaaccatttttagaaactttttgaaaaaattagtaattcatcacaaaaattttgaaaaaattttttcttagaattttcttatttttaataggcgaagagagattggcattaggcaaacaaaattttgcttgcgtctaaatttttggagcacatttaatccattttcgttccacccaccgctccgttttatcgctgtcgcggtcccgaaatgggccaattggtgggcgaccaacgcgcgggcgacggacaatcggcaggcgaacagttcgtgaatttggccgtcaaaattgggcgagtccacatcgaccaggtcgggccgtttgtcgagccgttcagtgaccaccatcaaatattgctgctgttcgtccttgaaaaaagtttcaatataatttccaattttattggaattagaattttttttatttcaagaaataatacatgtatgttgtcgccaatctttttatttccgggcgggctttggccaaatgcggcttggcccagctgaggcgggattggttcccgctcctcttcaccgctctcgtccctttttcctctgctcactccgctcgctgtgccgtaaagggaatggcgccctttttgccgttcgttttgatgggtctgatgctgctgaccgatccgatcagcgccaaagggggacgagaatgggaggggggaggggtgacaaagttgactggtgctttatggaatgtgcagcgatttgctggttgcttaacggcaccaccgacaagattttggtgaagggcttgtcggacccctttgagcagctccgaacgggcgggagttgctcgacaagattggttgtgaagggggcttgtccgaccctttgagctgctccgaacgggcgggagttgctcttcgctattgactcgatgaaacgggttttgactcccgtttcctgcggcggatgctccggctggcgggagactgagaccgaaccgcgagactccggctgcgggaatctgaactgctcaaacttcgtgacgttcgctctcgacttgatgagcacgggtttcgactcccgtctcctcctgtggatgctccggctggcgggagactgactccggcgatgcgcgcttctccggctggtgggattagcggcgacgaacgggcctgcccttcgatggacggtttggcaccgctcggctcttccttccttctctgccctgcttggtttcgtcgacgacgggaattcgccccgtccctacggctgctccggctggcgggagactgacaccgatccgcgagactccggctgcgggagtctgaactgcttgaaattcgctgacgctccgggccaactcccggattctccaatgccaaagggaaaggaactgggatcgggaggattgggggagaacgacgagggctgccaggaaaggaaggggtcaagacgtgaatgggcgcctccgtttggccccgcacgagaatttgccgaatgtgatggagtgtggagggtgcttttccctcctttccgagtcctccaagccgtttcagcacgaatttattaaagcaaaacgaataatgaataaaagcgacgaattgatcgaattgggcgatgggacgggggaattggaggaattggtcacaggcagaccgaaaatgaagcggaggggagtggaaggaagagaagagagagaacgcgaaaaaaaaacacgaccccttggtcggggccgcttaaatagacaattttcgaagggggcgggcaaaagggaatgcacgtggacaaattgtgagagggacagaaaaatgggcagaaaattctagaagcgaagtgcgaacaaaggaaatgggcgcacaaaaattgaatgtgaattggcagatgtaaaaagtgagaaattgtgaaaggaaatctgagcacaaagttgtcgtggagatgagccaaccgatgagaaaagattgaattgtgaag

SEQ ID NO: 3126 - DNA, 2270 bp, Heterodera glycines
ttgtcgccaatcttttatttgcgccacgcgcttggggttggggtgggccaagctgaggcgggattggttcccgctcctcttcaccgctctcgtccctttttcctctgctcactccgctcgctgtgccgtaaagggaatggtcccctctttcgccgttcgtcctgatgggtctgatgctgctgaccgatccgatcagcgccaaagggggacgagaatgggaggggggaggggtgacaaaattgaactggtactgttggatgttatacagcgatttgctgcttgcttaacggcaccaccgacaagattttggtgaagggcttgtcggacccctttgagcagctccgaacgggcgggagttgctcgacaagattggttgtgaagggggcttgtccgaccctttgagctgctccgaacgggcggagttgctcttcgctcttgactcgatgaaacgggttttgactcccgtttcctgcggcggatgctccggctggcgggagactgagaccgaaccgcgagactccggctgcgggaatctgaactgctcgaacttcgtgacgttcgctctcgacttgatgagcacgggtttcgactcccgtctcctcctgtggatgctccggctggcgggagactgactccggcgatgcgcgcttctccggctggtgggattagcggcgacgaacgggcctgcccttcggtggacggtttggcaccgctcggctcttccttccttctctgccctacttggtttcgtcgacgacgggaattcgccccgtccctacggctgctccggctggcgggagactgacaccgatccgcgagactccggctgcgggagtctgaactgcttgaaattcgctgacgctccgggccaactcccggattctccaatgccaaagggaaaggaactgggatcgggaggattgggggagaacgacgagggctgccaggaaaggaaggggtcaagacgtgaatgggcgcctccgtttggccccgcacgagaatttgccgaatgtgatggagtgtggagggtgcttttccctcctttccgagtcctccaagccgtttcagcacgaatttattaaagcaaaacgaataatgaataaaagcgacgaattgatcgaattgggcgatgggacgggggaattggaggaattggtcacaggcagaccgaatatgaagcgaaggggagtggaagcaagagaagagaagagaagagaagagagcgaccccttggccgggggcgcttaaatagacaattttcgaagggggaagggcaaaaggccatgcacttagacaaattgtgagagagacaaaaaatggacagaaaattctagaagcgaattgcgaacaaaggaaatgggcgcacaaaaattgaatgtgaattggcagatgtaaaaagtgagaaattgtgaaaggaaatctgagcacaaagttggccgaagatgagccaaccgatgagaaaagatttgaattgtgaagggatgcgatggggcaaaaatgggacaaaggaacgggcaaaatgtgaatggtacgaaatggagaaatgcatatgagaaattggatggaaaaggggcaaaaattaggaatgatcaattttgaatgaattgatgaatcgggactcgccccgatcttctccaagaacatccctcattctttttgcttcgattgagtcccgtcccgttcatttgtgtaataggcggggattgacccgccttctcgtcgccaatgaaaaaattggcgacattgcccgcggcgccccttgacagttgaagctccgaagcgtgtgtccatgagttgtagcaacgggttttcgaacccgttttccgattggcattgcgcctcgttgtgttgaaaggggcattgctcccccaccagcatttgtcatggcaaggatagccatgcatcagctttttcgctggcagtccgtagttcacatccttcgactttggcattgttgcccagcatccgtcatcgcaacgaatctcgattttgttaaattcccgcccactcacatttgtgactcctcgttctgcacactccgtggtgcatgggactcttgggccctctcgaaatggaaggttcgggtccattcccgatgctcgaatggatggttggcagccgaacgttccgacaatgctgatgagcatgatcagcagtgccatcccagttctttggttgaattgcgcctccgttttcgtggtacatgacgttccggggaccaaattgcccggtttctcgagtccttgccgatttccttgggtcaacttcag

SEQ ID NO: 3127 - DNA, 3853 bp, Heterodera glycines
  unsure (1)..(3853): unsure at all n locations
ggtttttacatttcccaccaaaaaacttacnggcgggccgttggttgtggagacaagaggagggatggatgcgcacatgcactttgcggtcccggtccaaaacgtaacactgggcagaggtgtcgaaatggcacaggttcatgaacagtccccggcaaattgcccttctaaagtatacaatggcattagataacccaaaaaattgaaatttgcacctcaacatctccaagttgttcatggaggtgctgaagtgcaatttctgcttgacacattcggcgtgcaactgtttcctgatgttgcacacctgttccatgcggcgcagattcaaattgttggaatcgcaaaattcctatagaagacaaagagtgagtttttatctacgattacgttacatttggcatttatgccaaaaatcggtttcaaaattttcgatccattttaaattattgaaagtcaattttttggaataaatgtcgtttttatccatttttcaaaattacccccccccccctcccgacaccgtctcgaaattttcttcccattccattataattgcctttattttttcctggattcgtttcaccgatgcgtaagcgcggtaaatttgcaccattcgcacgtggtcaccttcgttggtgcggaatttcatgtcggaataatctgaaggtaaaactttttcgcgtacaaaaattgaaatttgccaactcgaagaaaggccggtgctctcctggccgtacttttgcttctcattcagacagaaaaggtcgtggcccgaaaattggaacacgggatcagcagaaagaaaggagacgacggtgcacgcctcctcaagacagcccaactcggaggcggacagcaaaatcctgagaaaagcaaaaaaatgaaaatagtaattttattccaaaatgatggcactttgcatgcgcaggttcgacagggaatgccgtgagtttagtgccctcatcagtgatttcgagctgtccctttggactcaatgtgatggctcggagtgcgagcagttcttccaccgcggcgtgcacttggccaatgtcgggcggagagagaaggtgcgcgaaggaagtcaccttttggaccccaagttggagcagttcgagcacaacctgagcatggttttttgtaaaattgtagctgggaattgatttgcaattgcttttctcacggtggtaagtcggcagcgttgcaactcgggcacttgttcgtcagcaagagtgccgtagtcctccaatgagtacaatcggtagcatttgccggggccctcgcgccccgcacggccggcgcgttggatggcctgggccttggaaatgttctccacccgcagcaaatccatgcgattggaagcggcgaaagaactgaaaatctaattcgtcaaaaaatccaaggagagcgaaacccaatttcgcatccctttggaatttaaagtgtttccctctcactgaccgtcttttcactttgcccgagtcgatgaccacgtcaatgccagggatggtcacagatgtttctgcaatgttcgtggcgaaaatcacctttcgatgaccctgaattcgcacattcatttttttgctaatgttccgagtgaatgccaacttttggcggtggctcaaatgcccgttgagtgaccgcagtgggcaccgccgcgtacaatgccaccgcgtgaatgcaatccgcggcatggtccgatttgctttgttttagcttcctcagtatgttcattgccgtgtcgatttcctcttggcccgttaaaaatactaaaaatccgctctccaccggctccgagtcgtttaggtccaaaacagttgaaatggcgttgaacaaatagtcgttgtcgtccaaattcaggtcgggtgagttaaaaacctgaaggaaaccccatttaaactcttttttcaatcaaaaaaatcctccaattcaatgttcatcaccttaacggtgtgcatgcgcccctttatataataaatgggcgcgccgccaaaatatccggaaaagggacgcgcgtccaaagtggcggacattaaaatgatgcgcaggggcgcatcgccacgtttgacgcggtcgagttgcgcttgccgcaaaatgaacaaaagcacatcggtgttgagctgacaaaaaggagagaggtcaaaaatggggtaatttgacataaaataaaataggtgccatttgtatggtaaattcaatgaatgaatgccttacggaacgctcgtgtacttcgtccacaatgacggcggagtaggcgttgagccgacaattgtgcagcaattcgcgcaagagaatgccctcggtcatgtaaacgagtcgagtccgttcgctggtctgatcttcaaagcggaatttgtagccgacctaaaacaaatgaagtctcaatttctgccggataggttcaaaatgcggtactcattgcgtttgtatccacatttttggtcaaattttttcaaaattttttttttcttttttattgtcagaattgcttttagattaatggaaacacttaaaaaacttcaaggatcctgtcactggtcagcatacaaacacaattgaatcgacgtggcagaagttcaagcagcaacacaaagcgagatttggcagtcacagatcacttttttccacatacatttctgattttttgtggcgtaagcaatttggaggaccggacattttttataatttgtggacccaaatcgcggaattgtacccaataagcacgtaaatctccttttatttgttatttaaagcaattgcgacaataaaaaagaaaaaaaaaattgaaaaatttgaaaaaaaaaaagggggatacaaactgaattagtacccctgattgtgcctttctatatatttttttgtcttttaggcatctgaaattttttgcgcctaaaccttagctgttaaactattttaaaatgccatcagaaaaattggtaaaacacaagaaaaggtcacttgagatccgaattgagaaagacaaggtaagcttttattttattaccgaataatttttttaatcaaatgtaaataattctaggccaaaaaggagagacgtgaagaaaggaatcggacacgaaaagacaaaggagaggacgcagtgccaaagcaagtcccaagaacaattgagaacacgcaagaagctgacgacacctttgtcggatcagacgatgaagaggtaatttgacaatgaggaattaaggcaagtgaaatattcaatgcatttaaaggtattggaagacatggacaatgatgcgatggcacatttttttgaagggtctgcgaatccgaaggttcttatcaccacttcgccgagagcaaaactcgtaagaatgatattatttaaaaaaataaaaaattttctcagaaaaccttcaaactctgtttcgagttaaaaaaggtcattccgaatgcagaaattgtgtctaggaaaaacgttgccataaaacgtgttgtgcggcaggcaattgagcgtggtttttctgacctaatggtggtgcacgaagatcgcaaaaaaccaagtttttattcctttttaccattatttccaattattaattcagatggaatcgttttttgccatcttccgaatggtcccactgcgttttttaagataaattcacttcaatactccaaacagatcaaagtgtattttgttttgtttttctcattttcgatattgaatttgcaggacgtcggtgaggcaacggaacattaccctgaacttattctgaccaacttcaacacaaggctggccaaaacggtgagccgaatgttcgcctgtctcttcccgcaaaaagctgattatggcggcagacgagtagtgaccttccacatcagcgcgactacgtctttt

SEQ ID NO: 3128 - DNA, 942 bp, Heterodera glycines
cactctatagttagcactaatttaaattaaaacaaaacaccatatttaaattttgtattttttcaaatttccttttcccttacattaatttttcacgaaaaaattcattttctttattaagttttgggacttttatcatggttggaaagcaaaaagttgcaaattcgccaaagcaaaacgacggcaaagagaaggaaaagcaattgagagacaaaaacgcaccaaagtaatttcctaatttctactaaaatataatatatatttttttagaattccaataaatgcctaccaacgttacgtcacgcatcgcctgaaggtgtccccgtcaaagaaattcggcacttcgcgagaagcgatggcaaattttgcagctgaatggggggccatggagcctcaaaacaaaaaggtgaaaggacataaaaatggagaagaaacaatcgtttttgcttttagcctttttttgacgaatatatcgcggagagaagcgaatacagcaaaaagatggaggattataaagtcagttcgggggaacaattcaaattagataattacttttaatgttattaatttgcagaaaacagaggactacaaatcatttcaaagttaacaatttcgctcaaaatttattgaatttgtaacatttaagtgcagaagtcggcaaaaaggcggaaattgacgaaggttttgcatttttcgtttttaagcattttttctttggcatagggtcactcgacgatcgctgggcaccatcgtccgttgcatttgccaccgaatgtcaagcaaatttttagtcgcgaatttttggagtacaataaaagtaggggtatttttttgtgtattttttaccattccatttaaggccaagaaaaaagcatgagagacacacgggcgcagataagcgaagttgaggtaggaaagggcatttattttcggttgaattca

SEQ ID NO: 3129 - DNA, 2093 bp, Heterodera glycines
  unsure (1)..(2093): unsure at all n locations
tttgaatagcaaaaaaaagggcgtcgccggagaaaaatttgaccttcgtatgaaaaatcgggcccgagacacccccctgtcccaatcgtccgtcgtatggcccttgtgctgagacaccccttgtgcatgtgtgatgggccgtatggccattttccttccctacgatgtaaaaggggtaaacaaatggcagctaaaattgcattatctgccaaatgcccttcccccgttcatttctccatcgttttccctttgcgttcagttcactgcgttcggggcgactttgacgacgacacggcatttccggacgtgaaggtcatcccggtcggccactttcgcatcggaattacacatggccaccaattcattccctggggcagtctcaaggcaaacacacaaaaagggggggggggtaattagcgagagagcattttaaaattcgtgccttaggccatggaactcgcggctcggcaaatgaacgtggacgtgctcatctcgggccacacgcacgagtgtaaggtgtacgagaaggagggcgtgttctacgccaacccgggctcggccaccggcgctttttccatcgtcaaagagtgggcggggccaattaattaattaccgtccaaaattttttatttgttttttaagcgatgtcatcccttccttcattgtgatggatgtgcaacaggatttaattgtttcgtacatttatcggctgctgaacgacgaagtcaaagtggaacgggtgcaattcagaaaaaacagagtcgacgagtgattaaattggggggggggggggggtaaagagagactaattacagtggggacaaatgcctaattaataaactaattggcggcactttaatttaatttgacacttatttaatcaccctttgtatcagtcagccaattaaggtcattgtttaaaaaggagatattatatttgatgtcaacagttgctaccatttttgtctgactgaaattttgtaatttattttctttaatttaaaataaattctaatcaaaactaattattttaatcaattaagcaaaatggtaaattaattttttatttaaattgcgtaagttcaaaaaaaagtgattgaggattttcttatgcgataatccatcccccgtctccaaactttgtcatgcaaacctaaaaaatttatttaaatgtcatatattttttctgttttttacgttgtatccgcacggggtcaaacagcaccggcgcgggtacgccttggaataggtggggcactcgcgggccgaatggcaccacgaggcgggacggggcacgacgcatttgatgcgaatttggaagggactcggacagtccggggacatcagccgggttcgggcttctttaaatgtgggaaggaatattatgggggcattttttggtgctcacccatttggccaattcgtctgagcatgggctgttgcacgttggacacgcacacgttgtagccacagccggtggggcagcaaatgcgcgaatggagcgcatttgcggcacagtcggtattcacattacaccaaaaagggggacaaacaaatgcattggcatttccaaaaaaaaagatttcggcacaccaattcactgggtttgcctgccgacagttgtagccgagttcgtccgcgctcggacactgcgcgtccgcgtgccgtcggcagcagtgggcgtcgcttgcccgactgtgacagagtgtgcccgaggcacaaacgcccgccgccgagggccgacagcggacaaaatacccttggcacgatggaaagttgccgacacctgccgagggcaaaataacttatccggaagaggggggggaatgggcccgtgccttcgaagatgtactgcttgtcctcctccacttcctctgctgctgctggtgggttcagtttccgtcgncattcctccgccattcncatcagcagntggcctttggtcccctcccctcctttctctcctccctctttttccttttttgcccctcccccttttcctcctctctctcttttttcctcctcctccctctcctggtgctgctccatcgntctccccaacaggtcgaccacaatgcgctccttcttccccc

SEQ ID NO: 3130 - DNA, 6806 bp, Heterodera glycines
  unsure (1)..(6806): unsure at all n locations
ggggagagattggatggacaatgaatgaaaatgaacagcaaaagcagtgaatacnaacagagagagggagggacggatgaatgaatgtgcgcatcgttggaggagcttaaaaaggaaatctacggaacatgggcagcccctaaccaacaaaaatcggaggtgggagcagttcgacgaccacattttttggttttttaaaggtccacaatgccaattgtctctaaaaaaatttcctgctcctcccctcggtttggggcttggaaagagatcgaaaatgagagaaaagctaattgagcaatgtcacagattgaacttaaagcaaaattaaacaccgcgggagggaatcggagggaatcaccataaaaatatggtaaaaaaaacaaaacaattattgtcgcaaaacgtctgcccgtttggttaaaattcgcaggtacgccctcaaattggtcaatttgccgacacttccgccctcgtaaaggtcttcaaagtgctaaagaatggtcatttatgtgtgttaattgctttattatatactaattaatcggacattttacactgtgtgattgaataattgtataaatataaatttcaataataatacctttatcgtgtcattgcaaagcaacagcaaattttgcagcgtttctcgctgttccactgggtcaaaatttggcagcaaacgcaaataaatggcagctgattttgagtgaaaaaaagttcagttcggtttggtgccaattaaaaaccaaataccgaaaagctcgtcgggattgtcgcgcaccttaatcatttttttggcatgaaattgaaatttattattccaaaatgtaaaaagtgaaaaaggaagaataaatgtaattgtaaagctgtaccatctccagcactttctgtgcaaattccgagtgaacggtgcccaagtgtcggtcaacggcacgttcggccaacatcgaaagtgcagtgaattgctgcacactgatcgccattttcacagtgtcgatttgacgtgcctcttcttgcagtgccaaactcattgtctagaaaaagttacattaattaaaacaaaaaaaaaaaattgtttaatttatttctattgggaatttcccgggttttggttcaatgtctcgactctcgaacaattccatgtgaaaacgtaacaattaaatgatcggattgccacctgaagcagtgaaaatgcggacatgaaggcccggaacagcaactgctggtgtcggcgattgaccgccacgaagcagggcaaaaagcgggaaaggcacacgtgcgcctccggcgctctgtcacggctctccgtgttaaacatcaccagcaaaagatgggccaacgccttcacactttccgcacttccaatgcgcagaccaccgcacaacagccaaccgcaaatgtgctcggtggcacggaaggccacttgaggttcctgcaaaagagaaaaagggagggtcaacaagttcgagcagtccatccaattggccacaaccatttgggcttggcgtgcgcagtgaatgtatttgtccaacatttccattttgcgttcatccgctgcgagtccgtcgccctcctccatgtccgcatcggtgtcctcctccgacgtgttgctccgcgtcatttgcgttacgctgcgaccttcggccaccgcccgttcctgttcctcctccaccatgaaagtgtcatccacctcgcgcacttcgtccagcgatttgacgtaccaattggccattttggcgtagccgtagaagcggaccaagtcgccgatcatgtccaggtaggagagcagtccacggccctggtgcagctgcagcgcgtgccaaatgattggcatgaacgtgaccgcttcggtctcggagaacaaacagcgccaggtgagacactgacaatgggaaaagcattcccttagaaaaaacaattaatttgccccacttggtaggccatagcacgctcctcagccgaagtggcggcgagagactcttttgtgatctgaaagtgatgaattgaaaaacccgtatttttttacattatacgaccgaccaatgcctcgtagagaccgtccaattcgacactactgcgcataaaacggcccgaacggagcattgcggtgaaaatggacatacaacggattcgaattgggtcgtccaactggaattagcactcgtttacccatgaaagaacgaacgaacacattaatcaccttggccattgggttcagatggagggaatcgcgcgaagaattggatgagtaggacggagatcgatcgatgttcgattgatccgtctgcaaattgcgcgtcacaatgttattgatcgcatcgcaaaagcatcggagggcttgctgaaagaggcgcaaattgggggaacagagagagagcaacattcagcaacaacaacttctgtttgttcctccttgggatagtggtggtacatcagcgagacgaccaattcctgcagaaaatgttcgcgcagagtcaccgtcggattggccaacacgctgaaagccaattcgtgccaatgggacctaaaaagggggagagagagagagacatttgagcctatgatttgcattggcacattttggtattaaaagacagttcgattttgaatgcattgcggcgcgctttttccaaaaaattttcgggaacaggggggccagcggtgccgataggtgccgccgggcaaaaattttttttagaatttttaatggatttgttaagaaaatttccaaaatttgcgaacctccaggcccatgaagatttaaaactcacaatcgaaaaccatacccaaatccagggctttcttttgagctcaaaccacaatgtaatactaactttccaatgtcgtccatctccaagagggggaaaatgttgaagagttttcgcattgcgtaatgaattagctgctgctcgtactgctctttgtccgcgggacgtttccgcgcggaatgcatggccaacggcgtgtcgtgttgtgcgcgttggaataccggccgggcaggcgtggccagcacatcgcggcccacttcgtatgtgccgcccaaaccgccgtgcaggaaactgtcagaataatcggccttttttcaaaaattgattgttggcacaatgctcactcactcgcccacaaattgtgcataatcggtcattgtgggcaccaatttgaagcgacagtccaccaatttggcctccgtctcgggccttccgtaacggcaggcgcaaagttggagaagacaccgccaccaggaacaaaaggttggccttgtcagcgccatcacttaaaatggaactgggatagggaaattgaacagcacttaaaacccacccgcgaataaacaatttctgacggaaattggcccggtggaggaagcactgctcgtcctccgtctgttcgagtccgcccggctcgtcacagctgacaagcgcacccacaaattcgaccagctccgttttgcgtctctccaccgccagtcccatgacggcaaccacaaacacttcctcgcacaactgaaaatttaaaaaagccatttcagctgattgtgagagaattcggaccaagagaaaagagagatgactgactcaaagtgaaaatatggcagtaaatctgtcacataaaaacattttggtgaggcaattcggcgacccttttttgcagtaagttcaaattttttgttaaaccagtttttccgtacttttcttttattaattttttgtcgtgatagtgtaaaaatgaaggggttggacctgttcattccgaattgggtccaactcgctgataagcatggccaacgcgttgaagaacagcttgtgcttgaacacggtcttcttcttgcggctgtttttgttcgtcgtcatcgtttcattttgttggctctgtttctttatgtaatcgctgatccaaagggacaccaactcatcagtcacttctttgaactgagcttaacaaaagaaaagcatttccctttttcgtgtgtgaccatttaactgtaattgcttccatggacgagattcttgagcagtgtgacccggtcgcgggtcttcaggcgatggaagtcgcgattttcggccacaattttctcaagcgcagcccgacggaccatcgggtgttcgtcgttgacagcggtgttgagcacaagttgaatatgggcaggggaacagacggtcagctgaaaacgatggagtacggaacaaagacattgatgttctagggatgggagaaccggggaaattatgaaatttaaaaaaaattacaatttgtatttaaaatctaaatttctttcggtgccatagagcaggaataacagactttgcccagtgcttccattcggcattctctgtccgggtcgttgaacgccttcatcagcactgaaaatgaatgccattgaatgagcaaatgtttttgttttttgcactcgctcactctctttcggagtttctttgatcgcttcggtgtgctccacgtcaatttcggcatcttggacggcggccaacgcgcgaattgccgggattcgaacatcatgactctgtgaaacaaaggcaacccaataaatgttggacatggtcggaacaggttcaaatacgagttttccaagtttcttcaacacttaccacgtcccttcggcgatgcgtgagcaaatcgaacagtgtccggtagtgttctgctggcaaagtgcacctggtgagatggatggacgcgttgaattggtccgagttggagcgggacggcaaaagcaccggagaaaggcgctcacagcggcgacgaattgtggacacaatttcgtcacattttcgagaggtggtggcctcaaaaatcagcgcgatgagcagacacaccgcggcacgcatcaaatcggcattggcctcggcgaactgagcaaaggaaaatttaaaggaacaaaaaatcatttatttctcaaacctttttgcaatagtccaccaaaaagtccaacacggctccgttctgcgctttgtcataaaccgccaccccaaagttgacaatcgctttcatacaacggtgacgcgaagcccgcacattccccgcactgacaatgagcaagtcgagccgaaatttgagctcatcgagcagtgcttgcttctccaaatcggaatggaccttaattgaacacagaaaaatgagaaaaaaagaaatgaaatggaccacaaaagcgaaaaaaatccatcgttaggaaattgcccatccaaaaaacctcttttataccgtcgacctccacccgaaaaaagattaaaacaaagaattccaatgacaagacctggccaaacaattcgaccatcggctcaatggcgtgacggttcactgcgccgtcattccgcgcgtcatatgcccgtttgagataagtgctaagtttggcacgcaatttagcacaattgtccgcttcttcgtccaaattgttggaaaccatcgaaaaacaacgcaaaacaaacaattgtttaatttatgcttttgactcttaatttgagacatgtttgacgttaattgtagcaaaaggtaagtaaatatggcacatttaccaaaaattttttgtatttccaaataaaataaatcctatttattgttaaacatacggtcaaataattacatgactaacacaacagagaaaacccgcacaaactgaagaacgactgacatttgccatcacatttcttccaatgccctcagcttagccaatttccgattcactcgctctttcaattccctctccattcgctgcgcctcctccaactcccttttctgttcctccgcctctttgactgcttggagtttcaactggcgaagttcttctttcgccttggccaactcggcctcggatttgcgttcactgtccgccatttgggggaattccaatttggcattcatctaaaatttaaaacggaatttttgaaaatttgactaaattgtgcaccagtcgttcaaagcgtgtgccgaggtatttcttcatcgcgcgcggtgccatctgaaggacttcatttcgcaattggtgttcctctgcgatttgttggtcaactttgtcgttggcttgttgaagcttctcaatgagttccagcacggccggtccttaatgtatgatgaattttaaaaaagtaaacattaaaataagtataatttggaagcaccttccttcctcgtccgactacgcaaaaaataaggcggcgacgtcgttccctccattattattatgtcaaatccttaagaaaattatttaaataaagttcaactttaaaactttttagatgaccataggaacaatgagataaaaacaacaattaagaaaaccaaagttattggatttttccaccttcttaattagggcaaaaaatttaaagatttgaatttaaaaaagcccaaacagtatgacaattataaataaataaagaaaacattttttatttaaatcaaaaacaaaaatacaaaatgactaaaacaagagaacaaggacgcaaaaggaagcaaccaaaaagcgaagacgcagatggagacgagaaaaaagtcaaaaatgatgagcagcaaaataacgaacagcaggaggagggacgggaaaaggaagaagccatcgttgatccagagcgaatgaaaattttggttggtttttggatttcgaattgttttgctttagtggccaaaatgcaaaatttgtaaaaaaaaaaattaaaaaaggaggcgcggaaagaacgcaaacgaaaaaagaaggagcagaagaaggcaaacaaattgacgcggaaggaaaagcgcggggaacagaggcgagcggaagcaatcgaaagagcggcggaagcgaaggaggaaaagtgaaa

SEQ ID NO: 3131 - DNA, 5364 bp, Heterodera glycines
caaaacagaaaatttaattgaaggtgaagaaaatttcttaaatttatatgaaatatgatactagtcgtcgaaaactacaaaaaaaaaagttgcacaaagcacatacctatgtacctacctatgtaggtatctgttgtcaaaaaataggacttacctactcctctcaaaaaattagcctggtcgaaaatttttaaatttggcattatgttttaaaaatctctaccttgttttttttatgttcactaagtttaggatgtttgttcttagtattctcaaacacacggttaaaattgagcctactgcccttggtagagattttactgaggcgttggtggagcgtttaaatcgtcaatttgctaattacgtatgtactttgaatttaaatgtatcatgttacaggtcaaagagtattcaggttataccaaatgtcgggctgtgcattactttttacgactttaaaaaatacggcgcttcttacatattggtttttgtttcttgctttattaagttaaacaattttattttatagcccggtgacgcatcaacgcatacgcctgtcctattccgttatgttgtttttcaaccaatgataaatgaaattcttgagggcaacatactgcgctcgaaccaggaagggatcacaatcagtatgcagtttttcagcgacataacagttgcgccagacaaattgcctgcaatttctaaattgtatttattttattttaaacattattgtctaatgttctaacttcttttttattttagtgatgagtctgttcaagtttggagatgggagtatcaaaatgaaaatggtgatatcacgccattctatatggatccgggaaaacgcgtaaggtttgttattgttttttggtatagcaatgatttgaatttttctatattttcccgcgtgtgctaggcattcattttttccctgcccgtctattagctccgccgggaccctcccccaccccttctcccggtctcaaattttaagaaattatccaatgctttaaaaaattttggtgtaaaatcaacaacaacaaaaaatatgcgcggcacattcaacataaagaaatagtccggcggtgcagataagctattgacaagaataattctgtaagatggctggctatgtatggccttaccttttttgctttttgggtcttatttttcttacagatttaaggtgataagcgttaagtatcaaaatgtcgaaccgggcgctcctccagaagccaccaaagctatgacgattgaggttaataccttctgctttttgtattatccaaatttttcaggcatcgatgttcgatatgggcttgggttgtgtggcatggtgggaaccgcagtgcgcaagtgaattgaaacaggaagcaaatgatccaagcgaagatgaatagtaacaaacgaattgaagattttgttattgttttatttgttctaacggattcttttttaaaaatttaccatggtgaatgaatggatgcatttatgttaattaactcatttcatatttcaatttttttttcatttacttaatgtctttgatttagtcaagaaactattaaaagtatggctgcaattgagaagcctcagattgttcaacaacccgtgcaagtttttggtaggaaaaagacagcgactgccgttgcattcgcgaagaagggcaaaggcctgataaaggttattctttgccgaagttgggtattgtactttttcggctagttttagaattgtttaatggggtagtaaagactcatttattgagacaattcttttacaagctagaaactagtcaagactttttaaccagtgtattaccgaatttgttaccgcttttctacatttatacattctcccatgcagttttctcaattaaacattcaggtcaatggacgtcctttggagtttattcagccagaaattctgcgcatcaaacttcaagagccaattctaattgtgggcaaagacaaatttgcaggcattgacatacgaattcgcgtcaaaggcggtggacacgttgcacaaatttatgctgttcgtcaagcacttgccaaatcggtggtggctttctaccagaagaatgtcgatgaacaaagcaaaaaggagctgaaagagcaatttgtcgcctacgaccgcaatttgttggtggccgaccctcggcgccacgagccgaagaagtttggaggacctggagctcgtgctcgctaccagaagtcttaccgttaagatgtatgggataccattttttgacgatcctttttgttgttgatgtaatgcgttatcattaaaattttgttggaaccaattagaaaatccacaaaagtcatttccttaagaaatcatgaaaaacgccaaaaacatggatccgtaaaatggtaatgtaaaaccaggctaaagagggcaaaaaaaaaattgtttgaattaatttggctttatgtttatttgaaaataattaaggtaaacaaatttaatttcgtaattaggggtacctaattgaaatctcgatttggataaacatatggggaaacgaaagccacgtttaaattttaaacgtaatggtattctcacgcaaaaataaagccttgtgattcctttcttgttcgaacgttttattgctgatagaacttcgctttcaattgatgaaaaaattgattattcatcattttttataagcaacggtttgtgtttgtgtcatccatttattgccccatccatttgttatcaattcgtgggtattattccccatttaatttttgttgtttgcaatatttgaattttatctaaacaagattggttttttaaatttaattatggtatatgaatgattatttacagaaaaaaaaattaacttatgcgatatgccctaccttaaattgacttttcttttgctgtcgcttccgttcggttgcccattaagctttgtcaatcatcgtcttgaccaaccgcagtcagcagtcacttcgggtagtccccctgttgtcccaattgcctcacttctcttgtgccgctttaagctgatcgcacatgtcccttaaatatgttcctttgtcgtgcaacgcagcgttgcatccctcgttcgtgggtgtgcgaccaggagaacgattgttcggatgggcaggacgagaagaactgcggtgcattttatacctaatggtttcgttggacttttctttttatttgtgcagagactcctcaaaaacgatgctctgaaagtgaatacgaatgcaaaaacacacaatcaatgcaacagaatgcaaatgacaactcttggctcaaccacttggcccgcaccggtttcacacacacgtgcattccaaagaaatgggtttgcgacggggaggccgactgtgtggagaaggatgacgagttgaactgcgaaggaagtgagtaactgacgaaaattcgtcgatcacaattcttttttggttattcttttctctgatcggcctttctgcacatgactttttcaaatttgtcaggtttctgtttttgatatttcagagcttaaatgtgacgagaaacactttgagtgcaaaggctttgacttgcattctgcgacttcgtgcattccaatcgaatgggtatgcgatgggcaggtaattctcgactaatattagaggaatagggtcaattgttctgctttcatttaggctgattgtttggacatgaaggacgaagcaaactgtacagctaaagaaacgaagcctgaatgtgaaaaggactctgagtttcggtgaatcactcattaatcaattcttttactccaattgattctcaaggtgcgattctggtcaatgcatttacaaaagttggcgctgtgatggggacagtgactgtatggatggaagtgacgaaaacaactgcaaggtggacacgtgcggttctgttgacaagttcaaggtcatcacgcgaagagtccacctgaaaatgcaaactgacagttttagtgcaaatcatcgactttctgcattcccaacaaatggaaatgcgatggcgaaccggtaatttaatgttggaatttagaaatttgtttatcaaacctaatttcaattcttatatgtgttttgatagctaagtaatgcaaaaaattctttgacaggtaaaagtcgaaataaaatcaggcgatcggtgaatgacataaggacaaaaaatgtttttggttttgttaaggactgtcctgaccactcggatgaaacggactgcgaaggggttactgctcaacaggaagtgcactgcaaggaccatgtttgtttcaacgtctttgcccttttcccaattcaattgtctttttctgcactttgtccaggagtttgcgtgtgcctctcgttcccaatgcatcagcagtttttggcaatgcgacggcgacgaggactgtttcgatgggagtgacgagcacaactgcacacgcattcagtgcaaaccgaaagagaaggcgtgcgctgacggaaagagttgcattgacgaggaattgtggtgcgaccgatcggaggactgcgcggatgggtcggacgaggcaaattgtcccaacaatgacaaggggacggaggaaaagtgcaaattggacgagttcacctgccccggagagaagtcacgctgcataaaataccttgatctgtgcaatggccattcgtccaacgaatgtgccaagaagggtctttgcaaccaggaaataagtcagtcaaaggcattaactttgctgactttatatgattttttggaacctatccatttaatattattttgtagactctgccctaaaatggtttctttaatctcgaatattgcggattaggtttctcaatgaaattttaaaattgtagggtccggcggaaaaatgagaagaaaattaggatgttttcaaaaattcccatttttaattttaaaaatatttggttacgcgaggtaagatatagcctcctcattgtcagtcctctggctatgcacacccttccgtccactctatcaaacgcttttggtgaatttttcccttaatctgtgcagaatcatgcaagttgactggggatcagaatgacccgtgcatttcccggaagatggccacacatggaatgctgtactactgcgccaagggttacaatgccagcgtaatcgcggacaatcagcccggcttttgtgaaggtgcacaattgaaaaaataatgcttgtgtctgacggcatgcatctacttatcagacatcaacgagtgcgaacagcctggggcgtgtgaccaaatttgcacaaaccttcctggcagttaccattgcagttgctacccaggctaccaattggtcaactctgactctgacaaacccgtaatgcataaatgtcgtgcgattggaccggacccgttgctgctgttgg

SEQ ID NO: 3132 - DNA, 4714 bp, Heterodera glycines
tgatcaacaagttggagtcggcagtggcacttgactatcggcacaaccagagcactttggtgtggtcggatgttagcaaggaacaggtcggcactaatttcaagatgcaatgtatccgtttaatttctaattagcttaatggcaaagcttgaccgttcatttcccagataatgatttgtgcgggtatcaacagtacccctgggaaccacgcgatgctggaaagcatcaacagcatttgtggcgagaagagccccaatctgaccgtcataaaggacaatgtcactacgccggatggacttgccgtagattgggtgcatgggctgctgttttggacggacaccggactggacactgtcataaaccagaaacatttcatttgatgacagtctttttcagataaatgtctatgatttgcgcagaaacaaacggaaagtgcttttcgacaagggtttggacgagccgagggcaattgccgtggacccatccgctggtctgatcttttggaccgattggggttcggacgcgcgaattgagcgcgctggaatgaatggcgatgacagacaggtgacctttttatacacttattaatagtggccttgattgcttttttgtcacagattattgtacaaggcaacgcgataaaatggccaaacggtttggcattggacattttggacaaacgcgtgtattgggcggacgcgaaaacgaaacaaatcaacacttgcgattattggggcgagtcttttccaaaacaattaaagattaaaatttacgttgcccttttacgtgttttgtttctcgcttctgcaggtgaacatgttcgcgtcatcctccattcccatcagcacgttcgccatcccttttctttggccgtatttgaggaacgcctttattggaccgactgggaccacgagggtgtgttgtccgtcaacaagttccacgggaaggacttccgacaggtggtcatttacttctcgatcattcttttgctctttgttgtcgccactttcattttttatggttgaggtgttgcgcggcgtgagcggtccaatgactgtccgagtgtaccacaaacaagcgcagcccgttctgcaaaataaatgcgaggggcgcgactgcgaccacctttgcttgcctagggcattatatcgtttgtttttcccgatctaaatgatatttttaacttactattgtaattgacttatcgaacggcatttttaagagaaacctaccaaaaatgccgaaatccgactcaagggactgccttactcttgcgcctgtgacattggtttccgtgtcgatttgaacaacagttcaatgtgcgtgtcaacaactgcggtcctttccgagtcgactgtcttctgtcagtaaatgtctcattgtctggtgcacaaagtttctcccccgtttaccccgccgtttttcaaataatttttttaaaaagtattttttagtttttcggggtaaacgcgcggggtgaggtccccttcattatcagcttttgtctgtttctcatccaattttgtgcccaatttagtccaacaaagtaaacactatggccaaagctccttctcctacatgttcgccttcatttttctgggtgtcttatttgtgctggtaacaaatttgctcaatttgcgccttattttcttccccattaaaggcctacactttctaccgtcgccaaccgcgtcagttttctgcgcttcattttgagaatccaatttaccgccgaacggtggaggctgacatggacgcggaactcgaaaataccggcgacaattccctgggcccaatctccattttgcccgtaggtggcactcacaatcagagtggtcacctttcgagcggactgttgcatcagccgggcgagcttctgactacgccacagtcaaaattggtgttgaacaacggggcgagcaacggcgtacccgcacagcatcagagcaccccatacccaccggtggcattaggcagcaatgtgcgtccggatgaatatgggtacgagcagccacgacactgaggaattatggcaatgacattgctgtgttattacaatgacaagctcactttctcttccctcccatttcaccaattgttctttaaatatgcagggacaaaaatgaaaatgtaatttttaaaggataagaaaaggatttttggttaaacgttaagcttcagttagtttttgccttgcatattttctcaaaagtgccgatctttgtttttcacttttcaattctaagaatcatggtcagaatgtactcctttcatcttgtgcaattttaagcacataaagccaaaagctttgtaaacaattgaatcattgcttttcattgtttcaccgggtctgttttaattagataatcgtagccgactgattccctcattctgtgatttgcttaccctggttttcattgaattcatataaacatgtgtcaggcccgttgccggaaaattatgaggttagagttctttctactcgccatgggaatattttaacgtttaattttttatttgactactagattagtgtccattaaaaactattttgaaaggtgtgggagcaacttctcccccggacacgggtatgacatacgacgccaagttttcgctggtcaagttggctttgttctcgaatgcaccaagattggtttccccataaactccgattttcaaaactgtattgtgaccccaattttttaagtaattaaaaatgtctaattgtaaatgaaatttcctatccttctgtcatcaattcggatagcttggtttttatcaagttgggcggctttgccgcatacatttatgatgagcttgtcgaacaaaacattgggttaaagtgataaatgcaatttgaagatcaaatccgttttttgtacccataaaacatcgagtccgttctgtcctttttaacgctcgcaactttcatccgcttagttaacagccgccatcggcgtctgttcctgttgtgacatattcatttgttgactgttgccgttcgatgttaattcaatggccgccactccgtaggaaacctcattcccggcgtttggctcttcatcgtcatctgacaatcaaaggaaatggttgttgtaggcttttgttccctgcataatgctcagcaaaatgttttatgcaggggttcattggttccgacagaaaaaggagaaaaaggggctttcggcccgtccctctctctgcgacaaacccatcggctgttccgcctcctcgtcccatttgatcgggtaactcgtcacgcgcacatcctcgccgacaatcgttcgcttgagcttaaatgccgacgagtaaatgaaaaataaattgtaaaagaagtcaataagctggtgaccttttcgatgacgggctgagaaggagggttttcgacgagttccgggtcagtgtaagtgtgcgtgacgaaccaacctaaaacataaatggcatcataaccaaacaaaagtttatttaaaccgattttcatgaaaagctgttcacgatatttgcacttgagcagcaaaagagtgacatccataaaatcttcgggtcgaaggttgtgaatttgtggaggtggcgcctgaaaagaatttttggtttttatttatcagaaagttattggggaatgggccttctttctgtttcttgaagttatgataaaggtattttaatggcatggactaccgatttatttctttccaaattttttgactgctttttttatttattggaataaaaatatttcaaaggcacaaaacctcaaacaaaaatttgtgtcgtccctcctgaatcggtccgatgagaactgagtcgagcacttggtcgtgttcttctcggccatcagtgcccacgaaaaccaattcccattcgacgtcttaatttatgaattttgaacacggggaggaattgctgaagaaacaacacaaccttccttaatgttttcgaatatttcgaaaacaatttcgagtttgatgtggtcactcggagtggccgggttctccaacaactgcacactgacgacgttaatccttgaactcattttgaaggttttgactaaaaacaacaacaaaacttcaaattcaaaacaaattttaaccgatgtgaatttttgaaagaaaaaaataaataaagcaaaaatttggcattatgttattttagattcaattaacggaattccgttgcgtccattcggtgagtcgggggcgtttgggcccccgtttttgggccctcgtttttgggctccagggtcgtttgggccccaagtacagaaaaatgaaaaaacacacagtaaaaacaactttttaaatttcagcataaaatgtaaaataaacattttaaaaataaattcaacaataattttaacaataaaaaatgtaaaaattaacagaaattcacgggttcatgaggtaatttggacaataaaacaaaaaatcacgggttcattcgatagttgcgagaaattccccggagaaactccaaaataatgtgaaattgattttttgaactcgcatctccaaaattttgtcatcccatcagaactcattttagcgaaggtgtaaaggtggcgttcgtaagacaattttactttttgttttttggttgcaattgggttagccatttctgaaaaatgtccaaatcagaatgtacatcaaattggttaactattaaaaaataataggatttggaataagtaaaatttaaaaaatgagcgaatgttaat

SEQ ID NO: 3133 - DNA, 6455 bp, Heterodera glycines
tattataattctatacaatttaataaatgtatgcacattatagttgtataattcaaacatatagaaagagaaaatgagaaaaattagcctttgaaaaatcgatgcactaaatgaaaaagcaaaaaatcatattatattcatgcattgtaattttataataaatatatgacgcattatagtttgtataattcatgcatatcgaaggagaaagtttgccgcgaaaaatcgatgcaaaaatgggaaatggaaaatcataaaattttatatattatacatattatcattgtataatttaggcatattgaaaagaaatttcgaggtaagacatggccaatccaaaaataattgtttattaattgctttcataacatatatagggaccggtttttgaagcatatatttaaatctaatattaggcatgctattcggcattttgaaaaaattttggtctgtttgcttgggttcatgggtggatctgggcctgaattttcttgaaaaacccaggaaaacccaagctttgggatttcttcaaaaagtgataaattccatttgctgaatttgagtagtgaatctgctgatgtccagccgagatataactgaagggagggagagaaaaccggggatcggatttgagggaacggagggattagccaaaatgtgggccatggataatggccttctcaaaactggaaatgccatagatgcacgctagaaaatagaatataaaattcaaaattcaatttttaattattaaaaaaaattcttgaaaataaaactttgttttgtcaatttagcccaggcaatatctcaataaagtgcgtattttaatgatatgtaaaatatttattataaataaaatttagcatttgttaagcaatttgtaacggtttttggtggaaagaagtgatcaatggttgatacatggagatagatattgattgatcagaatgatgagaaaaaaattggcactttgcaacaaaaggccttttcaaaagagtgggatcaaattgtgggagagattcaaaaagagtggatgataaacacatgggaacatcgagaaaacaaagatcattatggattagatcaatgaatgataatttgatacggaaaggtatctgctcggactgatatgcattgatcaaagctaatcgatcaattttgatgtttaagcttaaggattgcactgatcagctgagaaaatttgaatgtgcttctaaacaacagcgtttcacgattagttagataaatgggagcagaaaaagggccaaaatatgtggctaatcgtctgatcagcttttcgaaagctcaaagaaaagtgatcgaaaattaataataaaattcgatcgatcaagcactgaccagcaagaaaatgctaagcaatcaaaactgatcagtcattatgtttattattgatgattgagtccgatcagttgagataaatcgtttcccgcttccgactgccgccacccactgcagtgcccgcactcatcgaagacgcgttgcgtgccaacatttgcgcaccgccggacaccgcaagtgaattggcgttgtccctgccgccacccgtcggcactctttgaatggcactgttggcacccgtcgcattggcatgccgtaacgatgctctgaaaaggggggtcatttaccttagttcccctttcagatcaaaacagattttgaatttgaggatttctgtttttgttttatttttttggccatttttaaaaatttctcggcggagcacggcacaaaaatttataattatgtatttgattgttgcagataaaaatataacttttcaaataatttaatatatttttttgcataactaaaacgccaataaaaacagaatttttctcccattttctcgaaagtttttaggatggtaaatagcctaggcctccgaacaacgcacttttccgagtgctcaagagtcttgaattaacaaatttgtccattccgttctcatgcctggtcgatttgctgcgtgccaaactgtgcccgtcgtgccgcgatgagccgcgtcgccgtcgtgctgcgcttccgcttcggctacgcgtcccgcgtgcggtggcggcacccagcgatgcgccgtcctccgaccgctcatcgtcgtccggctccgagttggacatctcaagcggctcgaactgacgcaactcggggctcgtcatgtacctgaaatattatttatgactgactataattttccatcgtccttggactaacaaagaaggacgtccttgaaaattcagattttgagtttgaaaattaaaaatgtcctttaaatttctttcatttttatttaattcatttataaatatcaaaaaatgctagttttcttcacacattgtatcaaaaaataaatttaaaaaaacaaaaatcctcaaatttcctgacaaattttaacgacctaatgcaaacaatttttttgtttgctttacaaaactgtttttttttgcggcgcgctttttccataaaaattttggggacagggtggcacgcgatgccgataggcgctgccgggcgaaatttttaaaaatttgagtgtgatttattaatagattttcaccaaaaaagatacaatttttgattatgagtagggaatagaattacatggaaatccatatttttttcctggactgtgggaggcctgaaacgcacgaaaaacatgtttttagcttggtttgaagcttctaggaaggatttctatatccatattttccatatttttccatatttcgcgatttatgtccatatttccatatttttccatattttggcattttggtccatattttatgtccatattttggcatttttcaaaaaaacctctattagaacggcccccagcagctatattagcctttttgagcccaaaacccgaaaaatttttcaaaaaatcattttttcgccaaaatttctcgagaatattgaataaatttaaattttcttaaaaattaataaattatgtcaaaaataagcaaaaaaacgaaaatttcgcttttgttgttgattttgcgctaaaaaaattaataaattttagcttttatgttttttttcttttaaaatgattgcacgtaattgccgaaaaaattcgagaccaatttccgaatgttgaccgactaattgcaaaacgaaagccgtctttgtcaaagcgccttaccgagtcaaaaaatttggaaatgtatctcatatgcaatttcaaccaataaatttgaagaaattttttgcaattttgcatgttaatagagaatacttagggctatcgaataaataccatgatttttggattaggttggcaaagaaaaaagttatagccacaacttgggcacgacctgcgccgaaacgatacagactcgagttaagcagctgattgtcagaaagtctcttgtaaatagatgcttttcttaatccattgttcaattaaagataattcaaatgtaatgctcaaaggtttatagcaactttgaaaaagggaagaaacaattacataaaataccggaaaaaaagaataattaagaacaaataattatgctaaaaggaacagagaatggaaaggttcagaaattaaaaacataacacaatgacaatacgtcgtagcaatttcaatgcttcgcctgctgatgagttctgccgagatgaattcctatttctcaatgctttttctctttacgaactttgcttgctatttgagaattccaatcagtaaagcttccactatacacaatgctaccactctccattttcgactccttaattgtcattgatccattgcactcaaatttaccattttttatttccgaacgcattatagtgaaagagccgccagatgttgtcattacggcattgttttctatttccgaattcgttatagtgaaatgtccaccagaatgcatttctgcatcgtttactatttccgaattcgttatagtgaaagacccgccagaattcattttcgcatagctttctattttcgaattgtcaatgcttatagctccaccactttttaaccaaacacttcccattggtaacttgtcaatgttgtcaatttgaagagctccacgactttcaataatcactcttttcattcccgagtttttgatatttaaatttccaccgctcttcacccaaacattgtgcattggtgactcttcaatttgtaactgtccaccactttcaaaatgaactctttccattcccgagtttttgatttttagatttccaccgcttttcatcgcaacattgcccattggcgactcggtaatttgtaaaactccatcactttcaataacattttcatctccaccaccaatggaaacacattcgattgttgtatttttaatttgtaaatttcctctggtttttggtccatttgtatacgcacgctttttgatgtcaacgcataatatgcgaagacagccccctgtcgattgaccaatgtataaattaccatcgcattcagcgtttatttgcccaacggttatgttttcgcgagaaaataacgctaatggcacactgacaattacatttcttatgtttttgtcttgtataatttccagatactgctctgtggccctgttttgataaactctcccattcacactcaaatcatgcccttcaacaccaacattaacattaggtccgtcaaccgcgtaattttgtccatttatcgaaatcttatttttcctgagttgatttcgcagagaagcaactaaatctaaaataaaaattgaaaatcttttcaagtcttagcttttagttggtatcaaaaagatagacatcccctcccattttgcatacctccaatctcatgagcactatcaaggttatgattatcttcagtagtagtgcctgctggcatatcttctatttgtatgcctccaacattctgagtatcaccaacattgcgattgcctccagtatgaaaatgaaaagatccttctgctggcatccctcctatttttatacctccaatgttctgagtaccaccaacgttgcgattgcctccaatatttaaaccaaatgtccctcctgttggcatccttcctatttgtatgcctccaatcttttgagtaccaccaacgttgcgatttccaccagtattaaaatgaagagctcctcctggtggcattcctccaatttgtatgcgtccgatgtcttgagtaccaccaatgttttcattgttttgattatttatatgtataatatttccacccattggctttcctctcttttgctgtttctgtttattcttctgtttttcttcccgtttggtgtctccaaaagtgctttttccatcatgcttgttatgcccagcgtttatataatcagtgtttcccccaatcggaatttttggaaaggaaacactccctaaaatttgctgaccaacaacattcgtatgtaaacgtgcagtatttctctgaacatctcccgcagcaattagtggaatgtctaaaaagataaaacgggataagctgcttgcaagcaaatttcataaatgataagaattttagacggatagtgagtcagagaattgattggcaatattcatcaggaaataagagagatttaaaactaacgtaacactaacctttgctcggtgagccgagaacgggaattcgttcctcaattcgattgatttcattgatatgacccgtggggaccgcatttttataaaactttccatcaactaaaagacccgtcccacagacatcaatatcataactgagcccttgagttgggtatttcctgccgtcaatctcagcgtaatagcggacatgttgctgttgcgcattgtttgctagaataaaaaataagcaattaaataattattttgtttgtaatgtacatttaaaaaaattatttttaaatataatgaaaaaagcatgttttgtgttagccatcaactctttacacagcaggcgcttgaaaattttattggtaactttttttttgattttatacaaaatactttgtgccaaaacttcaattagtattaaattggcaagcctaaaccacaaaaagaaaaaacaactgctaatgagcaaattgctagttacaataaatttgagcccgtaaagcgagggaaaataaactcaaaaatatcaatatttatataaaatatttccgatacgtttgatagacaattgtggtcgccagctgttttcaccagttttagtgatgcttaaacgatttctaagaccaacatttccatagataacgcatcccggtgcctcttaaatgttaattattttcatgaatcaaactttttataacctatacaaagagcatcatttcctggtggcagcacaccacgatcttcgtcattgataaggagatgttcctccttttccgaatcaataataagcggatgttttttaaccatctgaatttcaatttcgatgtccggtgtgtcaatttcgtaaaattggccgttgactttggcaatgtat

SEQ ID NO: 3134 - DNA, 1000 bp, Heterodera glycines
  unsure (1)..(1000): unsure at all n locations
aaaatcgatgcactaaatgaaaaagcaaaaaatcatattatattcatgcattgtaattttataataaatatatgacgcattatagtgtataattcaggcatatcgaaggagaaagtttgccgcgaaaaatcgatgcaaaaatgggaaatggaaaatcataaaattttatatattatacatattatcattgtataatttaggcatattgaaaagaaatttcgaggtaagacatggccaatccaaaaataattgtttattaattgctttcataacatatagggaccggtttttgaagcatatatttaaatctaatattaggcatgctattcggcattttgaaaaaattttggtctgtttgcttgggttcatgggtggatctgggcctgaattttcttgaaaaacccaggaaaacccaagctttgggatttcttcaaaaagtgataaattccatttgctgagagtagtgaagctgctgatgtccagctgagatatagctgaagggagggagagaaaaccggggatcggatttgagggaacggagggattagccaaaatgtgggccatggataaatgaatggccttggaaatgccatagatgcacgctagaaaatagaatataaaattcaaaattcaatttttaattattaaaaaaaattcttgaaaataaaactttgttttgtcaatttagcccaggcaatatatttttatgaaaaacatgctaaaaattgggcggtgagatatgtaggatatcaattatattttccacaggactttaaataaaatcttttttaaattttactattgttcatttaattaatttattattattattattttgtattgaggaattattttgaaattgcatcaaaataataatgctcaataaagtgcgtattttaatgatatgtaaaatatttattataaataaaatttagcatttgttaagcaatttgtaacagatggttggtggaaagaagtgatcaantggttgatacatgga

SEQ ID NO: 3135 - DNA, 1717 bp, Heterodera glycines
ttacatttatcgacaaaaaatgaaacaaaaaaaaacaaaggctaaacgctctaaactcctttttccttctcccctttcatcctgcggtgctgcttctctttttggactgcttaacttggttcccggatgagattttgagcggttctttgggcagtttctccatttcctcttcgtcgatcagtccttgccggtgcggcgattgtttgggcttcagccaattagggtaaatgcggcactaaaaatggaaaaggttcgatatttctagtgatttaaatctgaaatttttgaaaaaataaataataaaccagccaaatccatttccagataaaatttgaactttattaggaattattcacttattggcattgaatagaatgtaagtcgttgaaaaaataataattcagaatgctaagaatacaaatttaaatatttttacgtgtaaacgccacattccatcgacgctggccacgtgattctcaaagacgacgtattccaaacattgccttggctcctcctcagagcccaataacaaatggccgtccttgtcgtaaagtgccaaaatctgaaattgttaaaatttgaccggatatgattaaaagtggtggtgatagtgttggttgtcacctgtgtgctgtgcattcgtacaataatctgcgcaatgtcgttgcccgatttggtcgggttgtccaagcagcgcaccgttagcactttggacggttcgctgaactgcaccaatttccaatggagtgtgcctttctcaacatcgggccacattttcttcaaattttaaataatttctgataatgaacactcaacttggaaaagggaaaagaaaaagcatacagagaacgcggcctcagtgatcagttcgtgcagcttcgttttgtctcgcagtgccaacgcattgtacgcatttgcgtagatttgctcggcaagttttgtgaaatcctggtgccaaaaaaggaaccatggaaatgggaatgtactcgatcgaaccttcaaattgaagttctgaaatccgtccttcttccgaatcctcctcaacccgtagaatatcccttggtatttgcgggtagcaaatgccttcaaatcggggaaaatgtctttggcccctcgtgaaaacagcgaagtttcgggaggaatatacgggtcaattgcttgacctgaaagctcaattaaaaataagaaagcataagtaaacagctctacatcaattccttaaggggtttttgaatttgtagatatcgaaaaaattaaaaattaacgattttttgtgcccctgcattttttaaattatccgaaaatggttattggccgtttttcgttggtgccccatttgatagagtgcccctttactcgccgaatgtgttcagagttatctggtgctcattccaatcccttggcgccacatccttgaaaatgttcggcttccccttccgcaataagtacattcggacttcatccggtcgcatctgatccaattgtcgtcgctcggcataatcctcttccaggtcaattatcagccgtttggcgcccctcaactgaacgaaagattatttttgaaaatgaacaataaattaattggccgaaaaattcacgaatagtgacccaaaaagatgaataaacaatattagtagaaataaattgaatatcaaaaggatcccacgtttggttttcataaagtaaaaacattatttaaaagtgactgttttcaaaa

SEQ ID NO: 3136 - DNA, 1747 bp, Heterodera glycines
  unsure (1)..(1747): unsure at all n locations
cccacgtnttggttttcatcgcctcccccattatttaaaagtgactgttttcaaatggtggggtaaaatttccgaatacggtatcaactcaaaatcgcataaaaacacttttgtgggatttcttaggcgctgagaacgaaggaacagcttaaaattcggcgcccatttaaagctcacccttctcatgtatcgttcgttgatgtgggtgtttcggttcgcttttgcggggttcgagcgtcgccagcccatgaaacgctcaaacccaccgggttcctccaattccttgtgatggtgcacaaaacgaagttgcatgatgccggtggaaaaaagtgatggtggaagacggcacaacgaacgcatggcattcaaagtcaaaaatggcataattaaaaatcttttttttctgaaaatgcaattcttcggtatcaaattttgagtcgatccgcaaatttttttttttgaattattgttaaaatttattattggcgaattgtcttttctagcggttgtgcttggcggcgcagacacacagaattgcatgcgattgcaattttcaatgcactctcttcaacttttttgcgaaatataaacttgagaacgcccgccttttttcattttttggatttttcttttcgactgtcgcattcctctcgcagataattgataggtaattcgaaatcaattaaggaattaactttcacaaattaaaatctcagactattaacactctaaaagagttttccgttatatttgtgcgttgcgtgccgaacgggcttcattataaagatccaacaaacccatctaaacacaaaatttcaaatgtttgcaattcttttctaccttaagctgacttctgtgctttcaccgttaatcttttgattgtttctgaaaccaaaatgacttcaacaaaaaataatagcaaactgaacgaattgttacaagctggtggttatgatgcttctgatggaattgacagtctcatccccagtcatcttaaacaagtaattcttcttaaaaatgaaaagttaaatttaaattttttcagctttctcgcccggtcattcgtcgtgttcgaatgctgaagaaaattcaggcacaatctttggaaattgaaagccagttttacaaggagttgcacgagcttgagatggtaagattgggagtttcatgtccgcaacattttctaatcgtagagctgacgacgctagggagagaatgtgatgcttgcctttattggaccccgaaataggctaatgcgaaatttcacaaaatcaccttttaggggttagtaaaggcgagtattagcttatcaccctttcattttttcaatttacagaagtaccaaccgttgtacgatgctgtgaatgccaaggtaactcattaaaaaggaagagacttgttcaattttctcttttcaatatatattttattcagaggactgccattgttcgtggcgagatggaacttacggacgcggacggtgaacttccgccgcttgttagtgaactcgagccacagactttggaggtaagattcaaaacgcttatattctttgaactcggatctcagataatgtcgaatattgagtttgtaaatataaaaaaattaagaaattggaagaaagtgcgcctgtggagggaggtgaaccgtcgaagggcattccgggcttttggttcaacactttgaacatgtacgcatcgatcagtgacattatcaaagtttgtgattttggtcggcgtatggttca

SEQ ID NO: 3137 - DNA, 3439 bp, Heterodera glycines
ggccgttttatgtagtaaattgccagaatctgtggtacggaaatggtaatcaaaaatgatgattgcgtgttgagagcgaaaatggggcgtcaacgataacgaacatggtgaacggaaaaatcccacataaaattctgatttggagtttttcaaaatgaaattaattaggatttttgatgccaaaagagacagagcggagatcatttgttcattcaccatataaaataacacaataatcaatctcaaattgttggccaatttcgacgcgttccgtggcattttcccttttgaattgggcaaagtggggactcatttgtccccacccccccctcctggattgtgctgctgctttggcttttgctcatttggttgggctttaaattatttgcaccctccgcctaattttgcgtgagaggagagagcgccgccgccgaacggtggaaagccatttttgagaaagtgtcggcaaattggtgccatccgccgatgggaacgaaggaaggaaggcgacggactcattgtcagtatctgtgccaacaaattggagaagtgtttggaaggggaagcaaatggaaattcagttttatgaaggatcaccaaatgccattcttctctatgtataaattggaccaaaaagtcacaaattcgggatttaacgccttcggcggatggtccgtctctgactgaattgaccgaccttcgccgtctcccataaacactcgcgcggcgcggtcatctgagtactttcccagtgtccaaagtgccctgctcctccgttcgctttttcctctccgtttttccccttttgctttccattcattcgccgccatttcaaattcggttccatccgggaattttgcccaaattggcagccgtgtttcgtcgtcatatgaaaagaatgttcggtccgttccgttggacacccttttcaagagtccgtcccgggtgaattgcaatctgatcggatcggccgatgaagtgacactgatctggaagaagggagaaatacggaaacttgatggggacgggaaaagatggccaagcccaaaaccaagccgtgaacaaaactccgcggacagcccaaacgaagattgatcattttagaactcgactcgttggaaaaaatgatactcccgagaatttgagtttgctcttgatcttgagactcgaagccaagaaaaggctccaatttgagctggaaaaacattaaagatctgcgctcacattctgccgaacaatgttgtcccccgctcgtcctgccccaacttccgcttcagtcgttgctccacccttttcctcctccccctcctcttcctccacaaccgtttgtcccccttccgtttcgattgtccacaatcgttgtttgtccgtcccctctgctcctcctcttcctccgccttgccctttgatcactttcacttccgtgcttttttgcccttctttctcctccaaaatgcttagcattgtctgcccattttccgcttcttctccgtaactgatgcttctcctcaacaaaatccttctctctgttcctcctccgcttctgtccgtggctaatgtgctcaaatgccttccccactcgtcaaactcgagcagttcacccgtttccgtgctgttcacccggtacaccttggcaaccgcgtcgaattgaattcgaggcgaatgctcaatttgtcgaatagccgcgattgcctgcgtatttggctaattactgatcagattgatcattaggtgagcgtctttcagtttttagtaaccggcacagttatactcttcgtgtcagagattggctgattacctgatcagaaaatgccaaaacgccggaagaaagaacggccaatgccttcgggaaaaatgccgatttgtcaccaccagaatctgttggattttgccctgctgtgaccatgctcacttcgcccggagggtaattgcgtgccgccagcaaacatttgatctgtgagtgaatatctttttccgatcaaaaacatctttctgatcagtgattttattggcatttgttcgttagatcactcaccgaattgattcctttttggtcggtctctgtccaaaagagttttccgtcttctgcgctgaaactgatggcttcgatcactggtattgattcggcgcttccatctgccgctgggcagcccgtctgagcgccggcaacaacagtcacaatgctcagttggaagtcaatgcgaaaaatgacggaggacgaatcaagcacaaagagttgaccactgattggatcccaagtgagcgctgttggccattccttcggggggggggtgatcagattatccgatcatattggatcaggaaatacaccaaaaaaatggccaatgggttgactgtaattaccaggatcagttgcccaagcggtaccattcgcgaacattccctcagcggttgccagcctctccgttcgccgttgaccagcacttcctccgccgcaacaacgggcggcactgtgccgcccgtctcttcactcgccaacaaaactttcttcaaactccgtccgtccaacaggaacaaatttgcgctattgtcaaatgcaatgccttgcaggaaaaaaaattaattaattaattaggcaaaataattaattgtatttattacccttcggaaatgtaagagaattcgaagccaaaacaatttcttggagcccaacgtcgaccacacgtacaatttgtcgcttcaaaggcagcgaaatgtgcaagtgattagtgaagggatggacagcgagggaatagggatgagaagcatcagagggactgaaatgggaggggggaaatgggaaaacgaaaagatgggacacagcagcacggggtggcaaagtacgcataaaaagtggacaaagggagggcaaaaatttatctggacaatgcaagtgctaagccccccccccccctcgccttatctacagtagggaccgaaatttttcgaatgtacggttaagggaaagggttacgggctgccgggcatttatacaggtgcggacttaacggctaaataatccgaaaaacttttagtccgtaaaacccgcatcgatcgaaaaaatgtggtttattggcgctacggatcagtaaaaatccgtattcggattcggcccgtatttgatctctagtccacagacatttggggtgggtatgaatagaatgccaaacccactccatttggagcaaagtgtccacaaattcggccccgggcgtcactcgacggatcagttccgcgtcccaaacaaacagcgacccgtccgcggcgctggcgagtgccgcaggcgcgtgcaatgtcgcctcgcgcgcgtgctctctgcgcccaacgcaagttgctgttgccgcctcagtcccaccgcattcgcccaaaatgcgccgtcgtcgtttttcgccattttccgccgatgcttcggcgccggcaatagttcgaacggttgcta

SEQ ID NO: 3138 - DNA, 3887 bp, Heterodera glycines
ggatgaagccgatggacggaagagagagaccaaaacgacggcatcggagaagcggggagagagtgagcggacaaatggagggaaacgaagtgacggacggacgacgcacaagtggacagatgaaaactgatggtcactgaagcgaacggaggggacaaaatgtaaactcaaagggacaatatgtcgacttaaagggacaaaatgtaaactcaaagggacaatatgtcgacttaaagggacaaaatgtaaactcaaagggacaatatgtcgacttaaagggaaaagaaatgttgactcagagggcaaaatgtcgtctaattcatttaaaacccaaaaaggaacatttctcggctcgaggctcaatgtccgtgatcagagaggcgggaaattgttcgagaattgtcaaaaaataatttaaactcacattgcgccaggcgaagtccgtactcgtgttgtccaaacgcattttgtcggtcccacacgaattcatgcgaaagcgactcgcgcggtgcgaatgtccgctggtgccgcactccgtcaatttgtagtgccaattcgacgcgcaaaagcccggcgggcaaacggtcgcccaaaagttggacgcgcagcacactccgagcaccgtcggcacagtttgaggaataaaagaggaactgatcagtgccgggaatgagcacagagagcgaaatggcgcgagaatcgatggacaattgtggagaaagcgtaggggaagaagaagaagagtgatcagatggaagagggacagtgggagaggaggagagcgggcggagaagcgagacggacggacgaaagtgccaatcggagagagacgcaacgcaatgcgacgcggacgcagaaggggcggcggggaaaaagccgcttctcgtcgatgtcgagaaaggacggtccatccaaacggtgccaatgctgacgattcgatttggtggcaagtaaaaagtgagcggaacacggccaaacggttgccgaacgaactaaacgaaaatcaaaagaagaagccgattgatttggacagaatgtccaattcatggcatttttccccgaagggctgggcttagtcatgccaatggaacatgggagacaatcataaattttgccgcctcacactttcagggcttagtctctcccctacctgaactgataccattccgccgccgttcagtgccaattcaaaagtgccagccgttgtcgttgtttcaccactttcgtccattgcggcagcgcgggacaacgaaaagccgtggtgaggattttctgagtcagaaatgcgcacgcctgtcaacggaccgccccgggaggaaaagacgcggccgcggaggacggaaatgcgcctgaaaatgagtggaaaattgatcgaagattagggaaaatgagtgatcagtgattgatatatagttgtatttatttatcgatatctgcccactttctgtccaaaaggcgaatgtccgcgtatcgctgcaccgaatgttcgcccccatcgaagagaaatttgacccgatcgaaaaagggagaagccaaacgatcgctgatggaaagtgagcggcgatcgacggcttcgcttgggaaaggcatggccaaacacagcgaatcggaggcgcaaaacgggtgggcacaacactcgacggaatcctcacaatcggtaaggccatctgaaggggcaaaattggcaattttttatggaaatgccaatttgaagggagggagggggggaaagtcggggctaaaagtttgatttacatcctattattgtgcctctgttaatggtccgccgtcctttcaatgcttctctctcacccccgtcgttgtcgtgtccgtcgtcgcaactccgttcgccctttgcgaattggcaatggtccccaaaatgtgccgtgtcgcattggcaccgccacccatccgaaaacagttcacattggccaccattcgaacagtttcgcgcgcacgtttctgaaaagagttgctgtttgttgagcttatgactcactcacaatgccaacgaaacggaaacgggggatcaattggcattttgaataaaaatccgtcaatcagtcaaattcccaaactattgcctctctaccgaccaatttgacaattctcgccgttccatcccgcttggcactggcactgtccgtcggctgtgcatgtgccgtgttccgtacatccgtgtgggcattggctcggtccgttggatggcatttccgtttttttccgattggtcggtccaattttgtcatttccattcggcttttgctcgcccttttcttcatgcttttcctcctccgttgccttcctctcacagccttcgcctgtccatcccaacgcgcaaaagcattttcccccgtggcaaatgcccctcccggcacaatcgtttcggcccggacattgcctttccgcacaatttggcccagtccatccctcccggcaatggcactttccgtctgaagaatcgcatttgccatgccctgcacagctcggatcctcacaccttcgaaggatttgttggatttaagaaccctttccaatgagatgacttttattgttcccgggtgtatttttggagtccctgatcatgaatctgatacctatgtttaccagtctaagccccaaactgagctcgaacaaaagtcaaaaattcaaatttttcgatccaggatttttttgaaattaggaagtcggaattgatcaaaagtgatgtaagattcgtgatgagcaaaccccaaaatttcggggatcattttgcaaatcaaattggcccgccctttggttttaagaaaattcaaaatcagtctattttaaaatgcgccgcagttcatcactttgaataagaaagctttttcgttaaagttctaaatttgaatttaaaagtgcatttttaattaaaaattccaattttatcggccgtcccccgcccaattgtttttgggcccaatttacaatcgcttggtctcgataatcactaatactttgtcccctttccctgctgttccctcccattgtctcaccaattgtcgagcatttggcactcgacccctttgaagccggcatagcactggcactttccgttgctgaacatcccattgccggagcacagtaccggacaagcggtctcctcgcaaaagacgcctccgtagccggggtaacacacacagcgcccggcacggcacaatcccttgccgaaacagtcgaattggcacggcgcatcatcggacgacgaagaggaggaggaggacaatgccaaatgatggggatcactttcggcaccgttttctgtgactgtagccaacaaagtgaccgcttcattctgaaggaatggggcaaattgtgagaggaatcaccgccaaaaaacacctgttcccggtcattcaaaaagccaaaatgccatcggccagctgtcagaaagtgactgatcattgtgtgccgaagaaacgtctgaaaaagtcaacacactttagtcatttggatcatttggttataatgattcaatcagtcttcattaaattaatttactgtaaactatagactcccgatctcgatcatttttctgaattcatttcttatccccaaaaacccaaatctcatgtcttattctttgtctgatcaggttgacttggccatagctcaacttgacttaatcagggtctcttttctaatcactactttatgctttcattccattctgatctctgctctcctaccgtgtcgcgtccattccgatcggttgtcaatgggtgcattcggtcaccggaaacaattttctgccaatcatgcgccccgggggtcggcctaacggaatgccgtgccaacagcacaatgcgcgcttttggcgacacagtgaggttgatcagaagccgagagttttgcgagagcggtgg

SEQ ID NO: 3139 - DNA, 1342 bp, Heterodera glycines
gagcgaaaaggggtaattaaataattaattaattgccttgtcgcattaatatcgcggaacccctggcgatcaaaagtcgaaccaataaatgggcaacgggaaaagtgatgaactcacaaattaaaaatatggccaaagccaaaagggtggtgaaggcgacaatgacgagagtgaccagcaccaggcgagaacagcagcgggacgatgttcggcccggtgccgtcgttatcgcccctgctgatgttctgctgcgcttcattagcattccgccatggatcggctgcggcccgcaggtgccgttttgctgttggaggtgaagccgacgctttcgtcgcatcggtggacaactcaacgggggctgaggtggcggcggtggtctaaccaaagagctggacgcataagcggaagcggaagaagacgagatgagcagagacatggagtcgggcaggggctgccgagtgggcgccatcattggagagcgatcagacgaatccgactgatcagtggagggacgagtcgacgagaagcaatgggagggataaagcacatccactgattgaatgagatattgttgaggaagacggtaatagggggagagagcacagaggagaaaagtgggggccgaacatcgcctgaaagaggcggaaatagcgcaattagcaaagaaaagtgatcgaagagaggaaaattagtgaaatggattgggatgggcgagaatcattgtcgagattttatggggacagttaaacgaagggaattaccccaggtggggctcgagactctcgagcaacaacgaaagaaaatttaaagaaattgaaggcgggggcattgattcgaaggagtggtcaaacgaagcaaatgaacatcggtgcacctgctgtgtcacttcgttttcgcatggcattggtcggtaatattatattaagtacggtttggacgggttgtgccgccgtggggggggcggagggtgccgttggcgttggcaaaggattggtcgtagtcgccaacggcagacatttccgttcgcagttcgttgggcggttaatggttgaacaatcacaagcccaacacaccgcatcaccataatcatcttcatcatcaccagcagcacctttttctcttttcaaggtgagcgagttaattgggccgcgaaaattggacggacggaagagaaagggcaaagaaaggagcagagaattggggggggggggagggaagtgatgaattaatattgagtgatgaataatgtggcggaggagaaggggtgggcggtccgaaattcgaaagtcgcatcggcaaatttcggtctcgaaaagatacgactcggcaccaatctcgggaa

SEQ ID NO: 3140 - DNA, 1743 bp, Heterodera glycines
  unsure (1)..(1743): unsure at all n locations
aattttatttttttcggaatttccccgattttcagtgcaattaaacggccccctctattaaagcggccatttgggctctaatgactcaaaattgttcaaaaatatcagatttttgggtatatttctttctgtcataagcattgatttttccaatttttacatttatttaaaaagtgcattgcgccaattcacatgttaagaaattaaatttttggcattaaacaaagggccaaattcacgtgaaaatgaacaaaattgtcattctcgtgtttaacagtgggccaaattcgcgctgtaaattttaaacattgccgtttttgcgtgaaagtgaaggcatgtcatcaatttcacatgtatacatttattaatattgttggcattttttttccactctctgtgtttggcacactattctcgcaacaattgtggataattgccctcaattttgccaaatctggccaaaattatagcgcgctaattgactttgcttatctaccggcctgtaaagcacgccttatatttctatatttctatttctctcactgtcattatgtataaatattttatcatgtgcatattaattttttttttgcagcgaatatctgcataaaagaagcagtgattaccaatttttaacaaattcatttattattttttttaataaatgcgcaactttgccttcattttcatttggtttctgatccagttggggaatcatttgctgagtgagttaaaatattaataaaaatataataagaaataggcaaaatggataggaatcgaatcctcgctatgccaccatttcgaaaatgacaaattcatttagttgatacgggagttttattaagtacttaatatttataatgtttagaaaatgttcgtgcttttccaactgcagaaaatggaagcggaatggtaagtggagtgtttgtggaggaagaactagcagttgaaatagaaaagcccaacgaagcgaaccagaatgtcaatcctgaacacgatcaaactaaacgcgaaggagctgtaagcgaggggaacatgaattccaatcatggacatgcagagaccgtatacgagggaaacatgaatgccaatcatgaacatgctgagaccgtacacgaggggaacatgaatgccaatcatgaacatgctgagaccgttcacgaggggaacatgaatgccaatcatgaacatgctgagaccttacacgaggggaacatgaatgccaatcatgaacatgctgagaccgtacacgaggggaacatgaattccaatcatcaacatgttgagagtgcacacgaggggaacatgaatgccaatcatgaacatgctgagaccgtacacgaggggaacatgaatgccaatcatgaacatgctgagaccttacacgaggggaacatgaatgccaatcatgaacatgctgagactgttcacgagggaaacatgaattccaatcatgaacatgctgagaccttacacgaggggaacatgaatgccaatcatgaacatgctgagaccttacacgaggggaacatgaatgccaatcatgaacatgctgagattgttcacgagggaaacatgaattccaatcatcaacatgctgagaccgtacacgaggggaacatgaatgccaatcatgaacatgctgagaccttacacgaggggaacatgaatgccaatcatngacatgctgagactggtcacgagggaaacatgaattccnatcatgaacatgctgagacc

SEQ ID NO: 3141 - DNA, 3144 bp, Heterodera glycines
cgaggggaacatgaatgccaatcatgaacatgctgagaccgtacacgaggggaacatgaatgccaatcatgaacatgctgagaccttacacgaggggaacatgaatgccaatcatgaacatgctgagactgttcacgagggaaacatgaattccaatcatgaacatgctgagaccttacacgaggggaacatgaatgccaatcatgaacatgctgagaccttacacgaggggaacatgaatgccaatcatgaacatgctgagattgttcacgagggaaacatgaattccaatcatcaacatgctgagaccgtacacgaggggaacatgaatgccaatcatgaacatgctgagaccttacacgaggggaacatgaatgccaatcatgaacatgctgagactgttcacgagggaaacatgaattccaatcatgaacatgctgagaccttacacgaggagaacatgaattccaatcatgaacatgctgagaccgtacacgaggggaacatgaatgccaatcatgaacatgctgagattgttcacgagggaaacatgaattccaatcatcaacatgctgagaccgtacacgaggggaacatgaatgccaatcatgaacatgctgagatagttcacgagggaaacatgaattccaatcatcaacatgttgagactgcacacgaggggaacatgaatgccaatcatgaacatgctgagaccgtacacgaggggaacatgaatgccaatcatgaacatgctgagaccgtacacgaggggaacatgaatgccaatcatgaatgaaaatgagtgacgttgcgcgacaagaaaaagatcatgtaaatggtcggcacaatcacaaggatatttcgctgattgtatatttcttgttttatattagtgatcagtttttagtcatcgggatagattgcatttatcgacgattatctcttttttcctattttatctaatttatgttacttttgttcgtgttttatacctctttatttgtaaattatggacatttaaccgttactttttaacattggatgaggaaaacaattttacttaaattgtttttcgtgtattttttacaaggaactaactttaaaggagttttccctaattagaaaactaattacttatttgacgcaaaccatctgcttgggtggtgttatttatcattaaaatatttgttttgcttgtcaccgacaggtgttattcttacaaattgcttgcttctaatgaatatggttgattaacttttgcagaagtaagtaataaaaaatcctttttggatatccaatatttgaacaatctaagaaaggctccaattaattaattgagaactaaatgtcatcataaactttttctaattaccattatttttgttatcttcgacagcagttatattttttgatttaatgaaaatttttcatttacgccaaaaactaataaataacctaaataactcagaagagttggtcgaaaaattaaaaaaaaatacaacccattgaaatggaaattttttcaaaaatttagccataaaatttatttttatctttaatattttgtttttcaactatccatatttattagaatcaaatctaacgcgttgtcaaagacagatgttattcttttttacacttttcttgcctctaatgattctggttgattgacttttcatatttaaaaaagcctttttcttaataagcaattagtacagccttccgcatcattttttgacattttcattacgccaaaaattatttataaccgcgcttttgaaaacaggaaatctccatacattttgttttgttttgcaattaaataggaaagaagaaaaaatttaattacatttttaattataaaaagatattgaaaattatttggcgaacgtttttttgtctaaatttgtataaaaaaaacagtagttaataatgtttttatgttttgtttcataaatttggaattattatttatgtgaaattattttaattaaattttgaactgacattaaattatttcaaacttttgaataaattttttaaaaatcacttgaataattggttgaacaattaatgaaaaaaattgaaaaaattaaaattaatttgcacatttttttcaataattttatttttattttattttttgcttgagctaatcgtttttctgaaattgaaaaacaaaatttacaatattttcacttgaaaaaaatatattaaaattttttggaattttaattaatgtgatacaacctaaatacatacaaaaatttaatttttttgtctttcaataaaatctatctcttaatttgaatctccgtttataatcatgccattttgcgtgtgaaaagtgtgttcttgtccgttcatgtttcattttattcacacaaaaatcaaatttgaaaactattgaaaatgaaaactttcaactaatgcaatttcaatacaattttattgtaatgaaaatttaaatttttataaataatcccccaagggtcggtctaaatttcttcgtaaaaaatacatcccatgaaaaaatggaaattttcaataatttatccataaaatatattttttctttaacatttgatttttaaattttttacattttattaaatttaaaaaattttttattgagtttctaaaaagttagggacttataagttatgatttattatttataaaataaaattaaaaaataataattaaatttaaatatttctatcattgatacttttcaaaattcgcctcactactggaaaatcaaaagaatctctgtttaatcatgtcattttgcgtttcaaaaatgtgttcttgcccggtcatgtttcatttaattcacacaaatactgaaaatcaaatttgaaaataattaaactttcaagtaatgcacttttgaattaattttattctaagtaaaaaataaatttttatttaatattcttcaattaataaaaatattttattagaattaaggtgacttgttctacttttgggatttttcttggtcaataagatttttataaacccaaatttgtggattttcctatttttttttttgattaaatgcgccaaaaatatacgccaaaattgcataattataattatcattatacctttattagaatggaactgttctttttcatc

SEQ ID NO: 3142 - DNA, 2090 bp, Heterodera glycines
tatataaatgaaataaaaaaaaactaaaagttataaaataattatttttaatttttaacatataaatgtctgaacagatatataaatgacaaaaattaactgtttatttcaattatcaaagagatatattttaatttataaatcaaatttatttataaatagaaaaaaaataaaattttaatattgtaaattatatttattcaatattcattataaaggatgaattaagcgactaaattctcaaattattttttaatattaataatatttaaatttaggtgctgtatgtgccctgtatgtactccatttggaagcatttgcgcgaaaattcctgctacagactgctgttcttcatcggaatcactgacctgagcatactgtggattcttggattcctccgggcatggtttaatctgcacggatatgtgttctgctcctttccgacactgatttattttgttggcattgcgacaacatgtgaacaatatatataattaaagagttatcgaagcgctttattcaaaatcccggtgtttgaatttttttttctgtccaaaaaatgccaaattccgatgaatggtttgcggcatttttagtgatatgatttattattctgaaattttttcacctctattttttcatgatctagcttggctcaatttaaaattttggggctttttaacatttaaaaaattgagagacttgttttatgatcgattttctggaatattaaatgtcttcacaaaaaatattaatatccatacaataaataaatatttggtataattcgtgaatttcgatgaataattaattccattcatttttctattttagcgctttggatggctgaaagcactgctgatttggtaggaataattaacatacaattattaaacaatgaacaaattctcaaaaaggaattattaatatttagtctgacacattgtaattttatcatttaaataatttatatttttaattttattttatttaaaaatgattttttggcatttcacccccaaaaggttttggcattcaatcgctgtgttgacttcttctcaccccattattcgcgacttttgttcagtggccatcgaacattgttttggaatggcgcctgcgccgcctacgcattatattgggcaattttcctcaaaccgggcatctacagtagcgtttattttggctcctttttcaacccattcatgggctaccgtaacgatgaacaaattgaggttgacaccagaaaaaataggaaattttaggagaatttttgcaaaataaaaagttataaaacacattttgcgggaaactttcttgaaaaaataaaaaatttttttattttttttattttaatttatttccctatggcattgaccgaatggaatcccgagaataatttaattaaaaacatcctcccattctccaatattcttttttgttcgataacagcatatttcttaaaacaaaaaaaaatgcaaaaaaaaggaaatattatttaaaaaatttatttttcacatggaaaaataaattttttttaaatgtgaattttcttctagggaaaatcccggtttaattacgcgatttttttttatttttacaataaatagggtaaagcgaaatgcgtaattgaaaatgcgatataaaaaaagagcgaagtaattcggcaaatccctttgtccatacaatacttctatttttttgtaccgattacagtaccaaccggtgttgcacattttccacaacactacggtggcagtgctaagcccgagcatttatctggtctttatcataaaactgttgtacgacatacaaataaatcgcagacagctgagtgctgttgtcaccgaattgagcgctgtgcagagaaaggtggtatatgattggatttttttagattttccaattttttaagttttggaataatttaatgatttttaggtatgaaataaaaattttctgtaattcttttaatctaagtcttcgattaatttattgttggttgcttttaaattttatatttataaagatttttatgatcaagggaaatttttatttttaattaaaatattgattggtttcccaactaa

SEQ ID NO: 3143 - DNA, 1615 bp, Heterodera glycines
  unsure (1)..(1615): unsure at all n locations
ttttttctcgatcctttttgagttatgaaaatcacgcccatattcaaatgatgtgcttttttaataaataattccgataaacttttttcatctattattgtaagcaggtcatctagtattaaaagcagcggtttcttaatggagtggagtaattcatcactgggtggccctttattaactcgaaagcccattttttgtagaattggaatactgtcattaaattgaccataacaatagagcaccgatttagggattgggttgatcaattcatctctttctctcaaaaattttagtaaaaacgttgttttaccgctactagacggtccactaattaccatgccaaacggcatttttaattttaattcgtttaaatcgaaggctgtatcctcagtcattttattttattattattaggttaactgacattacaaattctttaaatacgagattaatgaggattctttgtgtgtttgttatagatatctgtttgcatcatattgtactttacgcatcctgggcacatcacttgggtaaagtggaattcgctatctcccatcagtttgaattggtccttgtgcttgtaattgagtcgacgacatccagggcagagaaagttgatcacggcaaactttgggcgggccaatttccagaagaagcgctgctgatccagtaaggttggctttgatgattttttatcagcttttccagctttctcaatgggtttttcgctgctttgaagttccgccgtagacatttcgctaattgattttttggatgggacggaggaagacatttcgaaatttttgaataccaaacataagtattgactccttaaatacacattgggcccctatcatttctactgaccacatcaaatttgtagacggccaatatgactgctggaaatttgactcttgactatgaatatgactcggaaaagagatttgaacatttgcaaggaatggtgatgctgatagttctttactcagttttcttattgtttttatgtttttcatatctacgacactttttgtatgaataatcaccatttattgataaaataaatcacgaaaaaattggactacaatttaaatccaaaatcacgtacaataaaattttctgatacaattcctttggtcacaacgggacggtatcgcttcgaaatgcttacagattgcactgctccttcacgaatattggggcgaagctggtttggatagtcaattattatttcttcaaaagcatcttcttcttcttctgcagtggcataccgtaaaacggcttgtttgaatgtgttgaagtgtagtaggcggcacgcgtcggcggacaatgtaattcctctaactttcaaaacagtgtcttcggctcccgttcttttgctccgcattctcagcgcgtactgcttacatcctccactcacaaattccaaaagttcatgcccgggatattcggtctgagaggtcgcccaggtgcgngnccagttgtncatggacatccgtcttaataaacccttataantttatttttttattagttttttaccggtctcctatacgcaaaacacgtgtccccgtgtcgggtagataaataaggaatttgggcacggactacgcgt

SEQ ID NO: 3144 - DNA, 3625 bp, Heterodera glycines
ccagcctcgctctttgtcgttgttgtggggacattggtagcccggaaaaacgcctccctctgggtgttgctgggcacacgtacggcaaagcggaaacagtagtcgttggtcgaatttggcggggagaacagggacgtcaacccttcgtggcggaaccacgaagactttgagaatgccgaggatggggacgtctgtagggcggcgccagtcgacaattgagtcatctccctgcatgatgtggacggctgtagggtgtccaattgggtaggacgtgacggcagtcgtataggggtagagggagcgcacgtcgtaatactttattttccaactgaaaatattattttttttttattatattacatttacaaaaaatcaacgcacccctctggcactttgtagcgaagacgaagaggggccacgcgcccaccgtgataacagtccttcagattgataggccctttgtccacatagctgttgaacgactccctcattcgctgatcccgcttcagcatttcactaatttcgcactcccagaagactttaacttcccggcatcttccgctaataaactgtaggcgctgcgcgtcgtcttctcggattttctgggccgtctttccgtttggcatgactgcttgtggatcaaatcggtgatgaggagcagaacacgcatgccaaacgcatccattcacttcaatgaccgtgtccgtctcagcaatataactaagaacaaataaataatttaagggcaaattattgtaaaaaaatatattacccgtccaccgtgtatcgcccaaactgcttttcgccacaacgtgaataagccgtttggatttggacgccatgctcttccgcgtaccattccatgaatttcagcgccagaagactttggttgtttgctgagtcatagccgcgctccggaacaatggcgagttgctccttcttcaaatgattcatttgaaaatgctgcatggatgcgctggcgatagtcattggaccgttgacgatgtcgattccgttgttcccagccaaatcaattgcgtcttcctcatcctcctcctctgcgtcttcttcggcgttgtggttttcaattggatccgtaacagccaaaaactctgcccgaaaggcaatcagtgcctcgatcaaaatccgtgtgtcgttagtgcagtaagaagcaagttgttcacaaaggttgaagggggcattgcagtgctcgttgtaccatccatcaaaacggcgctgcttctcggaagtcattccattgtatatgtagtcctcttttggggggcagatggggcagagtgttgttgtagttttgcacggtgttgaaaagatgcggaaagaactccttgtcttgtacttgtagtccgaatgccccgggtaaactgccgagcgccactggcatgaggttgaagctatcgcggatggaaatttccgggctgtttgtcgtgcgcccaatcttcatttcgtacattttgttgccttttctgaccatttctggacatattccgaagttgaagaattcgcggaaaaggatgacgttatcgaatctgccaccaaagtgcgagaaaatagacgatggatacctgatttaattagcaaattattaaaaattagttaggaaaatcttaatcactttttatcaaatcccgagagaagccactgcgcaaattctgtcatctgtgattcgcacacacgcattgagtccacttgagtgttgttgaaggcacggtgtgagaacgtgatggtgcggaattcaccgcaaattttgcatgccgtacggccggacagtgattgacgccaagtgtttcctttgatgcaaattgaacaggccacgtgggctgagacaaagttgacgatgtgtgcacgtttgtttgggccaataatggtgtttgcgttgtttcgcagtcgaaggcgatgagacggaatgccttgggatgcttcggcttgagtttcttgatgaaacaaccccgccccttgtcatggtaattgcggcaagtccaacagaatttctcctcgcatacgtgtccctttcttccgtcacgggtattccgttcaaagtcccacaagacaccgcacttcttgcactttttcgatttggtacagtaattagatgtgaggtggtgttgatagcattcacaaaggaaggtcctagggtgtccgtgggatttcagaatgaaatttggtcagtggatagagcacccatgggttcttaagaaaagtgattttattttttgcggaatgagcccgagtgccgagttattccgtgccaaagtttttggtttttttctaattaaggaaaagaaataattgtttgtttactttccaagtgtctaatggtgtagaggtagtgtgttagtcaatcttttttttgggtcccaggttcgaatcctgtgcatgctaatacattttacaatttttattttttctttttatgcataattaattattaaaaatattttttatgaaacaaaatcttttatgcattttaattttattcaattaaaatttaaaaaataaattaaatataaagatgaactaaatatcatgtcgatttgagaaaaaagttttctaattttttatataaattatgcaattaatgaaatgtaaatattttattcactaaacaaaattacgaaataagtcattatcattttttgaataatttaaatatttatagaatagcaaaaaaaaaaaattaataacttaaaaccatatttttattgtttgaattggattgaaactgattgttaaaaatagcataaaaagcttcaccacgtcatgtgactctaggaaagagcccaagattgaaatatttacaaaataaatgcataaaaataaagcaaagaaattaccgaaaaaagaatgtgataatcctttcaaattgtcattcctttcaaattgtcatctcctctcctaatcgatggcaaagagaacggcggcaaatttttcccctcccatggacaacaccgccccaaaaaaattcttgacttcccttgaccaacttcaaattccccccgaaattgacaacgacagcgccattcccgactatgcaaaactgcttattaagcagttgcactcgctgctggccaccgcgtcgtctctggttcaatctcaagtagcggcaactgacgcgattgaggaggaccgccgacaacgaaccgttgtcatcaccaatgtgccggagttccaatctgggaaagcgtcggagcgtggggaggcggacagtgcactggtcaatttgattttggacactgtggacctcgaccaaaccccaatggtgttccgggtcggcatgcgaacgcccaacagagcgagaccgctcaaaatggaatttcccacaaagcatgcggcgcggcaggtgctcagaatgaagggcaaggctttgtcgttgaatgctctacatggtgcgcgcatcagagaaagcatgaccaaggagcaattggccgaacgccggaaactaattgaggagtgcgcaaagaaaagaaaagaagatgcgggagattggattgtctacgcaaatcaggtcatcctgcgcagcgaaattgacacaattcgtaaaaagaatttttaaattttcatgccaaatcacaaaaaactaaaataaattttttacaaaaatttttcc

SEQ ID NO: 3145 - DNA, 2824 bp, Heterodera glycines
  unsure (1)..(2824): unsure at all n locations
ttttcaaaagagtttttcntctcaataattcacattaatcagagtaagctctataatattanaagggtntaataatactntaaaatattcatntattttaggtatttnttaaataaaaaaatttattatttatataagaaatttttgtattaaatatatgtttcttttatataagtaacttacgtaggagattgcaaaatcaatattatctaattaaaattaatatattcatattttctctcaatggctaaaatttgtttcattttctgaagaaatattattaatgatttttcaaagtatcaattttatttaattgttttttattaaaatattcagtttcttagtcgacctcgtaaaataaaaatgttgtagaaatatttaggttttagttttttaaataattatattttaaaatatgaagcactgttttaatttttgttcttatttttattattttgcccacattttattaataaaaatatatttattttatttgttgcattaattatataatttgacttaattggattaaatatgtgctctattattcaagtactcacgtctcatccgacacaagggtgaacttaatcggcttcgtatgaataaaaatatttttaatttatttcctctaatggtaatttattaatttatttatgaatcaattttaataaattatttatttgtttgaaaaggattaatcattggaatatttattgtttcgaattatttgccacattttctacttttatattaaattattttagttttcattttcatttaaacagttcgcaatcagtttttttaatttttattgttcgatttagatttataattttaatcgaatgcatcttttttaattcatattcttattttattattttgttcatattttgtaataaaataattattttatttattatgtattaattatataatatttaaatttcttgttgttttgatgaatgatattaatgataaatttaaagtaaatgaatttcttttctttttttttgctgataaaatggctttaaattaagttaattataaaattagatttaattggattaaatatttgtttctttatccaagtaactcgcagtgtcctcgctcacaaggggaacaacttcgtcggccttatatgaataaaatatttttaatttatttcctctaattaaaagttctttttttataaatttattttaataaaatatttatagtttgaaaatgattaataatctcattagaatatttattgtttttataaagttaattattttattttttcaacattcatttaatcgagtttgcaatcaatattttattattaatatttattgtgcgttggctaattatatatttttagcttaataacttaataatatgtcctacattaaaagattgttagtcaattttattttagtcgtattcattattttatcatttaatctctttggatttgttaatttattgcctattaaatttttgaataatttttcttattttttctacacgttgtttttccttcatttaattatttgcttattcaaattaagaaatcctttctcgagatattttctaattatttgtaataaatccgaataaatggacgaattttgggagggaatttttaaatgaaaatgaatggggtgaggagacgatggagcaattggagaaggggggggggggggggaattaacggacaaacagtgaaaaagtcaattaaaatgaatgcaaaatgaccgcccaaatgtattttttgaaatttaatttgcagatggtgcaaagaaatgacgacttaaaaaggcagtgaaaagagatcaaagattttatgaattttcccctcaaattttgccaaattttgttttttcaaaattataaggcacccttaagaaaatacaagaactttttattcaaggacaacataaaaatctgttaagctaatatatcgatgttaataaaaaaaagtaaattcaccacaatgattagattaactttttaaccttttcattttatgaaccgtctatttctattcgtttttaatgtgctttttgaccgttttttgcctattttagtcaatgtccattctctggtgatagaatgattatcctatatatttttcttggaaattgccaggacttgcccatggaaaccaaaaggattcttagaaaaatgcggaaattggtgattaagggccgaaataggtttttagatgccatacatatacgcaaaaaaaacaattttatgacgtttaaaactcgctaaaataattaaaaatttgggtgcacaaaattttgggcaatcctaaagaatgggggtccctaagtttaactctttttttaaattttgtgctcaaaaccagtttaaaagggctttcgagggtgctgattacgaacctaaactcggatttgcccaattccgaactcggacccgaattcgaacaaaaacgtaaccattgtttaatctttctaaggagtcttaaccacacaactcaagttgtggataacgtaaatttattttgcaatttaaattgtaaaataaataaatgaattttttctaggctaatttacatgcagaaatagaacatgacttttatttttgtctgtgatgtaaattctaacatattagttttatttcattaaagaaatatgcacacgcccaaccgttaaaaatagttcactgatttaaaataatttgaaaaattcataagtatttatgaatccgtttttaaatataaaatttttaacctatttttaacaaaaaaactgagaaatggttagaacatttttggagaagaaataagcaatcgaatagaattaaaatcgtt

SEQ ID NO: 3146 - DNA, 3359 bp, Heterodera glycines
tcagtttttatgataaataaaaataaattaggtgttctaaaagatttagattattttattatttttgaagtttataaaaataaagttaataaaaaatttaaattaaaaaaagttattttcactgaaaagaaatatatattaaggctaaataaagctttataacaccgaaaatgctatttttaaatattttaataaaaagccttaaaaagaaaattatataaaaaaatattgttttatatatagtataggaaaattcaattctatttataatttttttaaatcaataaacattttttcaatagcagtcataaaagacgatttttttactacttttcatttttatcaaatgttttttatatcattaaatatgttaaaaaataaataattagaatcattttgtttcatatataatattgctactttaaaataattattttttatctcgtcgccaaactctttactgtaaaatattaaacgagtttttgttatatttcgctacttattttcatttatgttcaacaggtaataaataataaatgaatattctctcatttactgatgctcttgaattgcaacggcagcttttgtggctggcttcaaaaatcttttttttcttcttaattaagaatttttatttatatattacggataatattttttgaatattttatatgatatttcaaaaaatataattttttaaaatatgcctcgctcagagataattattaaaataatatttactgtgtttccatgttatttctttaaatttaactcttagtgtgcttcttttcttaattgccttagcgaaaaaattttgatatcaacgattttttattcatatgattgatatatttttatgtttatttgttattgatatgtttttatgtttatttgttaatctttgatttttttttattaaattaacataatattttgagtacaaagcttgccatttaattttttgcctttaataaattgcttttaatcagctgatttaaataaaaaaaattttcgtaagggatttatttattaattacttcataagatgaggggttttattttatataaaaaaagagtccattaattatttaaaattcgacctttgaagaatttaaccgtgtgaaagaaaaataaattaatagacaattattagttttattatcaaaagaataatttaataagcttaaattatcctgtataatgcgaaatcacaccaatttttaatattttaaaaaagtaaaaaataaataatgaggaaaaatggttttaaaaaaataaaattaatattccataaaaatagagatgttaattaatgaattgtataatatcgaattttgtttaaaaaaataatgatttttcaaatgtaaaccttcctttgaaattttcatcggcggcgcgcgaaaaatgaaagcatataatttattgaaaatttaactttttaaaatcttgttcgccaatttcgatgtttactttttctcgtaacgacgccaatattcgttttttggcttttttactattttaaaaatcaatttttttcaatttcatcagaaagaaaagtttggttttaaatttatttgcacacttttttcggggttaaatagtatttttaatttttttttacattttcattgtttcatataatttttttatttacagccagtttttataattttaattttaattaatgtttgtcagctaaaagttttaaaaattcaaatagcttaaatctttttattttttatgctattttttaaacatttttatattatgcattttattttttgttatggatctgcattaaagcttgcatttttataaattaatattattttattgtttttctactttattattagcttttctttatattcttgatcaaactcaaatttattcatttttaaatcacgggcaactccagtattttttcatacatattattgcagcattcggttacattattttttatcgattttaaattttaaatataattaaaagtttggtaatatagtttaatttgttttttcgcttatgaattattaaattttatttactaaatttttcattagttttatttaattattagtctttttatttgatttattttctgttatgatttattaatttaattaaatatttaatatttagtgaatttttatattgtcttacgtcaaaaaaactactttttataaaataataaaatttacattttaaaatattttgtaaaaattttctttcttgcattttgttttattttttaatttgaattttagaaatgtaataagaattttgaataaataataatattgaaatttcaataccattaagttgtgcatttttgtgtagtttcattattttttaggtaatattaatcgattttaatggatccaatttagtcaatcgaaatttctgtttcatactataaattataatgtttgtaaacattatcaacaaaattaaattaaattatttattttagaggttattttaaactatttgttaaaattttacagatatatttgtataaagcttttttcaaattacttctctttctgctagaattgctgatagtgctgctgtggtttagctataaaattttgtttttatttttttgttattttactttggcccactgttctcagatttataagcgataaataattcaataaattaaagttcatttatcaataatagtctattttacgaataataaaatattattaattaaaaaattattattttatataggtaaaaaataattttttttaatttttataattcaaaacctattctttaacgatttaatttaatgaatattaatttcaagcatttctttcaataaattatcatttttttcgaaatataaatatttatatttttaataatatccgggtattcttaataaagttgaaatatttcctaaataaattattaattttatttagaatatttttacgataataattttcataaacatgtgctcatattgaactttgtgcaaagcatttgttcggctacttttcaaattataatttttaaatatgcattatttgaattttatgttatttttttgttgcttttgaagaattaaattctattaataattttttataaatatattttgttctttgtttattgtttaatttttgtaaattttagctgttttattaatgaggaagagtttaaacaaattacctaattaacatcatgaagctatagaactcgtcaaatatttgttctttttaaatttatcttgaaatataatgttataaaataaatttaattataattaattcagtgacacgttctatataattaaaattaattatttaagtattcactgagtttttttgtggatcgac

SEQ ID NO: 3147 - DNA, 4544 bp, Heterodera glycines
atccttatataaaagagccctaagagaaccttccaccgtttcggtcaacatttcctagtttgatgcattattcttgcattatcccccccccccccccaaaaaattatagtcattttataaagaaaagttgatattatttttcgtttgttttcttctacttattttcgggatgataaatgtctcaatcgattttcttggggaatgttttgcaccattgactgaggatttataggcagaaaaggttaatggaatttaaaaacaataatatttcattggtaagaaagcataattttaaacaggtcgaattatatcttattacatcggcctgcacttagacggagttgtatgccttttttctgctttctgataataagagagctctaaaaacacatattaaataaagaaccataaataattcgttgactaaaaccaatccttatataaaagagccctaagagcaaccttccagagttccgatcaacatttcctagtttgatgcattattcttgcattatcccccccccaaaaaattatagtcattttataaagaaaagttgatattatttttcgtttgttttcttctacttattttcgggatgataaatgtctcaatcgattttcttggggaatgttttgcaccattgactgaggatttataggcagaaaaggttaatcgaatttaaaaacaataatatttcattggtaagaaagcataattttaaacaggtcgaattatatttcaattttccatacggagttattttgattacgacttttttagaggtaaatttaatatattttttttactaatttttgaaatttagcctttcaatgccacattatttatatctgcttaatgtataaaagagaaaaaaagataataataaatttttttaaaatggttcaaaaaacagaaaaaggaacagcaattttgctggagacatctaaaaaagaggcagaaagggcatggaaggaagtcatgctactggcagacgaagcggctgattacgctaaatctgcccgtggagcccttaatcgggcaattaaatcccgagaaaaggccccctatgcccccggtgttcgagaattgttgtgtctgaccaacacttataccaaaactagagcaaattaggatggggttttttggacaaggtttatttagacaaaaataagttaaattggttaaatgatcgtttcagtcaaaaaggtgaatgaaaattgagaagagaaaaagaagtcccaatggtgtccaatgagttgcttatatacgggtcgggagcagatcgggaaaagggttttggggaaggaaaacacaagagacaaaaaggattagagcgaagaatagtcggcacatcaaaatagacaaagagaatgttttgggggaaatgccagagggaatggacgaagggattagtttggaataacggattcaacatcaaagggaagagagagagaaagcagatcattgtaaagggaataaattggggaaaaggccaaaagcaaaaatgccgatcaaaacaaggcaaaacagattcaacacttcctccccccttccgtgaattccaaccgatcagcgaccatacggacgaaagcgactgtgatgtccagagcaatcagcacaacgacaactgccggatgaattggacggaccaccgctgcagctcccacggcgacgcatgttgaagaagcggcgggcttgcgctttggtctccgcatttgcatagccatagccaccgtgacgatgcccatcataattttgattccaatgaggcattctatgattccctcggtggcctccgcgattgaagcgaccgcgggcatgtgagccgcgacaatgagctgccggattgttgtgagggttctgagcgccctggggttggtccgattcattttcctcatttggttctcccctattcacctcctccgggggttgaggaccccccttttcctcctccatttcattcttttccggcccatccttgagggacaaattttcgaaaactcctcgggcctccatctcttcgagtgcatccgcaatgctcacgacgcttttggcaatgtctccaatgcttgggagtagctcagctttcaactctttgattgcctcacggacaatctctctcacggcatccctggtcacggcatgttcggtctgcacctccggcaatgtgaccgggctttttttgacagtgcgcggcttggaattctctttctctgcctgattctctccaaaaagtgtgtccagcggaacggcagacattttgatttagggcggaaatggacagtgcttagtggaatttgggaaataaaggaacaaatgtgaacaaaaaaaaagaagaaaaatacaaatttacaaacaggaaaaaggggtattagcggaaaagaaaattttagcaatgaaaataaaaaaaaataaaaaagagatgaaaaaaaaaggaaataagtccgatgaaatttgcacttgtcatatgtggcgagaaaccaactttcgcctttttataaggtcgctatgcgcgactctttctccgcccccttccatttccgctttccataagcgctcccccattggctgcaaaaggatggacggtatccatttcttcgtcgcctggtctcggacccacaccgcatctcctggataaaactcatttctggattgtacctcttttgtcggcacatgtgccattggctcaagtgccttaggattttctgacaatgatccttttctgttctttcccattggcggcataatttttatcttatccatttctgtcctcatttctctttttaagaacttttgcgccggggtttcgcctcccaacatttggcatggggtggagcggtattcctgtagaaggataaattgggcgagttgcagtgttttacccgaatccaacagttttttgatcccctctttgaatgtcctaacaaaacgttcggcctccccgtttgatggtgggtggtatgggggtgatgtgagatggttaattccttcttcggacaaaaatatattaaactcagccgacacaaattgtggcccattatccgataccaaagtccgaggtgaaccaaaaacggcaaatatttcacgatatgcagtaattagtgccgatgaatttgtcgaattcatttgatggacgaaaggaaatttagaataggcatcgactgttatcaaaaagttggttccccaaatcggaccggccaagtcaacatggaccctctcgaagggatactttgcctcaggccatttatactcgggacatgaacgtggcggggcgggggcatttctttgacagatttcacattctcccgtaaattcctcaatatcttcggaaatttttggccaccatacgaatcgccgagctttagcttttcctttcaccatcccaaaatgtgctttatgaactaattttaaaattggcacttttaacacgtccggtataacgatttgtccttggggatgtttccttatcaaattcccttccaaataaaggctatctctgtttttgaaaaagggttccaattcattttctattggttccacccaattgtcctttattttggccattatttttgacaatgttttgtcattttttgtttccttttccaccttttctcggtccaaattaaattcctccagcgtcaagaaatatgggatttcttctttaaattttatctcgatactttcccattttatcggcacccttgatagtgcatcagccactttgttagccctgccctccaaatagaccacttttggttcgaactcctgtaatgccattagccatcgatttattttggggttaatgctggccttttggaaaagaaatgtgagtggcctatgatcagttaagattattaattctgccccatacaaaattggcctaaaattttgaattgcattcacaatggctgccaattctccgtgtgttgctggtaatttgctttcggttgccgaaagtgtacgggaccaatatgcaattgcatatagttctttcccatcaactgattgcatgagggccgctccgtaggcaactgccgaggcatccgtgaaaaggtaaaaggccaaattgtaatttggtgcccttaggcacggcgacttcaataagtgctttttcagctcactcatagcactctcttcagcctgtccccactcaatttttaattggtttcctctagtgaggctatttaatgggtgggcgattgtcgcaaagtttggaataaattttctgaaaaaagataccatccccaaaaatcttttcacttctttaacatttttcggctgaggaaatttctcgataacttctcggttattgagcgatggctgataacctatttctgataggatatgtcccaaataaacacatttcctttggaatagcttacacttctcagcttttagcttgaggccatttttctgtaggcgaacaaagacactactcaaactctccaaatgctcctccaaagtctctgtatgaatcaaaatgtcgtctatataaactggtacattagcaatgcccctcagaattttatccatggtcctctgg

SEQ ID NO: 3148 - DNA, 3713 bp, Heterodera glycines
tgtaaagcttttccctaattactccgacttccaacattttgtctatgtgggaccttaattcctgcttgtacttttccgggaccgggtacggttttacttgggctggaatttcagtggttgttaagagcatgggcgcgcttattttgcatgttcccaaatcatattcatgactcgaaaaaactttttcattttcatttaggcattttctgatttcggcaatttctttttgctcttttatgtcaacgtttttcaaaattttcttagaaatttcgcctttatcctcattcgaattttcctcgcaatttaggacattttgttccatttttctcactaaatcacccgtttgaaggtccaaaagaaatggcaattttcggaaggtatttcgcccaataatgaagtcgtatgtccctcttccaatttctctttcaatcactgaaagcaccgttgtcaccgtatacccagcgatgcacagccttatttcactttgcccaattatcggtactgtactctctccaattcccacaattccggccacttccggggaattaagcttatttattccgaattttaatgccacttttgcacaacctaacgtgacatgtgcacctgaatccattagtgattttgacggtttgccatttactgttcctccaattctaaaatttgagtcgcatttgtcatcgtttactatggccatcaaaacggctggttgcatctccgcatctgcttcaattacttggtccgtaaattttacccttcttccatcactctttagcttaatttgcggcgtgtcctccgggcttggccaccgctgcatcaatggaacggccattggaattccttcaatcatttcgtctctcactttcacactccctttttctccccttatttttccattttcccttatcttccttttctgccaaattcctgagaagatgctgagaaatagccatccaaaattcaaatactttagaccttcagcaatttttaatggcagaaagaattgcatcaaaaatgtgatgctaatataacaacaacagagaaacacccataattggtttaagctaaaaatgcctccccttaaaaatgcaaataatccattggccactattccactagtcattctgtgggtgtgttcagacatcccctcccaggagcttggttttgatattcgagtaatttcacgcattattttggctccttccagtgtttcattaaattgctctggggaaaataattcagaaaaatttgaaagtactctgtttctgaacaagggaaagttcatttcaggaatgtctattttcccgtgtctcgacattttctgaattgcgtccgctggtatttgcctcatttcaccagttttctggtcatatcggatgagtgtgccacgggtatcaatgtaaatgtagcgcatttcgtcacaattcgcctcctttgatttatggtgaattataagagtatttgggtcaagaaatccgtgtttttgtttcccgtacaaatcaaattttattggcaaaaactcaaaacaatggccctcctgccaatgaaaatgaattccgacttcatagacagggtaacaaggcttaacctccaaaattttttcggtcaccaaacgcgcggacacaaatgggtttccgagaaaataacgcgccaaaagtgaaggattagcaattgacaacgtcaaggcctgctcagccattatttgtaaactggtacagattttccgaattgtctcagtgaaaaggcgttgtgtattttgcgcaatttttgtgcttaaagccgtaagctgagcggctaactgcgttgagtaaaccggaccaatttgtgcctcccttttaccccttttccaatttatttcttgtgatttttgtatcattttgtcaaattcaatgaccgtaatggcaaatgcttgatcagatagggttaatcctccaccgctctccggatagcagccgggatggttgtgaaaagttttgttttcaaatgtgagcgcaaaatcaccgctttgagttgtccaaattaatgttgaatattcgcctgcccattttgaaagccaaacataaggacattggtgggtacggtcggggttccaaattaagctgtttttggtacaacaacaagctcccgatttgtaagagcagccagggcactctccgattggggtgtttaagccatccatcccataatgagtgaaaaccacagtgtcatagacaaaacaatttataatttcttcagtacgccaaaataaatttacgggccaaaatccccatccgatttccagtgaattagttgtggactttaaagttccatttatcaactgcaattcgccagctttcgattgtctttcgttactcattctcctacactcaggcgtcgaaacggggtcattgattggaacgatttcctcatattttgcaccaaaaattccgacttttcttgaaattttcgttttaatgcagctgcacgccgtcgcctccgttttgtattgcactgtattttgacggtaaatatttaattcgaacgggatcgggatttgcgtgggagcccaattagggcatattgtttcggtcggcagtgaccaaatactgattggggcatccagtaggcagatcataggcttagtgatgggtaccgcagcaaatgcattaccaaaaatggcaaaaattgccattaaggcaagcagtattggacttgccattctaaccggagccatacctcccctgcgaaattggaccctgggggatcgggatctgttctgattttcctcactaccattataccgagtctcatagccaaagttttgtctccccctgtttctgtccattggagttggggggcgatttcgctgccaatcatttcggtaccggaaatttcctctaccctcctcacggtaacccctctcaaaattacggttatctctccgatcattggcataaaaattccggtttcctctcgcctgtttgccttcatcatttttcttttttcggcattcacgcactaaatgcccttggcggtgacagtaataacaaatcctcctttctgtaccttttgaatgatgtgcactttgctgttgaaatgccagagcctcaactttattggtgagttcggcaaccgagacttgagttgctcttttactggccaacagcagctcaaaatgttgggccaactcataagcccgagaataatcagctggtctccctgatttcacctcaaattgcaggtcaggggttaggcggtctaaaaactcttccaataaccgcttttgtacaaccgtctcattttctcccgcgagtactgtccttacagcttcgcttagcctattggcaaattcataaactcgttctccgggtgcttgtttgcaaattgacattgcctgcctggctattgaccttgtgttttcgttttcaaatttgccttttaaaaaggtcagtgccgcctccaaattttccggggctggggtcatcgcttctaactctcccctagcttgtcctgctaagctcacccttaaacggcttaatttttgaggctccgttaattatggacataataaaagtaagtcctgaaactttgcggaccatcgcgagaaagacatggttgggtttccgtcgtatacaccggggtgcgcaacagtcatgagaaatgggtctgccatcattacctcacaactcatttctccttccccattttggcccatttcttcgttcccattttcc

SEQ ID NO: 3149 - DNA, 3627 bp, Heterodera glycines
  unsure (1)..(3627): unsure at all n locations
aatgaacgtaaanattcaattggaggtagagtatatccgtacatatttctcctgttttataatttcattggttacagcaaaatcaaaaattcccgtgacgaatacatccgccgtctgaattccatgtatcagaccaacttggaaaatgtctgtatttaaaagatttgtttcaaaaacattttcccaataaattgtgctttagtccaaggtggaaatagtccgtggacgggccaaattcaacaaagacggctctgtcgaagtctccagaagtgatggctcaaaagagacatgtcagggtacgcacacactgatcgcagtcggcggtgcgccgcggattccgaaggacgtgccgggcgccaagtatggcacgagcagtgatggattttttggctttgagcaaatgcccaagtgagtgaaagagtggaaaatcgaagatcagacatactgattcatcattggggtgatgtaacacattttgcaattttctcggttagtaaaaccgtcgtggttggtgccggatacattgcagtcgaattggcatcaattttggctgaccttggctctgaaacccatctgctgatccgttatgatcgtgttctgcgcaattttgacgacacaatgtcccaggcattgaccgatgcgctcatcgctggaccagttaatctcaaacagaaaacgctggtatgtgttggaaatgaaggcccgcccatcagggaattgtgatccccaggattctattacctgggattaatttttcaattaaatcttgctgaacaactttttccaggtgtccaaagttgagcgttcagaaacgaccggcaaactgactgtccatatgacggacgaaagcaaattggaggatgtagacaaactgatttgggcaattggacgtgaccctttgacagctgagctgaacttggccgatgttggggtcaagctaatagctggcgactacatcaaagtggacgattaccaaaacacgaccaaggagggcatttacgcggttggcgacgtctgcacaccgaaattcgaactgacgccaggtacaacaataaggggaaaatttgaggagatgcaggccaaaaatccagggaaaccgaatcaccgaatctgaaaaaaccgaatggcagaagtgaacatggatactgtcctttcggatattgaatttgagtcattaaaattgtcggatattctatgccagacatggcattgttctcaattccctctattcattgtcagttgcaattgccgctggtcgccgtttggcccatcgtttgttcaacaaggaagcggagaaccgtctcacctacgaaaacattcccactgttgtgtttagtcatccgccgcttgccacaacgggcctcagtgaaagtgacgaatttgaaaatttataaaagggttaatgaaagcagtctctttaccacagggcctcactttactagcatagatattagttgtttgtgttttctgattttttccaaaattttagaggaggcagtggagcgcttcgggcgtgaccaggtgaagacgtacaatgccggcttcacgaacatgtactttgccatgactcaacacaaagagaaaacccacatggttgtttccacaatcgaattcattcgaataataattttggcgttttttcccttcagaaaatcgtgtgccacggaaaggatgagaaggtttgtgcaaatggcccaaattttttcgtgacatagtcaagaattttccctttaaggtgattggattgcacattttgggcatgggtgcggacgaaatgttgcaaggcttcgctgtctgtgtgaaggcgggtcttaccaagaaagactttgacaattgtgtcgccattcacccaaccgcctcggaggaacttgtgacaatgcgctgacaatcggttgacttatttttgtttgtttttggtggtgaactgctctaatgaatttctcttatcacatggacacatagttaggttaatgaatttgcatatttattgtttaattctttgtgacaaaatgaaacactgaaatgatttaaattaaaattattttttttgaatttttgtgatgttgcgttccttaattaatcaagagattgtttcagaaacgtttattgaattacaaaaataaataaataaaaatgagaaggaaggaaaatcaattcagcgtttctcctctggtcaccgtcgactcgagaaattccacctttcgctccatcgatgtgatggtgtcattcagcgtggccaattttgccttgcaggtctcgtcgaaatgactcaaaaactcggaaatttggcggatgttgtcggatatctgaagaacggcaaatttcatgaaattcgggccgaaattccattccgatgaatctcacaatgctgttcagttcgcgattgtcccagtcctccttcatttgacgttgaatggacatggattataaacggaaatggattttgaataattattatcctaaaatgaattattaaacacagcggcccaattttgtgctctcagtgcatataggtttattatttatttagtaatcagaacgccaaaactttgcaaaacttaaaattttttggggattttcccttgtaaaaatagaagagccgatctcgagttaaaaactagacagctaaaaaataaactgtgattcgctagagggggccaaaatatgggcctatacaaaatttcaaaaaaaagttacccacaggaaaaaattttttcccagggcaaaaatttcaataattttaattcttttttagccaagtccacaatttaaggccaaaccaaataaaatttacaatattctccagaattttcccttcaaaatgagcataaaatggttttatttgctctagtattcaccaagttataagctaaaaaaatttcataaaattgtcgatgttgtacgtaaccaacgctttttgaatatgattttttattgccacgaaaacttttattaatgaaaaaataattctgccttcttctttaaaagaagaaattgactttaaaagaagaaattgaaattaacacacaacatagggaggacttgaacctgggaccccccttttggtgactaactcacagaccactaagacgaaaaatccagcataattgtacttggagcccaaaattgggccgctgtgtaaataaaatagaaagaaaaacaaaattcaagctgaaagtacgaaaaaaaatggaaaataacaattttgatttaaaattagtaatttaagttcggcatttctcttaatgtttttgcaacgccccgcccccttcccccctcagttttgatcaataaatgttgagcacatagatagataaagccaaatgattgcttttccgcatcagacggatgcatcggatggaaaagtgtgtggtgggagggtgggggcggcgtatacacaaaaatgcatcggattttggctcaaaatcccaccgattgcttttgcttggtttggggggagggaggctaacaatgagcagaagcaacagttgttgtttccgtcgattgatgagtgtgctgtgttgccctatccgtccttcaaatgaatgcattcattcacccatccaaatgatgcagtcaatcggcggttgggagataatttgggggcggacggggcgctttccctct

SEQ ID NO: 3150 - DNA, 4689 bp, Heterodera glycines
  unsure (1)..(4689): unsure at all n locations
cagcagcccaatggaaacaggaaggagctggtcagtcatcagttagaccacgaattanaatttatttcttgtaaaagttgtttcacattaaaatgatgccccattataatttcaacaattttattttttcatttttcagctgacgatggtgaaattctcatgtccgagccgggcttcccgtgccattccctgtcccaggagaattacacatgttccggctgcattcagttgcacgactcgtgcgcatggtgcatggactttgtgagttatttatttctttcgactcatacaattttatcaaacaattttatttaattttgtttttcaattttcccccttttccgcagagtttcaacaatttggcccaatattcgcgctgcgattccgcccaaattctgctcgagcacggctgtgcccctgaccaaattgtgaacccgcaaagttcgctgcgcaatttgctcaacgaaccgttcactgacgggacggaggagggcgaacacacagtccaactgaggccacaggaggtggagattcggataagaccaagtgagtcccgctgttttgggttattttttcttatctttgagcatttttattttttgccctccgtttcagagtctaaggcccgtttcaatgtccgatttcgccaaccacacgattatccggtggatctgtactatctgatggatttgtcatactcaatgaaggacgacaaggagaagctgtctcaactgggcgacctgctcggtatgcattttcacgtttttcataatatacgacaaaaaattgttttctttgcatttcctattacagctgaacggatgcgttcaatcaccaaaaactttcggctaggctttggctctttcattgacaaaaaagtgatgccatttgtcgacccgcgccgggagaaacaggtttcaacccccggggcaatcggtgccttttttggggacgaattgtgtcaaaacattgtctttttggcgggttttcaatccatttttgtattttgattggtactggatttacggcttttatgaaaataggagcagccgtgcgccgagggctgtgcgcccacctacggcttccggcaccaaatgagtttgacatcgaacacggccaaatttgccaaagaggtggacaaggcgcagatttcgggcaatttggacgcgcccgagggcggattcgacgcggttatgcaggtggatacttgattagccaacattatttggattaaagccaaggagagggtccagggattgaggaatggggctgaaaatgaccatgactaatggtcaaaccgtgaaagtcatgaatttttcgatcacgaaatgaacgaacacgggttttgattttttaaattttcaaaagtttggggcatttttacaaaaaatcatttaaatattgaaaaacctcttccaattcaccttttcacttctaggccatctcttgcaacagttccattggatggcgagagaggtcacgaaaaatgatcgttttctccaccgatgccgggttccattttgccggcgacggacgcgtaaaaaagggggagggcgtggcaatttacggggacactgataatgcccgtttaactgttaaagttggccggaatcacaacgccaaacgatggacagtgccatttggactcggatggttattatacggtgagcaaaaagaaaaaggcggagccgacccgggattttgtgtttggctagggaatgccatccataggaaatggttttttgtatgctctccatgcaaaactcactctcgagaaatttattcaacaaaaaggtagtatttaaaatttgaggaaaaatgcacaatttgttgtttttgtctgaatttgtggcgagaaaatgaacaaaaaagtgccttttgcgtttgccttacaattagcccaattcccttaaaacttctgcccgtcctccctccattctcgtgccatttgatggatatgccgtggcaaccctccgttgttttgtttattgtcattctttgcagaagtcgatagaacaagactatccgtccattgcactgctccatcagaaaatcaaagagaaaaaggcaataaaaataaagagattaaaggtttcccaatcccccgaatttgtcaggtgaatgttatttttgccgtcactcggagcaaccagcgactctaccaacaggtgagggagagagagagagagagcgtgccctcgcacaaatcaatcagacaaaagccttccattgtttttcccgatcgcttacttattgattggttcattgatttttcggcgtctcttttccccattcatttctcttccgtttcagttgaccgacgcgttgcctgacgtcagcacagcggtcggtgtgttggccaacgactcgtccaacattgtgacattgattgaggaggaatacgggaaaatcgcagaaaaaatcattatggtgagtcatctcgcatgagaccgaaacttctaccaaaaaacattgttttttcgagtccatggcgaaaataaaaaaaagcgtttcctttgctactttacatggatttcgggtgtacgatcagcgatggaataataaaatattccaaaatcctcctcccccccccccccaggtggacaatgccaacgcgtcgatgggccttcgcttgtcctaccggtccacgtgcgtggacggtcgaacgctgcaggacacgaacacgtgtgacggggtcaaagtgggcgacacggttgcgtttgaagtgacgctggaggcgctgcactgtgtgccgcaaagggacttcgtcctgcacattgggccctccgggctggaggaggtgctcacgctgtacgtgcacgtcatctgtgactgcgactgtgaggacgaggtggaagcacgcactttaataacaccacatcatcccatggcatttcaaaaagttgctcattgacagattgtttacaatgcgcccgaatgcaacggacatggcaatttggtgtgcggcatttgccaatgtgccgaaggctatgtgggcacccattgcgagtgcgaaagtggcggcgagtcggcggtggcgttggaagcgaagtgcaaaaaggacaacgacaggtgggtgtgctggtttggtttaccgcctgtggttgaatcgaactgctcgaacttgattggattatcattttagatgggccctggatttaaggtttaaggcattctatgcctaatttgaaataacgcatgcgaaataaaaacatttaaacatgagttaacagtggattagtatcgtaacaattccattcatttccctccgcccctctctttcagtttggtgtgctcaggccgtggcatatgcaaatgcggtgtctgcgaatgcttcccacgagcggtttgtttattgtcgactcgtcatggggggggggggggacggcgtgtgccgaaagttcggcaaatttcgggccattgttcacctcacctgtaattcataattgggtggtcgtcagtattgtacattatatcccatttttgttactattgtcctctgttttgtcagaatgcggatgaacttgtgtccggccaattctgtgagtgcgacaatttcaactgccctcgtcacgatcggctcctctgcggcggacatggcgactgcgtgtgcggcacgtgccaatgcgaaccgggcaagtccaaagcaaacgaatgggaaatgcgaagaagggggaaatataaaaaaaattataaaaaatggaattttaattttgaattttctcattgggtagggagggaatggaggtaatgcatttttgggttttatattaaatactggcagctgctttttgttttttcgggtgcagttcatttccctttctttgaatttttaaaaattttaaaaacaatttttctttatatttttcaaaaattattcatgaaaaatgatttaattcttcgaaggggagggcgacatgaaaaatcgctccggttttaaataatttagtctaattttttactaattttttgaattttgcctttcattggaatgtttgtccgatggatcttccaaaatattcccaatcttttcttctaggatatacgggcccggcctgcgaatgtccgatcagccaggagacgtgcatcgcgccgaatggcaaagtgtgcggtgggcacggcgagtgcatttgtggcaaatgccactgcttcaccgacgaggacggggcacgctattcggggccgtactgtgacatttgcccggtgcagttttcaaaattatttcatttgaataaataaaggtttacattgttttagacttgtccaacaaaatgcgtggagtacaaaccgtgtgtgatgtgccaacaatggggtcagttaaacggcaaaagaaatattcgacagatttcattggttggccaaacctgtcgagaagatgggattaaaaattgcgtataaattggatttttggggtcccaaactgatcggcggatgggttgattgatcacaatatttcatgaacatgggataaatagtgccgtcccattgtcggaatgcatttgctctgcttttcaggcaccggcccttacaatgagacgcgctgttcggagtgtccgttcacagtcattccggtggatgagctgcccgtgctgaacatcagcgagtcggacagttggaatgagtgccaatttgtggacccggccgacgaagaagccttctacttcctctactactacgacggctggacaa

SEQ ID NO: 3151 - DNA, 2454 bp, Heterodera glycines
cgtataaatagcaaaaacaattattactgtataaaaacagaaattacagagaacattattgtattttttcttaaataaggacataagatgcaggaaaaaaagggtaaaggacaaaaaataagtactttatttcattttttagccttgaatcatataaaaatgccaaaaacaaacaatgaacgggtccatccatccgtgacctttcttgaaggatttatgggcattaatttaaatattcaagaatgaatggatggcatggcttattttaggtagaagaagagagcatattttcatgatgaatagaaaaaaagaatgatattaaggacaaaagaaatcagagacataaaagaatttatgtacaaaagtggcttaatttttctcgtagagaaatttaaaatacggtatatatataatgtgttagattacggtataaaaaatatttacgcttactaatattccgattctagtctcataaaaataaccatttttatcttcataattcttaagagcgattctatcctcggcgggagggcataatgccaaacataaataaaaaaaattcgaattttgagtattttgttgcatttctgtctcccttcaattgctatggatccccggtaattgccccctaatttataattaattcgtccccatcatctcattataatttcctcccattgcccatttgaagggcgacccatcggcggcgggggatggacaacaaatatttaaatgcaaattaagcttggcgcttggaattggcgttgcgtcctattcatttttattggaaatgaaaattcaatgggccgattatatttgaaaattgtttcattgaaggaaatagaaacctcaccacatctcattgtgtaataattgttaaaatgattaaaatttaaacttagcatttaaattattattttttattattatttaaataaatttatttaccaaaattatttattgttggtaattccttaaattgataattaatggggaccgtatttttaatcagaaaaatgataattaagcataaaaaaatccctaaattaaacactgaaaagcataaaaatatggcaaatcgatgattaggcataaaattgccatgattttggtttattaaaaaaaaaaaattagaattacagaaaaaaatatgaaaaaaatgtcaatgttttcgaaatgaagttctttaacctgcgagaacattgaagcaattctcttcaaaaccacaaaattctttttataatttaaaattttaatgaaattttgaaaaaaccaaaataaaagtgaaaatctaaaaattaaaaaaaaattaatcgaaaaattcctaaatgaatttttttttcagctcttccccattcaccatgggcatttttggtccatcttttgctgtgccgaaatgcgctgccaaaccttcttcgaccacttcacaattggattggctttaggggggtcaccctccccccgggggccaagccgaggcttcttccttcctcagggcgggggaggacaaattgtggtggcgcggcaccaccacaaatttggcaattgaaaatggacttaccaaagtagaaattgttgctaaacaattgaaaaaaaagaaaaatgaatttttgattttgaataaatttgaatgatttaagttttttaataaaattcaaaattaaaaatgatggaatcacaaattttgacaaataaaaatgaaattgttaaattaaaaatttgcaaaatatgacagcctgtgaaagtagaaaacttgtcaaattcatttggttaatttgatctagtgaattctcattaaaataaatacaaaaaaagtttttctaaaaatttggaaacctctgtaaatttggtaaaatttttatttaagaatgctaaagcttaaaaaatctttttcaattaacaggttttcgttattataaagatacaaaaattaaaactcgaattttaaattaattttcatattttaaagaaatttttaaatttttccattttgatagaattaaaattactttcgcttaaatttaaaaaaaaattaagttcatggtacgaaattagtcataactacttaaaaaatgtataaaattcccgaatttcccatctgttggcaggggagtagtgaattctaagaatggcatgaatcgcaaatattggctttttgccccccaaatatgtcgcccaaaacatggggccagatgagcgcctaattaggtttttcctttccatggcactctctgaggaggggggacaaagatttggttcggttgtgccaatgttttggctgtggttggtccaattgaaataatgaggatcgaatgaccatagaaggacagcacaaataaatgctggaattatttatatattaatattttgcttaagagttcataaaagaaaatttatataactttacatttgataaaataatatttcttaagagataaagaacatatatatata

SEQ ID NO: 3152 - DNA, 3853 bp, Heterodera glycines
  unsure (1)..(3853): unsure at all n locations
ttttataatttaaaatttttaatgaaatttttgaaaaaaccaaaattaaaagtgaaaatctaaaaattaaaaaaaaattaatcgaaaattcctaaatgaattttttttcagctcttccncattcaccatgggcatttttggtccatcttttgctgtgccgaaatgcgctgccaaaccttcttcgaccacttcacaattggattggctttaggggggtcaccctccccccgggggccaagccgaagcttcttccttcctcagggcgggggaggacaaattgtggtggcgcggcaccaccacaaatttggcaattgaaaatggacttaccaaagtagaaattgttgctaaacaattgaaaaaaaagaaaaatgaatttttgattttgaataaatttgaatgatttaagttttttaataaaattcaaaattaaaaatgatggaatcacaaattttgacaaataaaaatgaaattgttaaattaaaaatttgcaaaatatgacagcctgtgaaagttagaaaacttgtcaaattcattttgttaatttgatctagtgaattctcattaaaataaatacaaaaaaactttttctaaaaatttggaaatttctgtaaatttggtaaaatttttatttaagaatgctaaagcttaaaaaatctttttcaattaacaggttttcgttattataaagatacaaaaattaaaactcgaattttaaattaattttcatattttaaagaaatttttaaatttttccattttgatagaattaaaattactttcgcataaatttaaaaaaaattaagttcatggtaagaaattagtcataactacttaaaaatgtataaaattcccgaatttcccatctgttggcaggggagtagtgaattctaagaatggcatgaatcgcaaatattggctttttgccccccaaatatgtcgcccaaaacatggggccagatgagcgcctaattaggtttttcctttcaatggcactctctgaggaggggggacaaagatttggttcggttgttgtgccaatgttttggctgtggttggtccaattgaaataatgaggatcgaatgaccatagaaggacagcacaaataaatgctggaattatttatatattattattttgcttaagagttcataaaagaaaatttatataactttaaatttgataaaataatatttttaaagagattatatatatatatatatatataaaaaaataataatttcttcttttaatgataaaaatttatatgttctttatttatgtacgatttcataaacaacatgaatgtatgtggtaaaaattttagttttaattttaataaaaattttaaaaagataaaaaaattaaataaaaaagaatttaattttcttttttaatggtgaattatttatattatttatttcatttataaatttcataaagaaaatataagtgatagaaaatttaaatttaattaaaattaatatttataaaaatatattaatttcttattttgatgatgaaattatttatatcttattatttcattttaatttcaatataaatacacattgtaggaaatatgaaaagatatattgaatttttaaaacaataaattaaaattatttatttaatttcttttaactagttaaattcgagttaaaaagtaaaatttttatttccaaaaaattcttaatacaaaaaactaagcttttcataatataggccattttcattcttttaaaactttatttttttccaatgaaatttcaaaaaaaaaattttaatttcaaaaaatttaccaaaaaattgtacgaagtacaggggaatgaatgcactaaacatatatgcatgaaaagaggaggatgagtccatattcccgtccagcattcactaatccgtccccttccatccatccctccgggggcgccattctttggccaccccataaatccaattacgacggcacccaccccttggcccccaccaccgtcttcggtgggatttggccaaaaccaatttcctgggcttggccattcccccgtccgaaatggcattgttatagtgttttgttgttacaccgctttgctactatatgtgtgtgtttggtttgtgttagttatgtggcatgttcattcaattggtgccggccagacaaactttgaggacgaaagattttgtcggtatggaaaagttagcgcagcgccattagtgggacagggacattagcgattgccattagcggaccgccgttagtgggatatagaaagcggaccaccattagcggccggaggattttaacagaccgccgttaaaattttgttgacaattatttgtcattggaacggggtttttatcataaatacttgtcaaactgattgatggttaactggataaaagcatcgatcaaaaataagggtgttgtcgcatctaaaatctgatcggataattctcaatgattgattttcttttctcattcaatctcgacttttctgatcactgatcagcggtcctgcgggcgctgcttcaaatacttctgaagttggggcagcgcatggacacggtcaacgtatttgatcagctccgggtacgcattgatggtgtccggctccaactttgtaaacatgtacagaaagttggccacctgttgaaaaccagcgattgttacggtatttatggtacggtactgtaacaaaaattttttaagcaattcaccgtaaatagcatattattttcgtatcagcaaaagaattaaatctaatttataaatcaatttttaaggactcataaaacggcttaaaatttaaaaaattacctaaaaattcaaaaaatttgaaaatttcaactccgacggtttcgatgactgccgtcgagaaaattttccaattttttcaaaaaaaattttacttgaaagtccaccattgagaggccagacttaagcatgtaccctgacccggactccttcaaaagtttctcaaaaagtggaaaaatgcgcttgactcccggctcgaacacttcgccgtgcaatttgtccttggaaaatggaaaaatttaaaagaaaaaaagtttctattaaataatatataaaaagaattttaattcattaaaaagaatgaaattttttcttttaaaatggtttaaatatacatatttatttattaaaattacaaattaaaatattttttatatgaaattaattgccaaaaatttttaaaaaatttggcaaatttgggtgatttttgaattgatttttataaaaatattaaattaaaattaaattaataatttaatttaatgaatgaataaattaatgaattgcttaattattaattaataaaattagaaataattaaattttgcttcattttcttcaccaaatcgccttcttggcgtcccattttgaccatcaaatacgggagcaaatcagtggtagcatccttcagaaagtcaatgatttcgttagccttcgccttttcccattcatctttgccggccaagtcttaaattataaaattaaataaattaaaataaatattattaccaaatttttcggcaaggtagcgcaaaattgccgaactttgtgccaatggctttccgtcaacctccaaaactggggcctttccgtagaaaaattctgaataacttagttttttttttaatttggcatttatttctatggcattatgccacacgttttaattactcactgggtttgtacgttttctcccattcttccatgtctttaaagcggatgtcctcaaacggttggccaacatagtgaagcaaaaggcggatgggttcacccaaaccacgcaggtcaaaataataaaatttgtattgtgggacattttttta

SEQ ID NO: 3153 - DNA, 4458 bp, Heterodera glycines
tgtagagtaagagagagcgagtaaaaacaaaaacaaagattgcacgagagagagagagagtgaaaatatagaaaaagagttaaacaagaataggataagaaagagaaagagaaaagagagtgtgaggcaagttgagaggaatgtaagagaaggatgataaataattttttttttttaattttggctagttgtaatgaaatggtatatttttgttttttgggatcttaaaccaaaaatttaaaattcaacgaaatacccgcaaattcacaaagcgcgttcagcatttaatttaaaattcccgtaaaaatttgtgtacatgaatgaagagaaatgatgaagaaggaatagtttgtcagtcatcagcagtcggctggcagcagtaattctgtcgcttcgtcggctgtcaccattttatattcccgcaaaatttgtggtgcacacaatgtacaaatctttcgtcatggtcgtcataattgtttttgttgtgttattgttgtacattgtatgtgaatgtagttttgtacaaatctttgtttatttgtgatcaattactgcaattaaaagcaattagtattaattagtaagcgcataaataaacatttggcgaataattttactctgtatttgagcaatttaaaaaaatattgaattttgtttttaaatttaaaattcgaccagttaaaaattaattgggacaatgatgacatttttaaaagaaaataaagcaataagtaattagtaagcacatcaataaacgggaccagagcgtttgggcccccgtttttgggcccccgcgtttgggcccccgtttttgtgccccggggtcgtttgggccccaacccaaaaatagaaaaatgtgcttttttaaaaaaatgaaaaatttttgattataattttcaaaatttttaattcatggtatcttttcagtagcctttagtttactctattggcctgcaaaatttgaaactaattggttaagtctcgaaaaagttatgatcaaaaatgctcgaaaatggttgtttcttgagtaaaggtatgaataatttttttacaaaaaaaatgcaaataaaaatataaatttttcatttcaaatatttatgttattcaattgggatttttgagtgcctgtttctccattttgtgcctattatggcgcttttatgggtgcctaaaactgaagcctttttgcatatagtcatggaaacgaaatataaattaattgtcatttaatcaaaaagccgatccattcggtgggcctatagtagtaacaagcattttttgtatattgaagtacagagggacaaaatgtgtacatggtttttatgtggtacatcagcagggaacggacagaatttagggttttccaacatttttggggacaaaattacgattccaattccagaaaaaattaattgaacctcagaattccgatttttaattcccgtaaaatttttagggtctgatttttcggctcgaaattccccggtttctaatttccgtaaaacttgtcgagtcgcagaattccgattttcaattcccgtaaaaaatgggagtcgaaatatatatatttatcgaatttttgggctcggaatttcggttatcaatttccgcaacatatttgaagcctcggaatcgtttttttttgcgatttcctaaaaatttgttgatgaggcgcaaaatccatccctgctgttcggtaggggtcagttgcgtctgagccaggcataaagcaccataacttttttctttgtttgtcaaattttataaatttggcatcattcgaaagctctatatgtttagaagcttttgataagatattgctaagcgattgaacaacttataaaaaagttgcaaaatgaacactatcaaaaagtcagaatttttgcatattttaatttataacttttttatatgtcggtatgtctttgtgatttttgtatagccgatagagcttgttaagagctttcgaatgataccaacattgttggatttggtcaacaaagaaaaaagttatggtggtctaaacttggctcagacgcaactggcccgtttcgctgctgttgttgtacatgaatgaagagtgagtgagtgtagtcagtcatcagcagtcggctggcagcagtaattctgtcgcttcgtcggctgtcaccattttatattcccgcaaaatttgtggtccacaaaatacacaaatctttcgtcgaggtcgtcataattattttgttgtgttattgttgtacattgtatgtgaatgtgtagttttgtacatggcgacgataaaattttaattgccccacaaatgtgggggcaaattggtgcgacgaaattagcagcaacaacaaccgttggttgtgttggtaaaagaaaatggggggggggggggggcgagggctttcattagtcatgcatttcactaatgatgatggtaaacaaacaattatttaaaataggaatttgcgggaaattaaaaattggaattaatttgtatttttacttctatttattttattgatgttattgtatatatcgacataacgatacgattaaagaattattaaaataaatatttttattcactcataacaataagattttaaattaattttaatgttttcacttattggaaatgtatagttttgtgttttcctattaaaaggatatgaaataagtaaaattagattaaatttattcaaatctgataaaacttgccttcgtctacagattattttgtagtttttaattagctattgataattaattaagtttttaaatttacctaaaattttagccaaaaattcctaaaattacattttccctgtagcatctctttgaaatccatttattatagaaaatttactttttttagaatttgtctttaaaagattttgtagtattttgaaaaaaaaaatatttagttatcattaattgctgacaaattaattacatttttgtcttgaagtgccgactttatcagagattctatgaaaccagaaaaaagaaaaataaataaaacacatcttgcttgaacttttataaaattttcgtttataaaaaaacatttatttattttttctgtgaaaatttttttttttgatttgaatttttaaattttagtgccagtattaaatacaaatgaaaatgtaaactgagcgatcaatcatcggcggtcagaaaggggcggtacaataaacggataaatgaaatgcataatacaataaaatggaatgtcagagaataattcctagggcttcgacaggataaatagcgaattttagacaatctcttacaatagagagtcaaagacaaacgaataaaccgaaaatgtttggatgggttgcgcgcgggagagactggcaaattttgttgccaatgattttaccattgaaatttttgaacgcaaatgtttaaaaaattttctttcatgaaatttcattcaaattttttattttttttaacctaaaattcatctcacttagtaaaactcatagccattgatcaatcatttagttcaaaaactgattgaaaagcacggcacggatgatgaacagtgcgtagaatgaattgtttatgccgcagaatggtgacaatttcggccacgtaaagcagcgccgaagggatgctcagacaaatggccaaatagagaaaagagtcccgcgctgagatagaccactcgagaaagcccatgagcgagttgaaaaaagagacgcaaatgtatgctcaattggatctcgccttaaaaaagtgtcgccgttattcgtcaatgctttttaaattattttatcatggcgaatgcttgttccttcctcggtattgttattttgttgaccaattactcaatttcatattgtattgtatttttttgtcacgattgttcacttaataatgtaaattggcgaaagaactaacaaaaaggggagaactattcatttaaccaatacaattttttatttgttagcgaaatttcacaagtgagaaatgtacttagccaaagcaaaaatcggacgaaatatttttattgttggagattttaatttaattaagatatttgttttaattttaaattattatggcattttatctctatttattttatgtttgttgacctctttaatttatgttttgtacactttcacttctcattattctcattaatttgttttccaaaatttcctctctaaatttcgttctcaatttgcttcacattggtgatctcctcggacttcaaaaataaatattgtgtgtggctttgtcttcgtgtgtttggtctccaccccccaattcaattgaaggaaaacggtttttctttcctattttataccaaatcggcgtctctcggttataatggaagaatctgaaaaaaattcaaattttgttggcaaccagtccctgaatggttacagacccagggctgaaatgcccaaatacattaaaagaatttaggtcagcttaaaacaaaaa

SEQ ID NO: 3154 - DNA, 3670 bp, Heterodera glycines
aatccgtgaagaaatttctgtttggcaagcagtcctttctttttaattaaaaaaagttacaatttatttttaaaataatttcctatttaattgtaatttatttttcggcactccgctgggccgacgaaaagtgccgtgaaaatggcattgaatgttcagcagagaatcgccgtcaaatgcttggcccggcactgttcaacatacattttccgcttttgtcaaacgtggaatttgcgaaggatattggtaaaaaaaagagattaaaaccaagtttaaactctttcaacaacgactgccaactttttaaaataattaatttaaataaattaaaataaaaatttaaaatgatttttcttatatttgcagtgcattcaaaatgaaacatatttttttaaaattttattctatttttcagttccaaccaatgtgttatcaaaagatgaagtgctcgctgtttatcagttcaaatccattccaaattgtcatgggatatccgacggatttttcccaatgcaatttccgacaaatgaacggtttatgaacacgggcacacttttgctggacattgaaaaagtgtcggaatttggacaagagcctgaagatagtagtcggtgcagcaaaaaaatgtacataaatggactgtcatggaaaataagggcagaaattcgaacgaaaatggaatccgatgatagaaaggtcggcatttatcttttgtgcgatgctccaaaagaaggtgcaaattaagggctaattaatattaattaaccaattaatttgcattgagcagaaaattggagttgcaaatgttcggtaaccattcgaattatctcacaaaagtgtggagtggcggatttaagaagagaagtttatgcatattttggaaacaatgaatatgatagctggggatgccgcgattttagatggagatacagatacctcgatttcattgaatttgctgtgggtggcatttaaatgtctttctctaattaaaatattaaaattaagaaactgggttgacccgaaaaatggcttgtacgacatgcgtggggcacaaagtgacattttccattgatgtcaccgtgaaagaagcacaaacgggcaaagaatgcttatattcataatcagtgatcccgaaaacccttcgaaaacatatgtattttcatgtgtttgaataaaaaaatatgataaaaaaactgaccaaaaaaggcgatccaaactaacattagtttagctaactttctttgaacaaaattcaaacaaaatttattattttaattattttttgagtaatatattagctttaacccaccgtccaaaaattcctacgcatttgggttactttttcccacctcatttctgcaaattatccacatatttcaagttcaaatgcggaactgcttcctgcttgttgtctgctgctgttgacaacttcagttgcaattagagggggggggggggggcttttcccccgggggatgcttttcctccacagccctcgccaaccccaaaattatggcttaaatcgcgtaattcttataactcatagtaattaaggatcaatggccaatgtcactttgtcctcgcttttattgtaaaatcctttgcttggatccatcagttccttaaatattgtaataaattaaaatttaaaaaaataattatcttaatggaaattcattataattagtattaattagcatttaatttgcaccttcttgttcacgcataaggtaaaagcccaaccatttctcattgtcagtgcttccatttttcttttcaatttatgccaatattttccatggaagcccatttatgtaagtgaaagattcgcttttacgttcacttctgtcgatttctctcgcaaattccgacaatttttcaatttccatcgaaattattccattggatttgtcgggatcagaaatgcatttctcctttttatcatctttcactgtgacatcaatggccaatgtcactctgtcctcttctctgttataaaaaccattgctttggtccatcaattccttaattaataataattatgccaattaaggagttatgtacaattgacactcaacaccacgtttaaacagctgtaagaattgactaaataataaaattgtcacttttccatattttaatttttaattttgtagtaaatataaatttttaagcgcagcttaggttatttaagaatgaaatcatagcgaaattagtaatagtttttcaatttttaatttaatgagcccaaacttcccggttcccaaatttctggtcccaaaaaattctgcttaaataaaaggaaaaaatgatcagtcaattaggaatggtttcaatttaaaaaaaagtttacgtaaatcctaacaaaattaatgcaataaatccaagtccaaaaaattgtaaacattgacctaaaatggtaaaatttgaattgggtttatgactaaaatgtttatcattgaaattcggtactcaaaaatgagagtctactaaaacagctccgacaattaattaattcatatatcagcagttttgaaagtataatcaagaaaaattaataaataaaaaaacaggttcatcataggatggaggatattcaatgggcatttttccccaaatcatattgggcatttatgtttcgtcttccgttttgcttctttcactgtgacatcaatggccaatgtcactttgtcctcgctttggtcgtaaaagcctttgctggggtccatcaattccttaattgatcataaataattgggtcaattaagggaatgtttaattgtcactcacagcaaatgaaatgaaattcgggaatccccagctgttctctttattgtcaataacatggtcatcgaattccattccgaaatccgacactccgctctttagagagacaattcgaagagttgccgaacatttgcaactccaagtttctgctcaatatcaattaattaattgttgttaatatatatattaattattagtaattttgcaccttcttttggagcatcgcaccaaagataaatgctcaaccatttctcatttttgtcagtgcttccaattttcggatttatttgtgtccatattttccatggcaatcctttgatgtgcacagtttcgcttttacgttgactcccaattatttcacgcgcaaattccgacactttttcaatttccattgaaagtgtgccgttggatttgttgggatcggaaatgaatttctccatttttggctcatcaacagttatgacatcaatggccaatgccaatttgtcctctgctttgttgtaaaagctcttgttcgagtccatcaattccttgattaaccataattataccaattaagtaaatatgttaaattattactcacagcaaaagtaatgaaaaatccaaatccccggccgatgtttgatctgttgataacccggtcacacaatgtcccaatggaattctccgcttcggtcttttctgacacaattcgataggttgccgaaataacgcagttccatggtcctcctattttaataatgattatatttttaaaatagtaattaaaattggaccttcttttgcatcgcaccataagtaaaatcccaaatatttcttctcatcaatgcctttcgtaatttctgctttaattttccatggaaatccatttatatacacggca

SEQ ID NO: 3155 - DNA, 2992 bp, Heterodera glycines
  unsure (1)..(2992): unsure at all n locations
agccaaacaacaattggcaaaattctaaaattcaaaggcatttaatctttaaaatgtagtctttctctgagagtgccaaagcgagaaaagaatcgagtttttcttgtctaggttttcgagtttagaagaccgagatttctttaagccctctaatgattgtttggcttttgacaaacttaaaaaaacattcattttttgaggaacatattttacaaaaaaaaagtctaaagtcaagggtttttcgatctcacaatcagacagcagcaattaattggtcttaaaatccttaatttattatacattctaaataaacgaaaaaattttggtaaaaattttagtgtaggaaaatatttgcaaaaaaatgcaaataatagcgaaattcaagacggaaaattcacgagattgagtttaatcattcaaaaaaaccactctaaacagtttattatgtattttagttaactggaaaatgtaaaccgacaaaatagttaaaaattagcaaatttttaattctttcgcatttttcaatttttcctacccactttcaagtcgagaagacgggcctgagcaaaagcgaagaaaacattgcgcaattcggaaattggaatttgcgaagatgagccgaccagagaggggatattgtacttattggctaattaaataatttaattatttttgtcacataaaattaaatccaccggcgtaaagcacagccattgcattttctccgttcagttcattcaactcttccgtataaatgaagctcaacatcactttgaatgctgctgcttcaacgtcggggacctccacgggacaatcagcagaggctaattgaaaattattagtgtaattagcggcggctaattgaaaatttattagagcaattagcggaggactattgaaaattaattagggtaatttgcagagactaaattgtaaatgtcattcagtaatgtttttaccgaattccgctttttcctttttggcatcaaaacggaacatcgcctcaaaaacgtcggaagcgtgtttcaaaatgagcttatgggctggcacaagcttaagaggatgaaattttaaaaacacaacaaaaattaccattcactaaatttccaatttataattaataaattaaatttttaatttgaagactcgcctcttttgcgtctccgtcgcccaccaaaaaataaacatccgcgtcctcacgcgtgctcaacaaatgcttcatccgatcaagcactgattgggacatgataagcaatatgaaaatcgtatttatctattaatgtaatgaaatgaaataatgggaattaagtgaattaagatattcaaaattggcaataaaataaataacaaaatcggctaaatccttatgattttactggactattcagctggctaatcatatgccaagcccataaacaacgaatgagtgaatggtgaaggcttcccctatttttggggggaagatttaaaaatcgcaaacattttaattaatttatttttcaatttgtatgtaaaaacaaattaaaaaaagtaaagggtggaaaatccttacccgatttgaactttcattcatggaaattggaaattgaactcccaaatcatcggaaaattatttacttttacccatcatcttccatccaaagctcattcaaaacaatatgcaattgtcagaagagtgtaatgttttgttgttcccatcctcccgtatttttttcatttattcatcgctttgcccctcggggtaaaaaattgatccaaatcaatacaaagaaacattgtagaaaatggtgtgtacataggttgaataaattatattaatattaatgaaacagataatttataattttggattagaataaagcgtaaaattaatttaattttatgggtcagccttttattcgtaaagtttttgtttaaaaataaaaactgaaaaggaaataagaggatcatgttaggtaatggaaaaaatcataaatgtatatttaattaagtaaattaattaggaaaaaattgcagagaacaaaatgaaaatatgcctaattaaaaacaaaagttgtgagaaaaagcaagggttattctgttccaatttatccattgatctgtcaaattttttacaaaatcagaacatcaaattcaaaaaatcgcattttgaggtcaaaaaatatgcaaaattgcttcaaatgattaacttacaattttttcgttcaaaaataataaattatttttatctttcgtctctcatctctagggttataaattaatatgatttttaatatatttttctttgcgcatatgctattaaaaagcggctcagaaatagcatttctacgttaacattttttggttgttttggtgtttattctcctgatgagataacacaaaaaattattaaaaaaacaaagattcatttttagagaaagggaaaacattaaaatagtgtatgccagagatattttctgcttttccaaaaaatccaaccaaaaagggggaccaaaactaatttgtaagacaacattagtaccaaaaatatatatattctaaatttagtgtaaataaaggcaaaactttttttctaattattttgttgaaattataattttaaattaaaaaaataggaatgaaataaaagacaaaattgaaccttttttatagagggaagagagcgcaaacaaattatggaaaataaagttaaacgaattaatctatcttatttcttgtaaatatgaatgggattaggtatgtactaaatgattcatgaattttataagaccaaacttataaaattaatttaaaaaattaaaataaaatgattaattttagtgcaaaactttaataaattaaatttattaatataatccctataagcttcaaataaagctaatgtaaaacttctcgcaattacactgatgcccctgtttttttttctaaaccatagcctcaaatttaggagtgtaaaatgacaaaatttattcaanaaattataaaaattagg

SEQ ID NO: 3156 - DNA, 2648 bp, Heterodera glycines
  unsure (1)..(2648): unsure at all n locations
gaaattggaaatgaactcncaaatcatcggaaaattatttactnttacncatcatcttccatccaaagctcattcaaaacaatatgcaattgtcagaagagtgtaatgttttgttgttcccatcctcccgtatttttttcatttattcatcgctttgcccctcggggtaaaaaattgatccaaatcaatacaaagaaacattgtagaaaatggtgtgtacataggttgaataaattatattaatattaatgaaacagataatttataattttggattagaataaagcgtaaaattaatttaattttatgggtcagccttttattcgtaaagtttttgtttataaataaaaactgaaaaggaaataagaggatcatgttagccaatggaaaaaatcataaatgtatatttaattatgtaaattaattaggaaaaattgcagagaacaaaatgaaaatatgcctaattaaaaacaaaagttgtgagaaaaagcaagggttattctgttccaatttatccattgatctggtcaaattttttacaaaatcagaacatcaaattcaaaaaatcgcattttgaggtcaaaaaatatgcaaaattgcttcaaatgattaacttacaattttttcgttcaaaaataataaattatttttatctttcgtctctcatctctagcgttataaattaatatgatttttaatatatttttctttgcgcatatgctattaaaaagcggctcagaaatagcatttctacgttaaaatttttttggttgttttggtgtttattctcctgatgagataacacaaaaaattattaaaacaacaaagattcatttttagagaaagggaaaacattaaaatagtgtatgccagagatattttctgcttttccaaaaaatccaaccaaaaaggggaccaaaactaatttgtaagacaacattagtaccaaaaatatacatattctaaatttagtgtaaataaaggcacaactttttttctagttattttgttcaaattataattttaaattaaaaaaattaagaccaaacttataaaattaatttaaaaaattaaaataaaatgattaatttcagtgcaaaactttaataaattaaatttattaatataatccctataagcttcaaataaagctaatgtaaaacttctcgcaattacactgatgcccctgttttttttctaaaccatagcctcaaatttaggagtgtaaaatgacaaaatttattcaaaaattataaaaattaggcaaagtcaatattaagataaataattttaaaatccaaattcttgtcaagaaaataaataaataaattttggagatggatttttgagaaaattttcatttcttagggatgtatttttgaaaactttcgggtcgattcttaggggtgtattttttttttaattttcgggtcgattcataggggtgtatttttcgttgttgcatttttgggcaatggccaaaatagatcgaaataggttttttcaaaatttttaaaatctttttaagctctaaaaaataaaaacctaaaatagcctctagaactcgaaaagtagcttaacaccctcctccaaaaaaaacatatttttcgtgtttcaggccacggagagctcaggaaaaaataagttgattgaaaaacattatttgtttacatttgcattgatttgaatcaacttttttgccggggccaaagcgatgaaaaaatgggtaaaacggggaggaaaagaggaggagcacacgaaacattacattcattcttctggcacaaatttagaacatttgtgtattggttgtttttattgagcattggacacaccgtcccaaaaaatgagagatcaaccaataatgagagagtgcagagaaaaaaatagaatttcttcaaatttaacatattctgcattttctataatgaattcatttttgtctatggtcgaatacaaaagttttaagaaaaacaaaatttcgaacgttcatatctttttgttctgattcttcaaattgcttagcattcgttttgggaaagcttctcctaatcaagaagagctttagaataataccagtatcgtccaatttgcattaaataattgctagggctgtgaattttagtgacaaaaaatcccgaaatagttaactaaaatagtgagtaaaaatgttaaaatagtgacaaaatagtggcaaaaagtccgaaatagtgacgaatagtgacataattttcagccaaaaattgagcaaaaataatttttattcactgattgcagttgcaaatgagtaggactgggatttttaagaccaaaaaacccaaaatagttacctaaaaaaattttttaaattaaaaatttttgccaagaaagtaaatttttgagaaaattttttttcatttcataggagtatattttgaaaaattttagctcgattcttaggggtgtattttttgggtttattgcatttttgttaaggaattttccaaaaaatgtcgaaatagtgaaaaaatagtgacaaaacgccaaaatagtgatttttanatattttagtgacgaagtagccaaaatagtgatttctagtgaccgatagtgacatcagaatcgaaaatttttaatgcagaaatgcgttttttgagctcctttcttca

SEQ ID NO: 3157 - DNA, 2058 bp, Heterodera glycines
cgaagacaacaaagtgctcggcattcgatggaaaccaaaacacaatcggctcatcttcaaattgccaatcttcgaaggaaaaatcacaaaacggacaattctgtcgcaaattgccaaagtctatgacccgctcggactcatgtcacccgtactactgccagccaagctcattcttcaagaagtgcaaaacttaaacccaaaatgggacgacgaattgccagcaaacatcaacaaggactggctcaaattgatggcacagtggctcgacagaggcgaagcaatcacaatcgaatttccacggcacatccaagccatcgattcagtggaattccactgcttctgcgacgccagcaaatacggcatgggaattgccgtgtaccaaaaggccaaaacaataatcagaaaggatgaatgcaacctcatctacgcaaaaagccttgtcaaaccaatcaaagtggcagcgcacgacggtacaatcccaaagttggaactttaagcactgactctcggagtaaaagcagtcaaattcatccaagctcaaatcaaattcgccgatcatcaagtcatcatgtggacagacagtcaatgctcagtcgaacgacttcgagaaaacaagcgccaagatcgatttgtggcaaatcgattacaaaaaatccgagaagcgaattttcaagtccgacacgtcagaaccgactcaaacccggcggatatggcatccagaggcgcagatccccaatgccttcgaacatcactgctttggcgctttggcccgatttggctttcaaaagcagacaaatggccagaatccaacgtcatctaccgaccccgagatgaattcaaagaagtggaaaagccaccaatcgttgatattccagagcaaccaattcaagcagtgcacagcttcatcgcatcagtcatggacgactcagtttctcttgccggcagcaacgacgaaagccaacaaccacgcccaaagaagttcaaaattccgaaacgacgttcggcactgttacgacccatcggccagcagcaaagtccattgcaaggacaacacaaacgccgcaagcaactacaagactcaggcttacgcaagttatttcaagccatctcggaccaacaaggaagcagcaaggccaccacaaaggccatcgaggaaagccgagaaatgcagaaggcaccacgtcatgaacagatcgagcatgaacaacgaatggtgaagaaaagtcaacaagaagcaaatcgacatcttcaaccagaaaagcggcagcaaaaaattcaagaagtgccacattcaacaacagaagagcaacaacgagaaaccaaacgccaacaaatcgaaagacaacaaaacgacgaacaacatgccatcaatcaacaaacacgcagtaaggcttgacaagaattggcacgacaatttgactacgatctgatggatcagccggatccaacagagaaacaaccggaagaaacggatcaaccaacaaaatcaaagcagcaatcaacaaaggacaaagaggacaaagagctggaacgacatcgcatcggcagaaaaaagacaatcgacatgcaagaaaaacggcaacggtcaagagacgaatggccagaggaaaacgaaacgctgctcagctacgttcaacgcatttacggaccggagaattggacgtcagcatggcaaagaggacgtgttctccgagagctccatgaactggaagatcaagggcgattgatgattcatcacaaatccgatcgcctacaactcagcgtctcgcgaatgtttggaggaaaacgaccatttgccgagttccgcttcgtggaaggcagatactactcacacatggtgccagaagatgtgatcttcctccaagcagtaccaaccgaagaacagccggagatcataacaatcgacgacacaacggcaccggcaacaaatacggaacaaacgaagcacccaacaaaaccgcaacgaccacaatcgccaaaactcgaagaataccgcatggccgactccaaaccgaacacgagcagccaattcaacctgtttgagccatgcgacaacac

SEQ ID NO: 3158 - DNA, 7812 bp, Heterodera glycines
ctcacacatggtgccagaagatgtgatcttcctccaagcagtaccaaacgaagaacagccggagatcataacaatcgacgacacaacggcaccggcaacaaatacggaacaaaagaagcacccaacaaaaccacaacaaccacaaccgccaaaactcgaagaataccgcatggccgactccaaaccgaacacgcacagccaattcaacctgttcgagccatgcgacaacacgcacacaacttgcgccaaaacagcgacttacggttccaccgcgggcaaccgatttcaaatggaagaattccaaaacttccgtgccaacaatttcttcgaggcactgctcttcaactggctaacacgcaacatgaacttaccagccgaagagatctgggcggcacacgaaggctacatccagtcagacacaacagtggaagaagtggcgcaaatgttctaccaacaacaagttgcagataacggacgacaaatcgcacgagaccagcatttgaccgaggtcatcaatgtctggcgtaactcctgcgaccgatttggcgaactttacaatcaaccggcacacaagcaagtgaagtttcggccaatcacgacggaaaacgaacaacaaagcgactatggagaatggatcgaacggctcaacaatcgcacggcggaaatcttctccaaagcccggactaaggcacaatatccaacgtacctgaactacaactgcacaacaattctgatcggagacaacgttgcagaagtattcaaaccgctcttctacgacgccaaatggttcacacatttccccggcggacgaattccgactcatccccggaccgaaggtcaaacacttgatcttcgcgtaccaagcgacagccgaaaacatggcagcgcagatcgcaccaatgctccatcgattcatgcgatcagagatcgaaacaactttgatcctagccaaggacgacagcgctcaatggatcagcaacaaaaaatatctgatcgacgtcacccgtgaactaaaagccggcttcttcgttttcaaccgggaaattggagaagcacgacgaatcgccaacagaatcaaacaaacgatgccggagccaatggagttagacaagagcccgggacgtcaacgtcaacaagttcagcccggcccggaacgtcaacaagtcaacaagtgatcagctcgttaatgctgatcagcctcctttgccttctattcaccagttcggcacaaggacaaccaattcgacaaaagaaatttgcggaagtcaaaacatggcacggcggctacatttccaacttcctcaacctattcacggaacgtgacaagaggacggcaacaaaacacagtccatacgtccagcgatacattgacaaagtcctcgcacttaatcggagtctgagccaaacaacgactcctccagcaccaacaaatccgccgcaaacgactccaccggcaccaacaaatccaccgtggacaacgactacaaatccaacaacggcgaccataaccaaaacacgctcaacaatttggtcaaccaaaacaaccacacggcccaatgcctggacaaccacgacgacaccaatgtcacggatcatggactaccgaacaactacagtgtacagatcacgtccacaacaacagccacgcccaggaatcaagttgatccgctggcccaaaagcccaatcaccaccgaagaaggacgcgatgttttttggtgttccaaccacggcagcacactctgggaactgaagggcccggaaaactcaccattctgccgaccaccacccgcactcaccgcgcaatggacaccactgacaatcacgctgtacaccaagatccatcgaccggaaccaatcgcaacggcatggcactgcttcatcaaaacgacgacggaaaattattacacaaacatcgtcggcgataagttcgtcgaaatcaacaaagaatttccgttggtctccaaacgactctgccaacgaatggcacatcaacaagaatgcccactcgccaaaacggaaatgcaccacgtcggcaaccacatttgggcaacaaacgaccaacttcaagtggatttccctggaccaatcactggactcttcaaagggaagcaaaccagctcagtaacaaattgttttgcgcaaccagcaacactgttcgtcaaatggcacagtctccaactactgtcgccaatccatcgcgcagaccactgcaattacgcttccgagtattgccagctgcaagacaatagttcactcatctggacttcagcatgtccaaacgacaattgtttcatgtgcgatttccaagaagccgaagaaatccacggagaattcaccaagctcaacggtcaaacaacagcattttggatctcggatgatcgacaaaaggcactgaccttcaccgagacacatgccgtgcaagcatgcgacgggagacaaatcgtcttatcagagcagaacttcggcattccaaaagagcaattcgacatcatcatgagtgaccacacaagagcgaaacgcaacgtacaacccgaacaactcgcttcacagctttccgctgctcaacttgccacaacaatggcactctcacagctttacttaaaggaatgccagcgcaacgtgagcgtcagcaacccaacgcttcaggcacgaaaactcctcaagcgcgaaaatctgcaagcccgatggatcagcgaaacaacaatcgaagtgtttccctgcgttccaatctccctatccaacatcagctaccgaaaaacaaaggactgctacaagttcatccctgtcacaatccatctgccaaacacaacacaagacgcattcctcgacccggagatgcgcatcctctcactcatctcaaggagcgcaagttgctctcaatttcgctaccatcatctgcaagtgcaacaaaaacccaacttgtgggtgcgaatcgactcaaaaaatggaaacgtccaacgattggcacaaactgccatccatgagctctacgagacaatcctcaacaaaacggacaacgacttggatctccacccactgatcttccatcagtggcaactcgacaacgacaccgacttcgctacctttccacacatcgacgaattcgaggattcggaagagttcaaaaataagctggaacaacacacgacccaacgagccgaagcactcggagctttacccggcggaatcgaaggatggaccgtcagatggctccaagaacggctacaggaaataatccaatggtggatacgtctcgcctcggcatattccacattcctactttgccgtgacgtcatcctaccttgcctaatcgcttacttcctgaaccccattcgcatcacactcatgaccctgattggatttcgaccaaagaaacaaccaacgcctcaaatccaagcacaacacgaggacatgccattgaaggaaatgccaagcacaccaatccggcgtaaacgacgtcaattgcccgagcaatcgactccaccaatacgactggacacgacgacagcaacggcctcattccgaacaagagcaagagcacacagcgcaacggaagacacgcccttcggacgcttgcgaccgatgaaattggcggacgactgaagggaccaaaagaaccaagaagagagaagaaggaaggaagaacggacgaacctttccttgccgcctcgggagtgtcgcgattgcccttcgcgataatcaaataatttgattttgcaattgtgcacaaattgtgcaaaattgaattggccccaaaaactatttatctggttagagatcaataccaatgaaagtatttaaggatttaagaaatttgagttgataaagcaaaattgtgattttcggagtagatattttcgatggcgcatttaaaaaaatgaaaataggtaaagagacagagaaaaagtcagtaattagcgcgaaattaatagtataagaaaacactaagaaaaaatggtcgcatttcgaacggagttcttgacgatcagtgacccgctggagcggcatggatgcttggatgacgacaacgacgacgaagatgaagaggaggagcaggatgacgacaatgcatttgaagtgatcggcggtggcattgacataacgtgggagccgatgaccatcgccagtgcctcaatgagacactttcgactcaatcacctcaagcgggattcgctattgtgcctgagtgcggctacgacactacaaacacccagagccttatagcgctcaaattcatggattggtacgccaaaaagaacggggtgagcatccagacggcacactcgccaggcggagagaaaaaaattggccagtacactgtggacggatacatcgcggcgaccgacaccgtgattgaggtcaacggctgccattggcacgcgcacgacaatccacgtcaccgttttcagccccaaacaatgatggcgaatgggaaaacagcgcagcggatacgggaggacgatgcgcgacggatggccttcatcacatctcaggcgcaacaagtgctcgtattttgggagtgtgaaatcaacgcggagaagcgcgacaacgacgaaatgaagcgcgcctttgcccagtacaaggacagcggccctatccgtttgaaggactgctaccatggaggacgtgtgggtccacaacgactacactacgaggtgccggaggggtggcggatgaaatattacgacgttcgttcgctctacccccacacgaatgctgtgacagcataccccgtgggtcacccaacacgagtgaacatcattggtgaggcagagcaggcggttgactggcgacgcgccgaccagttgccggtccgaggcattctcaaagtgttcgttgtgccgccccatcacgttgatgtgcctgttctgccagtgaaatttaatcagcggcttcttttcccactgtgtcgcatgtgtgctttgcaacatccgcatggagccgtcaatgaagactacgagtgcacacatcgcgaggatgatgagcgggggtgggtgtccactgtgacgtcaatcgagttggaagaggcgcttcgcaacggttaccggtgtacggcctactatcgctccgtggaatgggacgatacgcggtggagcgaccgcgtttttcgaggctacgttgcagaattcatggccatgaaaacgcatgccagcggcttcccggacgaaattggcacaaccgaggaagatcagcagcaattcatagaggaatgtgaggaaaaattcggaatccgaatcgagcgggaaaagatggtgcacaacaaggccaagcggaccatcgcaaaactgtgcaacaactccctgtgggggcgcttctctttgcgcaatgggttgtccaaaacgattgtgaccgactcgcccgcggaactgcgcgctctgcttgacaacccagcggtggaggtcagctccgttgacccgctcaccgacgaatgcgtactggtcacctatgcggccggaaacgaatgggtggaggaacacgaatgctcaaacattgtgctctctctttggacaacatcggtggcacgcctccacttgttgcggctaatgcagaaggttgcgtgcgcaccaaactcggtgctcatctacaccgatacggacagtgtgtgtttcgcccatcgtgaggcggacgggtgccctctggagacgggacctcacctaggcgacctttcggatgaatggccggaccacgagctcgtggaatttgtttccggtggatgcaaacagtacgctctgcggatgcggcaccgtcatagcggggaggagaaaacggtgctcaaagtacggggcataacactgagcgccgatgcctgtcagcttctccactttgccacatcaagaggagtgtcctacgctacgcaatgtgtcattcaaatgaggatgatgatgatgatgatgatgatgatgatgacgaagacatttgttcaattttgattgagtaccccaatttcctaaggcccaacattaaggacgggacggttatttatgttaagctgtcaaaacgctatcgccctattgtaactaagggggttgtgggaatgaatgcaattgtacatgattttggttttataaagacgtaatttatacggactgcactttttaaaaatgcataattaacaaatggaagattaaaatttaaaataatgaagcgtgagaagttgcaaattttaggtagaaaaatgcatagtttagtaagagaagtagcagttttggaaatattaaaaaaaattaatcatcatctgagttacagagttgctgtttttaggtagaaaaatgcacaattagtcatgtttaactgcttgagatagaatatttttgatttgctctttttcaatccatatgattcctttcacaaaaccgcaagacggaggaggtggtgttgccgcaacactgttttgtgtgggcatcgagccaaaccagagaccatggtcgtcatcatcagcaccattggaagaaggtgctggcaaatttcgcagcaatgatgacgaggatgatgacgatgacgttgagccgtcacgcttttgagacaacaaattcgcgtacacaggcggaaagccgttatcgacgacttttaccagttcaagcgggtaatatttgtgcaagggtccatcatccttttgaccaaaacatttctcaattacacatggataatgcgggtactttagcataatatggtgtcgtgagtaataatgggccgcaacgcaaacattgtaggggcgcctcaggttatcataagcaagcacagagtcggcgccctcttcagtgagcccagcacagaagagcgtgtgggtgaagccattacggtcggagtatgtagtgatgagcttactgtgtgcaaattccttcaacaatttttctcgatccgcaacactacagcaaattcgcgcgcccacttcgtcagggggacagccaaaaatgcgcgagaatgagataagcaaatgcattgcgcgcaagtgagattttgtgcacattcaagcgcttttatatgtgcgtaggagcaccgtaacttcatctttcacgtagcgcgcagcactgtacattttcgctatataaaagcacgcaaatatgacgcaaaacttcattttaatcacaagaactcgctctgctgtgatgtggacggcttagcaccagccggtgaagacgaagcagcagcagcagcagaagtagtggcaccgccaccagtgcatccgcccttgctcacccgccacccattttcggtgtgctcggccaaggcgactttttgtaaaagcggccccagcctcgacattccgttctccaagtggattttatgcaagctggcgaagccatccttcacaatgtagcgaacaggggctaaagagatgcactaattagtcactctcaaagacatcacgatgtattttatttcactttaaagcagactgcaaacttacggtttcgcccaacataaatcgtccttcctgaagcatccgccccatttttctgccaataacccagcaaccactccttgctgtattttccgtagccgtcaaaccgcgcctaggatgataaaaaatagaacgttaaaatttaacttaaactaatttaattgcaaaaaactatactgaagcagcgacggtgcgtttcaacgatggtgttagcacagttcacctccagatccgtccatctgtaggtctcatctgtgggtgccattgccatccgctggatggctttgttcctccgggcgaattcgataaattcgtcgcggaggacctgtaaatgtacactgtaggtgtatttaagggtatcagctatataatacacttatagtgccttattatctcaattttcaacgct

SEQ ID NO: 3159 - DNA, 997 bp, Heterodera glycines
agctggggagctggtggccgacttccaggcatgcgaaacaagcatgtcgcttaagctcgttggcatccaccccttcaaactttgcatggcccagaaacggcacggcccaaccaacttgaaaaataaatgctgaacgcatataatcgtcaccacttactccactctctcatgacccaacattccgtgggaatgtgaccaatacccttgaggccagacaagaaacacggttctaaaggattataaaagtatttgattaatcacctacaaacatatacacaccccgccgtcttcacgctggttcagataaagtgagcattcgtgtggccaatggtttccaaccttgcagagtccgcaccactttccatccgaccaccatgcatccgccccccgtattccctttccccagttcattggtcgtcgctgctgctgctgctggtggtggtgctgctgctgcttgacatcggtggcatccgccccttttttctccgccgctcggatggcatcagtcccctgcattgtgtgtttaggtttaacacgattacattttaaaaagccatcaaaaaatgctgctcgaaacctgatgtttttgctgttgctgctggtggtggtgctgctgctgcttgacatcggtggcatccgccccttttttctccgccgcttggatggcatcagtcccctgcatttgtgtgtttaggtttaacacgattacattttaaaaagccatcaaaaaatgctgctcgaaacctgatgtttttgctgctgctgctggtggtggtgctgctgctgcttgacatctgtggcatccgcccctttctgcggctgtgcagccttcccacgacacattttttaacagtgcccgttgggttcaaaaggtagatggagtttcgacgactttccacagatacagaggttttaggcaaagaggttttaaacaaaggagaatacatttttatttaactaaaatgtaaaaaaattacgaaataaaatataaaaagaa

SEQ ID NO: 3160 - DNA, 1379 bp, Heterodera glycines
ccccccgtctccattaatcccaccgtctccaagtagccccccccttttctgaggcgtttgaaaaataatcccgccgtctccatttatccccccgtggggataaatggaatttttatttattacaccattttttttaaacacaatagtaaaaaatgctaacaaatgagcaattcatcgtcatctcccactccatccagctctacatcataatcagataggatccggcttcctcctgatcattttgttcatctttcattgttcatttcttctaaactcgcgcaaaaatttgattcctatttgtccaaatatgttaaaaataaagtgcatacaccatattatatgatcaattaaaattatttttagctgaattatcccatattaataatttttcttgattttgtattttttaaacataccgtattttctctttttatccccccgtctccattaatcccaccgtctccaattagcccccccccttttctgaggcgtttgaaaaataatcccgccgtccccatttatccactattgaagatgtcctttatccgcttgtttatccttttcatcagcgcttttaaatttttattcataatatatagtaaatatatattatttattttaaaactagaaaacaaaacatacgaaatttcttagaaattagatatgacaatgttttcaaaataaacaatattctttattttttgccattgcatttgccttatttttaaatgagcacaacctttttcatttatattctgattttatccctgaataaatatattaagaaggcataaaatagttttaaattaataaataatggtttatgaatttctttagaatttcaaattttccaaaataatgtcgcttttttaaccccattcatatcaatgaattttcgttataaagcatcattaaccgaataagtgtcaatatatttttttagtcatactttttatttttacatattttgaaattggtataatttttttgaaaattattcacaattagaatagtagcactaatattcaaggttaattttaattattacccttattatcataaatttaaccaaatttcgtttttaattgaaaaaatctttttcctctagctgaggatcattcactgctgattttcgaatttccaggaaaataaagtaacaggctcattccgcaaaaattaaaaacgggtttcttaagaaaccataactttcttgaaagttaacaaaaaatttttgaaaatttgcacgctaatagagagaacatataggtctagctatcgcgatagccaaatttttttgaagtaattttaaaaaaataaaaaaacgggctctacttggagtgtttttttgtcatattttctaaatatttttctattctatg

SEQ ID NO: 3161 - DNA, 2147 bp, Heterodera glycines
tttttgattaaatatagaggggtgctcgagacacaaaatttagcgattaactcaaaacgagacggagaaactcaaaaaaagaaaaaaaaacccgaaaaagtaaagtcccaaaaattttaaaatgaatacgaatttaaatttgaaaagatatttttattttgttcattttaatttatttttaattaaaaataatttcattttatctattagaattaattatgggactgaaaggacccggtccaaggccagtcacttcggcacggcacttttttaaactttttttttaaatccacaaaaaaagtaaaagtaaattaaaaaaaaattttttttaatgaatttttttataatgaaatagtatatgttcaatatttaaatttgtcatttttaagtttttttgttttttattttatgaagaatttattttttgggtaaatagagttttttaaaaaactttttttcttttattttttttttgttttttgctatttttaggaagggtttttaaacttttttttttagttttacaacgggtttttaaactttacctattctcggtgcctttgatcaacaaggcgggattctttgttgtctttgtgcactcgcccaacgatgaatagcccgcatcgtataggctacagtaggaaattgacagatcacggatgcctttccaaacttcaccgtaactccaatcaaacaacggacaaaccttggcaaaaatttgaaaacttttaaaccttgcattaatgtttaattttatttgcagaataataaagatgactgagatcaaagttattcaaattaaacagttttggtattgagcgatagaacgtaaaataagacaattttgtttcttaataaattagaatttggattaaatttcaaaaaaattttctaaaaaaacattgcaaaaaaagaggctatgaattttttgaaaatgaagaaatttttttgaaatttaccatgttagtaaagtaaatattatatcatttgtcaatttgtggccttattgtacgccctaaaaccaaaaattaaaatttttttttatcaatttcttaaaattttttttattaaaactgcaaaatatttcaaattttgacaccaaataagcacaaaattgtttcatcttttggcaaaaaattattaaaatatattattgtaaccagcagagctgcaataatctgcggttttcaaattaatttttttttggtttttttgtattgaaattcatttgtttttagtttgcaaaaaaaaggtatcaaaaatcattttaaattttttttaagttagaattttttttatggcattttgtgcttatttacggctttctaagaattttttgttcaaaaaaaacatgataaattattattaattttatatattttgataaatatttgggagtttttgtacatatttaataatgtatttatggattttttttttacattattgtatcatttttattatatcaaaaaattcaatttttttttaatttcaccctaagaaatttgggccaccctccgtcggtccattggatgttgcttttcatgtatttgccaatcggatctgttgaccgggtgcccatcattgtggcaacaatgtgcgactgcttctccttgtacagtgccaggccgtgcttcatctgaccggacaattccaccaaatccaaattgtacctttaattttcatatttttattaatcttatgggtaaaaataatcaaaaaaaaaagtttcattatgaaacaaatttaaattgaaccctaaattttcaattgttttttttatttgatattatcaatttgaatgcaaaaaaaaccccaaaaaattagaaaaataaaatagggcaaaaaaaatccagttatttatttattttttaatttttttttattgaaatagacattaattaagtcgaaatctatttttcacctcaaaaaaaatgaaaacttgcggttgtaaaataatttaattacaaatatggtaaagaatttaagaatagttacttgagctcgacctggacctggatacaggcttggattgtcttccaaatccagactttttttcaaaattttaatcgctacagattatcttttttaagaaaaaagattgaatgagggggggggggggaatttcggaacttcggttttagtca

SEQ ID NO: 3162 - DNA, 2194 bp, Heterodera glycines
  unsure (1)..(2194): unsure at all n locations
tttaattattataaaaaaattgaaagtttantaatttatatgaaataattcatgcgactcttcttaaaaagcagaatgtttccatttttttttgtttgttttgttttgtttttgctttgaaataatttttattttgaattattattaaaaataaatattttttatatcttaattttacccatattcgtccaaaatgccattaattgcactaattgcttctttaatttttgctgctaattgcccggattgcgatgaatttaggtaattatccaagttgtcagcatcctcctccaatttgtttttggtgattttcattgtttgaccttaacaaaaatttgatgaaaaattattaagaaaatatattttttagtgaattttagacaataattataatgttaatttaatttttatttttatatagataatcgtaaattttaaatttcgtttttgatgagattagttagaatatcggagcactaagacaaaaaaaatttaataaactatttgaattttttgtggggaaaaaataaaattccgacgagattggtaaagcatattcatttttttgttcactttaaaattttgtagaacagtttcatgaggaattaggatcctaaattctgtaactttttatctttttaaaaagagtgcaggtgcacggaatgaaagaaattttgctcggatacaatcggataaaaccaatcgataaatccttttttttcatttaaaaatccgtttttaatcattggctttgtgtctgtcgtctctcccatttctcaatggagagaaaatgaatgtgtcggtcgccgatttgcatatgatttattttctgctgtccaatttatatcggagattaaagattggattaaaatggattccaatccaagccagggttgcacgaaattttcttgtcgttttcgtttcgtcataaattttcggcacattttgagtttcgttttcgtgtttcgttttcgtccgtcaaaaaatttttgtttcgttttcgtttttgagtttaaaattttcgtttcgttttcattttcggttttcaaaattttatttttcgtttcgtgtttcgttttcgtatacgaaatttttttttacaagttttcgtgcagccctgatccaggcccatagcaaatggaaggaaatgaaaatttaaaacttaaaaaaaaagaattttttttggaatttggaattccgatacccttccgttaccctcgcatttatccattgctcccgatataattttcgattttttcatgtaacttatttgttagtccagcatccagaatttctagtaggatttcacgcttttgacgtctctggtcccggatttatattaggatttcactattttcaccccctggaacccggatttttctgtcagaatttcccgattttctggtcccggatttctatcggaatttgtcagttttttcgtcccggattccgtatttgctacgtggattttcccattttcccgtttttggcgatttcccaatccagaaccagaattcatgttccgcattttcaaaaatgcgagttcccgacctaccctgcttttttttatttttgcaatttttttcgagaagattcgtccctcaacaattaatttatttaaaatcagacaaaaaccaattttgggacaacagaaattttaaaaattttttttgttcttctgatgtttttttcctattgtaaaggagagaggcctgggacctgggtttaccccgaaaatttaattaaaaaaaaaattcatgagaattttctaaatattagcccatcgaaaattcttctaataatgaaaattgattacagaaacaacgttacttacagtcctcctttttctcgcaaacatcaacatccataccattggctagaaaacaaaaaaaaaaaacaattttttttttacaaattttttaaaaatttttccaggctaacctcggtccaattggattaagccaagggccattgcaaaaaacaaacagaagacacttgtgaagcgcatttttattattatgaagaatttttttttcgaaataaaatatttagatttaataaaaatttatttaaattggtaataaaatcatagaattgaatgagaaaattaatttgatgctctttaatagagcttttttaaattaattnaattttttttttgccgctttttttttgtttgccaacgcgcaaaata

SEQ ID NO: 3163 - DNA, 1382 bp, Heterodera glycines
ctcttcacgaagctgaaatgtattagaatgcaattatgacaaaaataaaaaataataccgataaaaaaattaatccaaatgttgaaaaaatttcgacaaattcatttggaatatttttaaccaccgttcctattgacaaaataaatttcaaaaaataattaattgttaatttcatttttggaatttttcaggtctggtttttttttatcaagctcaaaaaattttaaaagttttgctgaatcgtaattcttttagcctccgttcatattaacaaaataaaattcaaaaagtttataaaaatatattttcggaatttttttagacctaaaattctataaaatttcactaaattaatttttggcatgttttaaattattttaagtcgagaaaattgctataaagcccaactgttcaacaccaacagatgggtaattaattactttactattgggaaataaaaaacggatttcattaatttattcccgcacttggccatcggtttttgtgccattggtctccgccgttttgtaggcccatccccgccggccaagttgacatattgtccggaagttggcggtgccggatccggcggcgcatattcatgatactgttggcacaatgtctcctcactttcactccccaaattcttgctgaagaaataaattgttaattttgttttaattcaattacaattaaattaaaattaatacattgattgacccaacaaaaatttcgagattttctttaaaaaacgagggtagaattttctgcactccccctcccccccccctactagaagaaaaatgaaaacttttagggaaaaacgagtattttttgttaaattttaaaataattgacactaaaatggcaccaaaattggcatttttggcgacaaatctactaaaatgctatttttttttcacctgtggcaccaacccgaagccaagggaccctgggcaaaatttttaaataataatttgcgttcatcagcggattataggtgatttaaaagtgaatttttataatcccttttagccagcaaatcttggtgtttatgtttttcttctgatcggaaattttcggacggatcaaatcaaattaaaataattaattacggatcattgacgacagcagatgatgatgcagcaaacacaatgcttttgcgaaaagatgcattctgcaataaataaaacaataaattcattttataataaatttttaatttttttttgagttcccatatgttcttatttctaagaattgtgtccttattttgaagaggcccaaattttagaaaaaactgtaaaaacaattttttaaggatttcaagaaaattttaatttatccactggggcgcgactatccaaatggtttcgaattta

SEQ ID NO: 3164 - DNA, 2439 bp, Heterodera glycines
  unsure (1)..(2439): unsure at all n locations
tttttattattaaaaattttatttttttttaattttatttttctatttccattttgctttattaccccatttcgtctcttcacattttgcgttgtcaatgtgnagtcggaattgattgaattgtccgcggtggaattggatgaagaaatggtggaagatgaagagaagccactgcaaaaatttttttttcgattttaaggataaacggggttttccaggactggaggtaggctaaaaattggaaaaataaggatttcaagggtgattaatagggccgcaacttttagtgacgaaaaatctcgaaataatttactaaaatagtgagtaaaaatgccaaaatagtgacaaaaagtccgaaatagtgacaaatagtgacataattttcaaccaaaaattgagcaaaaataatttttattcattgattgcagttgcaaatgagtaggactgggatttttaagaccaaaaaacccaaaatatttacctaaaaaaagtttttaaaattaaaaatttttgccaagaaagtaaatttttgagaaaatttttttcatttcatacataggagtatattttgaaaaattttagctcgattcttaggggtgtatttttgaaaattttttagctcgattcttaggggtgtattttttggttttattgcatttttgttaaggaattttccaaaaaatgtcgaaaaagtgaacaaatagtgaaaaaagccaaaaaagtgaattttcactattttaagttacaaaacgccaaaatagtgatttctagtgacaaaaaatgacgtgcaaatgaaaaaattttaacgcagaaatgcgttttttgagctcctttcttcaaaacaattgagcaaaaaaaaaaaaagttttttcactagaaatcggcgccctactaattatgcgttggttttgatgatgatgatgatgatgctgtgctcaaatcggttgcaagcagagaatattctccagcagatgaaaattgtgatgaatttgctgcggaagaataatggcaacagcacgacattgctgcacatgaacagcttggacatgttgcctttggcttaattagtttaatgaaattaaaaataattgtgtgattaattaacataattaaattgtcaaacattcgaaaattggcggctattaaattaaaaaacgaattaaaattgcaaattagtgtataattattaaaaataatccacacatttgaaaagcgatgccagtaattaattaagaaatgaattaattgccacatatttgaaaattggcggtcaaaattaaataaaaaattaattacaataatttcacattcatttaaaattggtggctttatttatttaaacatttaataaataataatatataattaaacaattatttaattgcaatattagaaaattaatggacataattaattaataatcactgaattaattaattgcagtacatttgaaaattgatggccatctgcgccgccgcaactctcatagtcggttgacgatgaagaacttgttttttgcaatgatggagctaaaaacaaaaataagaatgtacaaagtttttaaaaaattgcatataaatttttttgacatttaaaatgaaattatttttatatttaaaaatataaatattttcattaaaatatattaaaaatagaaattccgaccagcagatgcatcataagtttcatgcggcaaaagattgttggggctcatcggcgaaaaggcagcaaaatttatctgaaaatttatttgaggaatttttaaaattcatggaactaagtacagacgcttgtcatcctctataagtttttttttaaatttcagctcatggagaaaaactaggatctttttagccgttttccgccaaaaaaaaagaaaaaaccaaatttttgccatttttgagtctaatttccaaaactattacaaaatggggggtccggcggtgccgattggcgccgccggtgaaaattttgggaaattttaatggaacttgttgataattgagtaaaattttcaaattcttgtatattatatttattgaattgatcagattcttctgtgattaggcactgatcaaattaattgttgggttcaagaaaatcgctaggtttgaaaaattcaaattggcactacattnttggcgtttgtcgcgcaacgaatcgcgcagaaaagttttctggcgcggaaattgttcagactttcgtcgttttcggcgccaagcacagcatgcaattgtgacaatggttgacaacaaagtgatcagacaaatgcaggcgatcagaaaatcacgtcgccacaacaacggttcacgatatggggtgggtgcctgtgtaattcaatgatacagtacataaattggcaaattacggtgggcatcacaaattaaaaaaaaaattttntttaattattttaaatcaaatgtcgataaaattcgtgtg

SEQ ID NO: 3165 - DNA, 1711 bp, Heterodera glycines
attttgttcaccaatgcttgccgtcctggaactcatccagccacactgattggacgggattgtgacggacgaaatccaaaccgggatgtcgtaggcaatctaaaaaaattaaaaataaataaaataaattttttatgcattttaaaattaaaattttgattaaacaattatctcaaattcatatttatagttttaaggaaagaaatttacatatttacataaggtttatatataaaaattacgaaaaatatttaaaagaaattcaattttttcaaaaaattctcaaataaaaaatttaatgagggatttaatcatttcttaacttaggtttaaattattgggactgtatctaaatcgtcttagttaatttaaacaaaattgatcattaaacaaaattttataaaatattttagttccccttgaaataacaatgaattctgtttctaatttgcacagaaattattttaagttttgtacaataattttttgttaggctatcggcccacgtagtatagtggttagtactccacgttgtggccgtggcgacgcaggttcgattcctgccgtgggcaactctcttttttgaattttttaaaaattccgaaaatttaaatgcatgtttttatcattttttagcttaggtttgaataattgggagcaatatttatttataaccaaggatctttatgtaaattagaaacaattcatcaagctgttgatatttaaaaattattaaaatatccaaaaaattcattttttccaaaaatttcgaaatttaagataggagattttttaacatttaatagtttaggtttgaattatttggaccgttatctaaatcatattagttaatttaaacaaataagcataaacaatttttgtaaaatatatatttattgtttcctttaaacaacaaagaattttaactcaaatttgcgataaaatcttttaggttttgtacaataattttttgttaagctatcggcccacgtagtatagtggttagtactccacgttgtggccgtggcgacgcaggttcgattcctgccgtgggcaactctcttttttgggtttttaaaatttgtgtttggaataagacaattaaaaattataattaattaaatgtctttttatattttttaaattcattttatttttactccaaatgagttatgacgctcaatttgtgtgaccaactgttgtccaaatgtatcaattcggcgtgccttaaaatttaaaaccaaataagttttactaattaaataataaacaaattttttttgaaccagtttaaaaaaataattaattttatcccaattttgccggtcttaattaatttaaataattaatttgttttactaattgaaataagtaacaatttttaaagcatacaaaaatttaaatttatatatgtcataatcatgaaaaaataagattgtgcgcaaaaagcaaaaaaaataaattaggaacttaataattattattttttaataatctataaaaattgctaattgatagttttaattaatttaattaactgaattaaaacaattatttttaatagtcgatcttaattaatttaattgattaccaattgcacacggcgttcgtcctcatttcgcagaattggcataaatgcacccaatgcctggcaaaattgaaccgcgtccaaagatgtgctttaaaatgaagcaattaatataaataaaag

SEQ ID NO: 3166 - DNA, 4724 bp, Heterodera glycines
  unsure (1)..(4724): unsure at all n locations
caaatttcgtccccattttcgcgcatttctttccccccctaggtctcattttatacaatgttcaaattcaccaaatcataaagcaaaaataatccaaacagtaaactaataaaaaaacattaaatttgtacatggcccggatttcgttttcctccgcaaaactttctcatccacgtcaacaatgttaagcattattatccatactcaagtatccgtcgtgccaactgttcttttgctgctgtttttgaagtgttttttgacgctgtaacctaaaaactaaaagtttgattaatttacgtaaacaatttcatttttattttgagttttaattattattattattttttattacatttcccgtgacaataatttatcccctatttccctcctccgctttgcttcacctcagcagtgccgtcagttcgctcatttgtccgtttggttgtgccgtcgtcgtcgccgcttccgccgacccttccgcaaacggcgattggccgtgcgaaattgacttcactcgttggcgaatttcgcgcacaatgtccgtcgcttgcttaccgcgtgtttctatagagaaaaaaaagtctaattaaaccataaatataaaaaaatagaaatgtttttttaaattttttgcaatttaaaatatattaattttattanaaattataaaaataaataaatatttaaattanaataattaccaggcaacaaacaataaacgaacacagcgccaccggcactgacncaaatgaaagggacgaaactgaaggaagtgccgacaatctgcaaaaagcagtgaacacttaagcaattcttactaaataaatcagttaaaattcaaaataaaagaaaagaagaaaaatggcttttcccatgcataattaattaattaattaaatgattaatttttgcactttttaaaggacaaatgaattttaaatgtgcgcaagtgaaaagaaaacaaatgaaatgaaatgaatgaatcaatgggaaaaagaaaggacataatttatttgaatttatttatttatttgtcttcagcggaaagaaagggcaaacaaaaaaaagcgcacttttacatctttcgtccgtccgccgacgcacttttatccgacagaaaagaaatgtgcacttttcttttccagacaaatgagtgggactttttgggcgggtgcctaaaagtgcaaatgcccaaataaaagggctacgcacttttgaaggaaagtgcaaaattggggggggggggacaatgccctcgggggggggggaataaatgcccagggggggggggagatttgttacccatcccaacccaaccaattcactgatgaaaatgcacactctccgctcaacagagagagaaacgagcgaaaagtgcaaatgaactttaattaaaatttcaatcgaatcgaaaaagggcaaatcaatgggagagatttgagaaattgtgtcaattgccagataaaacttaattaatttagattaggtttttaaatagtttttagctgtctttacagagagtaaaaagacgaaatgaaaagataaatttaggtaaaaaaaagttttatttatttcgaaaatttgaaaaaatattcggggagaaagaataaatttatcaaaaaataggaaaattatttacttgttggaatggcaaatagcacgtggagacgacaaaagacaatgaccaagcgaccgtaacagcgacttaattaaattaaaaaataaaatttaaaaaaatatataatattttcaccagtcacagcagcagcgcgaaatttggtggggaaaatttcactggaaattagccacggaatggcacaaccgacgccataggcacacatataaacgatcagagcggcgatggtggcgtaactggcgaagttttgctgaaattgggaagaaaaacaatttgagttggaaataaatttaaaatatttgaaataattatgatttctaaaataaaaatagttaaaagtttaaaatgttattttattcgcctatacgtttggatattatttccttttttctttaattgaattttaatttcataaccatttcggttatatccttaaaaacattgctttacccaaacggcgtgttgaagtgcgacaaaaatgctcaaaaagaacaaagaaaccgaacacattgccaattgacccttaaaaaacatagtaataaataataaaatgaatcataaattgggcacgtacaatcagcaaaatacggcgtccaacttgttcgatcagaatgggcgcactgcacgcgaacagaaaataagcaacgccaacggccaaagtgctgaagcgcgcggttcgtctgaaaaatgccaaataatttaaaaattatttattataataataattaaaatggacttacgggtcgagcccggcgtcgatgaacatatcagtggaataggcgaacacggcggaacagccggtgaactgttgggtgaccatcaccacgatggtgatcagaaggggcaggcggaattggcgttcgaagaaaatttggcggaaagtgcagcaggagccatcctcaaaaaaagaatatttattaatatgataattaatgtcatttaaaaggcacatttgtatatatatactaattaaccatgaattaatttattattttaattattgccatatttatgtcaattaataataaattgcccacttgcatgagtgctgcttcgctttgcagcgattcgtacataaattcagcctcgtcttcgtccaccaatttcttcaagtcctccatggctttagcatgctcactaaaatttcaaaatttttcatttaaaatgataaataaattagcactaattaccctcttgcgaaaagtgtgtatttgggactctccggacagaaaggcaaaaccaaacaaagcaaaaaggcgggaaagccggggaaagcaaaagccaatggccaattgtcggcactgcccaacaccttaatgagtcaattaagtaactttaaataaaataaaattgtttgaatgttttgcccacttccggcagtccgagtaaaagcgaaaaccaatcggagaaggcaaccgcaacctaaagaataaatgaccttcgttaagtgctaatggcaattgcagaaccatgtgaaatgtgccggcagcgccgcgatattttgtcggagtgatttccattagatacatcggcacgaggcctgtctaaacgaaaagccaaacggattaagcgaatttaaattttgtttttttttattcctacagaaaggcccatatttgcgccgagaatgagccttccgaaaatcagaaactcgggggaagccattgacttggacaaatactccagcagagccgcaaaaacattgacaaatccgttgatgatcaatgcgttgcgacggccttgccattcggacaattttctgcaatttaattctttgagttattaacgaacgattaacccaaattgttccattgccttttccaaatcgagaattaaacagatttattaatttcgtttatttattgtttttcttttttattctctatcatattaattctcaattacccaattagtccgggggggggggtcatgttcattcactcactcacttatcaatgaactaattaattgtcttccgacaatttttgtccccattatcagtgatttctttctctcccccctcattcgcttcctttgccccgggcaccacccgtaatataaaaagcatccaagttttgctttcaacgaaatggacgctcttcgaccgaccacttttccaccacccgtccaaacgacccccgaggggtcgaacgacgaccccaggccaaaagtgaggatgaatggccatccgaacaacacaataaagtcacatgaaaaaatttaagaggggtggggggagagaattggcacaactccagcaaaaaaaaaaacaacgttaaatggaaaattgctgaacttttaaaagaaaatgtataaaaaaacgactgacagcaataaattaatgataattaatgaaattagtaattaatttgggggatttgaacatagtctcaaataacacctgacaagcagagcaccgacaatggcaccgatggcaatgctggagaccacaaaggaccagtacaggttcatctccgtcagattcagtcccggccctccgccgttcctccgaatgtaagtcatgttaatccattgggtgagcagttctgttatatggaaaaagcgcttaatttaatggtttttgaaattgaacttctcctaaccctgctcggggttgatgatgccaaagctgtagaattgggtgctggccccaaggcaaacggtggcgacggaaacgaaataagtgggcgtgaacattttaatataaaagtgtcaaaataaagctaaaaatataaattgaaataaaattgttagcatcaaagatcagcagacgatcagccaaaacatttggggagaaaagagaaaagtgagtggcgttacgttatgaaatggaagtggcaaaaccgcgacgggtgtggtgatagcaaagcaaagaatttgcccatttttgttgtctgtctgtccgtttcgctaatcgaccacaaaaaatgcgattaaataaccaatatttgcttttttatttttgtaaattaacacaaataaatgattcatttgtgatcattgggtccgtccgtccgttttgagcacccatcgaattgcactcgtctcaaacacaaaacggtacataagtacaccccccccccccccg

SEQ ID NO: 3167 - DNA, 1985 bp, Heterodera glycines
  unsure (1)..(1985): unsure at all n locations
attannggctgggccaaaatcaccaagaacgaacaaattggttgcattatgctaattggccaaataagccataaatttaaaagatgcttgcttatgtaacacaattcgccggttttcagccagggttagaaagtgccatatttatgtatatgtatgacttttcccagtggcaccacttgactcaaagcttcttaaaaattttcaaacaaaaaatttgtacatatttggaccaaccagtaaaatgagtttaaatcttcaaaaatttcagtcgtcgcctttttatctcaagagttagcctattatttttcatgaattaaaattcgaactcacagattgaatacatcattttaatttaccaattagaaaatgaaaatgagaaaattataaaatagttaatttttggcaaaatttttatctacaaaaaattcgctgaaagccaattcatgtgttggttggcaatgatttataacggagccaaaaagggaaaattcgaaaaaagcgatgagtgatgtttgataaatgatattattattgtataatagtaatattaataaagaaagtttcaatgaattataatgagtgattagcttttatcattgaatgttcccttcgcccaaattaactcattccaattgtcaaattgatacgcttttgtgttaatttgcctgaaatgacctatgaaaacggaaaagtgagcaaagttcgttttgatagttttgtgctttttaattcacaaaaaaggtaataattaattaaaaagataattttttttgcattttaattcttagattgtcatgtgccaaatttaaaactaaatctcattctttattctttcgttttaacataaattccaactcttgtatttttggtaactcggaattcctatattcatttaaaacaattttttgtcttgtttttagtgtcgttgttttttgtattatttttatatattaaattataaaattaacaaaaaaataaaaaataaaataaattttccaattctttatcctctgatttgtgagttctgatataaattgtagcttctgagtccgagtcccaaacttccgaatccaagctcaaagcatgtttttgaaattgtcataagattatctcttaaggagggtatacaatatgttgtaaattttttgcaaaaatccaacgattcattccgttggacgcgcaacggaaaagcggaaattattttctttactatatttatttaacaattttgcatttcttcttttttaatggcccaatttatattttattgtatttgaaataatcaaaataatattagtgagcaaaaaacaaaaaaaaaattcacataaaaattagcataattatgatttaattgtataattaaccatctcatttataattctcaaataattacacaatttaagttattatttttcagtttttcatcggtttattgagtatttttttttatcagcccaataattgatcagtacacgttgagagactgttcgtaaatgctcgcgattgagtcgaagttggtttcccggggcgagattgggtttgatcggaaagagttgagcgcggcatttgccaacgagtccgtgtcacgccgatcgaagcccattttggccaacccattgggacagccaaaatcggacatgaaggcacggagttgatcagccaaagtgttagcgatcaaatcggtgcttgcagtggactaaaagacaaacaaaaacaaaagtgattagatgaaaatgccaaaaaaagtgaaagcattggctagcgaacgtgccgggagtgcagagcccaacagttggcttgcttccaagtgccgttttgggtcggcaacagtggtgaaaagaaaatcggcgggcgcagtgcaaacgacggacagaccatgtgggattagcgcgtgatccttggagtagtcggggtcaaagtacgacttgccctgggaactgatcggataggaaaggccgtggcacagatggacgacctggaaagcg

SEQ ID NO: 3168 - DNA, 1383 bp, Heterodera glycines
atgagctggccatcagcatttgggtgcgcgcctcctcttcttcggggtcgaatattgagcgacggaaatacttctcgatgacgcgcaatgcttcacgaacccacacatcgctgaccgggttggacccttggtagaggggacgagcgtcggggcggagagggcgaggcgatcgctgcacaaaatagccaaaaagtgatcaaaattaaaatgatcagctgaaaaaactaaacaattgaccatgactgtggataaaaagaaagaaattcaggttcaaagttggtttaaaaaaccccgcattgtttttaagatgatcttaaaaaacaattggaaggcggtgcctatttattataaattaaacactaagataatatatgaacgagctggagaagtttttgaatgaaatattggacggtccggctttgaaccggagtctctgtgctttctggatcaatgttctaccagctgaaccaccgactctgtcctctcgagttccccaatttgctcgatcaaatacaataggagcatcacctcaattggtccaattaatcttcctttcgaacaagtttcttctctatctcaatatttttcaattttaccaaagtttgttgatgttccccacatattcagcagcagttctctttggctacggttagggtattgtattacaatggaataactgaccattttgtacggcttcgccgtgtacgattcgagcgcgtggcataaaacgtcgaagccgctgtaaacggccacatttctaaatgataaaaaatggccaattaagcaacaaaatgcttaattaacaccgtggcatactcttcacattcaacgggtcaatgatggccaaaaacggttttatgcagcggaggcgaatgcccgccttgcactgcttctcgggaatgtcgatgatggcagcgcctggcagaataattaatccaaaatgccaataggtcatgcctatggcctccctcccatcactgatcatgaccaccgttttatcattaccgaacgtcttccccacctccctccccatggctcccctccccactttgatcgcatataagcagcccagggatatattttaaattcaattaatccttttaaaataaaatccggaatattttaaatcccccccctcggctcgctttctcccctttctctcaccggtcgtttcactgcctgtgcctgccgtagtcggaatctttaacgataatattgatttttgaatttatttctacataattaacgaacagcaataaggggcagcatcggatgcttcggaatcattcctttgccgagggggttctgcacaaaatccaaaaagtcggactcacaattgaaaaggggacagagcggcgaccttaaaatggcggaagtcgaaag

SEQ ID NO: 3169 - DNA, 1262 bp, Heterodera glycines
taataatttaataaattgaaatatgtaattaataaataaaaaatccattttttatgtttttgtttgccttcgccgtgtcaatcactgatccgccaccgaccgccacaaaacaatcgtaacttttcgctcgggcaaaatcaattgccttttgaatgcctttttaatgggttggcatcagaaaaacagttaaacacgcatgaaatcactttgttgcgatggttcgcatttgacttcatcaaacacagcgaaagacaaacggagacgggcgaacgaagcggcgacttccctaattaatggacaagcttattaattaatcattaatttgccgagagtaactacacgcaactaattaatattggatgataatttggttatataatatataaaattaaaaatatatttttatcataaaaaatatttacttaaatgccctcgttttggtgacatttttgtctgttacaattagtgcatttttggagcccaaattttgcacatcgaagccaatttcgctggtcacgccgttgccacagcgcaaagttgagctcatcatttcaaaagcgtagtcaacgtcttcacattcagctgaaaaaattattaaattaaattaatcattattaaaaattaattattaatatgcattacaaatgtcagtccatcgttttgcattcactaattacaataattacccgggggaaaagcgcagctcgcgaagcttttcctcactgtcaaattggcaattgccaaatttggagcacagaaaccaccgacaccaaatcgcgtaacaaaaggagaaatcatcagtggcacagttttaaatgagccaattgtgagctttgttgagtttgctattgatgccatgaaactttatctgagaatattggcaaaattttaaaaaatttagattcagtcaattttatatttattaattcttcattgagattttcctaataatttgtcaatagcaaatggaagtgtttatattatcagttttcattgttcgttaagagtgataattctatgaacaaatcgattgaggatttatctttataaaaagcatttatgcacacattttttatatttattgctttttaattaattatattaatcataaataaatccaattaaaaggctgacgcaaaaggataaatgtgatctcattagtgaacggtgagaaataatcgtaaagtgacaaaataaaataatgtcacattgccggcggaggggggaaatcatacagggggggggggggggggggggggggg

SEQ ID NO: 3170 - DNA, 1461 bp, Heterodera glycines
  unsure (1)..(1461): unsure at all n locations
ccaantcaatttcttnccgaccatttttactatcnaaattatcctcttttttnttcnccacttaacaattaccaaataaaaaccattnaccaatnttaaaaatgaaaaatatttttttaaatcacaataatttgaaaaaataaattctccgtttcgctgcacaaattgagctaatctttttaaattataaaattaattcatccctttcttttctttctttctttttttgttcatcagcactttcaatttctttttcatttgatttatttgcactttctttctttggcgtcattttctcgtgccgacaataccctctgattaagcatatgattaagcatatggcatggattttctcaatgcgttgcgccaatttaaatgatcttatgccactaatccacaaatcttttatcataatttaattttaccatttaataaattttagaaatatttcacaatttaatattctaaaaatttattcagaagaaaaatgaattttctttgcttttatttttgtgttctttttacttttcttgtttttatggtgttttatgaggtaagaattttttaaattaaatgctagtcacttaaatttccaaaggaaaagaagaagccgaaatggtagacaaagattcattaatcccttactatatattaagcgaggcgaagctccgcccactttttgcctttttgaatttgcgcctaaagtggtgttttgtttatgtgtgtgtgtgtgtgtgtgtcacaaatgttttgaattatttattgacacgattgttttagagattaaaaagagaaggggagtgagaaagagaaaagaagagagagagaaaagagagaaaagagagggacagagagagagagaaaaagtgagggacagagagaaagaaagatagatagagggagagagaataagagagcgagagagagagaaagaaaaagagaaaagaagagagagggagagaaaagagtagagagagaaagagaaaagaagagagagagagagaaaagagagggacagagagagagagaaaaagtgagggacagagagaaagaaagatagatagagggagagagaataagagagcgagagagagagaaagaaaaagagaaaagaagagagagggagagaaaagagtagagagagaaagagaaaaaagagaagagagagggagaaaaaagagagagagatagagagagagagagaaaaagtgaaggagagagagcaagaaagaaagaggaaaagagtggaatagagagagagagagagagaaaaagtgagggagagagagcaagaaagaaagaggaaagagagagagggagagagagacaaagaaaaaaaagagaaaagaagatagagggagagaaaagggtagagagagagagagagaaaaaacagaatagagagagagagagagagaaagagaaaagagagggataaagagagagggagagagagagaga

SEQ ID NO: 3171 - DNA, 5516 bp, Heterodera glycines
ttgttttcgggtgaaagtgccaaaagcgactccatctgctgatcaacaagatgagcagtggcggtgcctccagcggcttttgagtccaattcctcatcagaggtcaaatcctcgtactgaatggccgcggccggtggttcgacagacggtggaggagcaggaggaagggcaggaccaactttgtcctttttcgcttttttgtactttttcggcatttcaaatgattgcttaatttagcttttattactaatagttagagaaaaataattaaataatgatcagagatgctaaataaggccataaaaactgaggaaaattgaatttacggattaaaaaaaattcttataataaaataaaataaagcagtagtaatggtggctatgatgggagcggactgatgggaggagcgatgaaggtggaacatcggacgaatagcaaaatgccttattggccgaggacaaacaagccgaagcgagtgacaatcgtcttactcacctttaaatgtctccaaatagccgctggtgaatgtagcaggacgttataacggcgtcgaaaatttgaataaacaatttgtggaaaatgtcaagagaaaagtggagcgaaaataatattttcaaaaaataacaaatatactgatttattaatacggtaaatattttaagtagtactgtatcacaaatcttttaatgcgatgcaatataaattaattaatttgatattaattagttctatgtatgcagtcagtattttaacaatttcttactgtagcaagttcaaacgcgtactgtgcctgcgaacaagcatttttgggtaattaaattattatatattttcttttgttgactttcattgtgaaatggcgaatgaaggtaaagtaaaaaaaaaaaatagagaaagtataaattttacaagcaaatctttgagtacttttaggccgatatcttaaaatctaaaacgacagttttgtagcaaatctttttctgatcaaaatgatatataattcattatacaaaatttaggctcctatgtgcacattcaaatttaattaggtgagccaatttgcctgtggttttgagagaaaaaaatgaagaattggcgatatgtttaattaaatgtttaaatgaatattttaaatttatttcatgtgaataaattaattgaattttaaataaggagaaaacaaaatatatttttttatgctcaattcttgttaattttaaaaaaaaaatttcaatctctctttctattttttccttttggtctcgactgttgcgcttgcagtaataccacgttttggataggggaagggctgaatatgccagttgaaaaatttgcattgctaaatgtcggagtgaaaaaggtttaagtgttgctgataagagcatgggttatcattctcgccaaatttgccgcaaaatcgctggtgttcgtctattgaccgtttcagttgtactttggattagccgtattttacgcgctaatttctattttggccgtttttgattgatttttcacattgattccctgttcctttttgtcctcctttttgtgcatttggccactgatgcctttccttgactgatcctgctaacaggattaaatttttcgtaccattttcatttttgggtcatatttacattaaaaaaaccttaattttagtatggctaaggagaaaatttccactaaaaaaaggacccttcgtcttacaacccctttggcgaaggagcgcctacagcgattgcgttttgaaccttttcctgaccaatacgacttaattggattatcgaaaaaaatttatgacgcactacgcggtgcattctttactgatttaccccatgtaaaagtcgtcacttttaaattattggacgcttccgcgcccgcgagcaaagaaatttgggctctaagctcctgggacaaaatcccgtaaattatgagtttatatctaattttttttttaataataaaataaatcaggattgtgatcgagattcacccggagcagggtgattgtgaacagcttgttgcgatgctggcacatgaaatgtgccacggagtgacaagcaaagaatcgcgcgaaaatcgtccgtattcggcgaaagaaaaggccgagcggttcgaccaatgggtgggaataaatcttacaaaaacaaaaaaaaaattcataaaattattttaaaggccaaattggtgcaccaaacactcgggatcgatccctggcgcaaatgcgacaaaccgtaaattaaattattaattaaatatgaaatgaatttttaaattctccgtaagtggtttttatgaaagtatgacaaacccaaaaaaaaaaatatttaaaattattctctaaagcgtgatggaagatttaggcgttttcggtctctcaaggcatactccggtctctttttgggcttaattgattcgtctaatgaattatttccatcttcttcttggcaatccgttttttcggccaaattttgcgaatcattttcctgttcaggatttttactaggttgtctgttagtcctgggaaaatgattgtgaccagggaaattgtccaaatttgttgcatgcattttatcaagactctcttcctcgtcgattggtaattttggcaaggtgcaattaggaccaaagttttcgaaacattttttaatttgatttaagtgaactcttttcgggttttgttgtggcgaaatgcagctaacgatagtggcatatatgccatcaatttctatcactctaaaaatgcccttccaaggcagatgaaatttcttagaagttccaactttacctgcataatttcttaataaaactcggtctcctacacaaatttgaggttgtctaactgttcggtcatattgctcttttattttctgctgagctgcttcattggcatcggctgcacttttccatgcttttcttaatgagctgactaatttttgtttgaaatcggtttcctccgcttgttggacttgactgtgaatgcgagcatccaatatttggtctacacagaaaattgggtcccgaccaaaaacaaggaaaaaacggggattcggatgtggatgaatgacaagaagtgttataacaaaaggatgcaaagtctaaaaactcgtcaaaatcagggtcctctttggtaatgtattttgataaaatattatgaaatgtacgaaatgacctttctgttaccgcattaccctgtgaccagtggggaattgcataagttttgtttatgtataacatactacaaaattccttaaaaaattctgaggtaaaagcagtggcattgtcactaatgagctcagtacaacctccaaattttaagtaacaatttgaaagaaaagcttttgcaatagtctttgctttggcatccggaattggaacagatattacatatttcgaaaaccaacaaattatattcaaaatatgtttgtttccacgcgatgtggttggaaatggacctgccaaatctaagccgactttcgcaaaaagggtattgctaggtgcgagttgcatttcagcacgatatgcaggggtgggattatgcctaagttggcatgtaatacattgacgtgtccatgagacgatatcagaatgcattttgggccaaaaatattttttgcatttccgtagtgtcttttttatgttcatgtgacctcctcccaatggagatgtatggaacgattcgaaaattaaggcccttaacgaaattggtacaaaaattcgtgtacttgatgagggtgttttaaaataaagtacctctgattcgtaaactaaatttaaacacagggctgaaaatcggtctttttcattttccgaaaagtctggtggcatattgccatttgttaaaaattcaatgaatgccaatatttctggatcatttttctgttctttactcaaatcaatttgataggaattaccatcctcgtgtctgagggtcatcgtgttgacaaattcatccaataccaaacgagggtgtgctcgtagggaaagacacaccgggaactcaattatgtcctccatttctgaaaggttctcgatttcttggatgggcgaatcttcagctgcacgagaaagtgcatcagctaaagaattctgttttccagcaacgtgtacaatttttatctgataattttgaagctcaattagccatcgagccaaatgagggtgtgtttctgattttttgagtaaaaatgccaaaggcttatggtcagtgtgcaattctatatcactcataaaaataaaagggcgaaattccctaagatcataaataattgcacacatttctatttggactgctggccatcgtctctcaggtgccgatagggtgcgactacagtaagaaattgccgaaaatgttcccaactttttgttttgttgcattaggactcctcctaatcccgttgtagatgcatccgtaaagatatgaaaaggctcgttataatttggaaaaattaaatttggagtttgtcctaataattcttttaatttgtcaaatgaattttgttgtgcttctcaccattcaaacttgactgattgcctcgagagacttaagagtggttctgcaatagtagaaaaattttcgatatgccgacggtaaaacccggctttccctaagaaacgtttaacttcttttacatttctggggattggttcattttgaacaatttcaattctgctcaatgatggtttataacccgcatttgtcagagtaaagcctaggaaattcattgattttgatgcaaaagagcactttttgggaattaatttcaggttgtacaagcgaaagcgttcaaatgtttttcttaatgattgtaaatgatcattaaatgtaccattcttggtaaaaataagaatcatcaacatatgatattgcacagtcttctaatacagataaaacaatagacatagctcttgaaaatgctgcggtggcatttttcagtccaaacggcatgtataacatttggtaaacgttatcctcggttatgacgccgcacttccatgatgtctcatctgaaagtttaatctgtaaataaccacttgacaggtctaaagatgaataataattacaattgcctatcttctccataattacatcaagcctgggaagggggtaccggtctggaattgtaatatcattcaattttctgaagtctaaacatggtctaatgcctccgtctttcttttgtacaactacaaaaggggtgacccaaggagtttccgactcgatcatgactcctgctgctagcagcttttcgatgtgttgtttcaattcatctctgtatttgtatggcatacgtcttggtgccgaagaaattggctcattagtcgttgtgacgaaatgatgagcattcgctgtaaatgatcctaaatcatattgggatttgctaaaaatatcagaaaattcttcagttaaatttttcaaagcttttaattcttcatcaataacctcagagttagaccaattaattttgaaggttggatcagtttcaatggctttcgctctgatactcaaaatctga

SEQ ID NO: 3172 - DNA, 4482 bp, Heterodera glycines
  unsure (1)..(4482): unsure at all n locations
tgtccgtcaatttgatgattgcttcggaattcggagcacggtgccttacgcgagtgtgccactacttccatgtttntagcagctatgaatgccatatgttcaaccccatcagacttgaatgctattggcacattttcaaaacatttattttcttgactggcatccncaagaggaacaaaattaaaatcgtcttttttaagttcgacacatggccaaactttgattattcctggtcctaaatttttggcatagacaagggatgtgttgaacaagattcgagcaagaattgttggttctgacaaggcggacgacaaggcccataatttcatctcatgtatgtgctcacagatagcaaagaaagcttggacaaatgaaaagcgaagagcttcagtcatttgccaactcaaataggaaagttctgtctgaagctgtgagtcggtcacaatgctttcttgggctcgtctggtgcgttttcgttttgtcgttttgttgataaaggcataaccttggtgagagagagttaaatttgtattacatgcttttataatttttggtttttcctcaaaagttaaaagaattgggtcattgtctgcaataaatatagtgccaagcatttgtcctttgaatggacctagcggcaaatactcacattttttcgaaattgaggaattccaaaggagtaatgttttgtcttctaagaaacattgacctttctcaaatgagcagtgattggagtctccaattgagttttgaattgatgggctcccgaacttattaattattctcgttttaaataggtagcaattttcactgcttgccttcatccaactgaatgatccgaagagccaaacccgaggagacatatcgattttattgtcagtgtgaaatagttcaccttcctgtttaagtgtgccaaaactgcacttttggtggttaatcatctgttggcattcttctctgtccatgcttaacatttcggagtctagtttctcaattatgggaatatttgtgagggaagtgtgtttttgaatatttttacgaacttttcggcacgcccaagcttctacctcatactgaaaggcatttggtttataaagccaaatggtttgttttcgtgagcccttcggttgattgaaaagaggagtgggacattgagtaggtgatggaagagaccaaaccgttccttcaatttgagtttggcacatcattgggttttttggaattgggacatcaaatgatgcctctactgagaccggtacacatttgatgataacaataaagaaaaggagcattaaaaatttcgtgagttttggtccaataccctcccagcttgaagcttttaattggggtgaaggtggtttgatattttttgaatcaatgactggaatttcgcagttttctgagtcattcataactcctttgggctcgatttttggtttacttttaacagttgtaattgcattcaatgcattagcatcttctcttttgactgaattgcccaagggctgttggtataattggtcagaatcgaggacagaaacatttgatgggatagcatcaactgaattgacagtgccataattagcattgcgcccatttctgcctctgtttggttgtgggtcaggtctattgttgataaattgagaccgtctgttgcgacaaaagtttgcaatatgtccaagtttgccacagaaattacaaattggtctgttactccacctccgctggctttggatttgttgagaatttggccttctgtcgttcggtctctggttacgcctgaattgtgttcggttattattattgccgttgttatttctgttgttattgtcgaaattacgcggggcaaaacggtcattgagtggtgtcgcattagcttccgaaacaaaaggtggtccccgataattggattctctgttttgttcagtctgtcggtttccgaaccgttgtccactaagtgcatgaacagtgtgtgccaaattatccgagatttgtcctttttcagttaagagcagagcctcaagctcctcggcctgtgcctttattcggtctaagtctttggtcgaattgagaccgactaaacgaagcaaaaatccaatattgggtttaattctatccaaaaattcttcacaagtcctctcttttctttgattatcattcaatgttgggtttgtcatttcaacaagcggggtaaggcgcttaaggaattctgaaacagtttcgttttctctctgtttgcaaagtgccaatgtccttttagtaagttgccgtctttggggtgagtccaatttttgcctaatcccagtgatcgctgagttaagggcagctgcctccgcttggattaattgtttaaaaagttgtcttggtgtcccaattaatgacattttaaatcgagcaactttctcatcctcattccaatttcgtcctacagctccaacataatcagtaaaccactcagcccattcatcaaaagcgatcaccgaatcttcaccaaatacctctaagtgaccaatcattccggttaaagtgttaactctgccaagttcaaaactgtcttccgcaaacggatcaagatattcctcgttgtcttggcttaaattggcattattgcaagaattaaaacgaacatgagaagtttggtttggtgttattttgggtttgacaatttcagcaagtgtatcaattttagcatttaaaactcccatattcgtgtttacttcccctgccattttatttaaggcccttgtgtttgcatatgcccttcgatttacaattctaaatgatctatttacagcttcctctaggcgtagaacttctatgtgggctctttccaaatcgggaacctttaccgacgttttaccattccaaaaatttcggtcaatgattgttatgtttatttcttcatccctctcttgactggtggccctagagccagtcttttttgagtgtgacataagccacgaaaatgtgcactgattgctgtgttgaaataagtgaggggatatttgggaatgatttgaatatatgcttggctaaacaaagaaatttatgctataaatacttgaattttggtcatcattttaatgccaaatcaaaagaattttcttagtttccgttcgcttttgatgggaaattacataatgtttccataggcaattgagcgattgaacgcagtgataagcatcattccattaagatgcaagcagctgactgtaaaagcaattagtagcatcggcggtgatggccggaaggggtcaaagtgaatgaacgtcgtgtgaaacgaaagattagtttaaagtgaacttcgaattaaagttatttgtaaatagcgttttagttgaaatttaatttttatttattctatttttgcattaaatgttaatttgcgtagtttttctttctttttcttgactgttctccccagggagtaattttgcattaatttccaattttttactcgcctcatctctgcgcactccattctcttgccaacggatagccagggtcgctggaatccggtgctaccagtaaaacggccgggtgtccaacccagagtttaagagagatgcccattaaggaccatggaggtagtgccagaggaatggaagagggaaagagaagcgggaattgatgggtgaaaatccgggccctggactcccaacctcccgggtcccaagcccaaatccgtccgcgtccggaccaataataaatcggcggagaatgatcagtgctttattggaatagcattaaaatataatggtcgacggataatgcactggttggccaactgatcccccgagtgtagaaagtcatcagtttaaatagacaaatgtgaagggaaaaggcaaaggggcggaacaacaacagaaaagaaattgattatggaaataatcgaattatgctttacacgacattcaacaatgagcttgatattttttatatacataattttttttaatttacatatgtaaatcaataatataataaagattataaatctcgaatttaaacgaagttggaattaattatgtaaacgcaagaaataaggaataaataaactctgcataataaaaaattattaatacaaaataaaatatatatatatatattgctaacaaaatagtatataaattttaaaaaataattcaaatattttttaaataagcatatttgatgtaaaaaaccatgcctgacgaaaatttatttgaacggtttcctataacagtttttcgtaaacaaagaagatgaaatatttttaatatctttttaaaaacattgaacaaatgagattgtattaattattaaaactaattgatttttctctgaatttaaaacgaaaaacaaataacaaatattaattcatcattttaattatatacattaataattaaaaaataaaattaaaaagattaatctaagtcagcaaaactaaaattagaaagtgtcattaattggtaacaataaaaattcctatcttcttgg

SEQ ID NO: 3173 - DNA, 1407 bp, Heterodera glycines
ttcggtttttcttactatccttgtccttctgtgttccttcttagctcctttttgttttctttttgaatttttcccttttttggcgttttgttgttgttgttgtttttggtcttttccatatcctttagcgcgctcattgcacggcacacttttatccatgaagggaaaaatgtgccgtactttgtctcaatttttttcgctacaatactacaaaaaatggacaaatttggccaagtttggaccaacaatgcttttaaattcttcaaattcatcggatttatcatattttgttgcaattgagtcccaatttcgtccagcagccgccatttgttcttgcttaataaatttgcaaaaaatttaggctataaaatttgttctgccggccttggtttgtttgcgaagaattattttttaaccatataaaattataaaaatttcgaagcaaatgattcgattttttcgcaaatttaaaattggtctcataattataaaaattaattatattttatttaatttaataattaatttaatttaattgctcttattttcatttaaacatactgcggtagccaatcagcgcgctctatccctataatgcttcgtatcttgtccatccttctgagaattcctagaaaatcaccgaccgcttttttatctaattccttgcactgtaaaaaattattaaatattaaatttttgtatttttttttaaatcgcactacgaaaatttcgatacccatataaaatgactttttttgaaaaattttcaattagaattttctgaaaaattgagactcgcatgcctttcgggcctgcctgccctgcttaaaaaagttgcacttcctaattagttgacgaagaaaaaagttatagcccaaaaaatttgtgctcgtacgaaaacggcctgcgaattggattagcccatcccccactgccgaacgcccaatgtttcccaccacaaatagccacatgttgtacacacaaatgtgctcccatcctgaaaattgtgctgtccgattggcacaaaaattgcaaattgctgagtaaccggaattaacaaaatggatcaatgttttgccgctatgatcatttagcacctataaataacatattgatacagggatacacattgataaaattaaataatgaattgattttaaaaaatggaacttttttgaccgaaaaatgtaaaaaacgaaatttttttttttttaattttttgtttcgccgtcttttgaaatttttatgattggaccctttccagaaaaacatctatgacgatgaatttatgtgaattttcctaaaaacccgttatttttgaagggcattcttagggttcagccaattttattttgatttaaatatgaatattattttttaatttattaaatttctcttttaattcac

SEQ ID NO: 3174 - DNA, 2228 bp, Heterodera glycines
attttgtccataaacatatgaccacctaaaatggtcgctatgcctattcactcacgtggtattttgttactaattattatttcagaaattaaaagcgatagcgattccaatgtatataaattcgatttcatcacaaccttttcctgcctcaaattcgaattgtttcacgcaaattgacatttgttcaaggagtaggaaaaaggtttctttttctaatcaattcaagttccaaatattttttaagaattcacaccctaaattgatcctcacaataccgccagaggcaaatgagaaggaaataacggttcaacgaattccattagtgattgagtatttgcaaaacaattggacgttgcatggatgggaaccgaaagtaacggaacgaattgggcataacattttatttaattattaatatgatcatttttaatagaaaaacattgggctggacagaaaaactgcaaatgataccaattattacgctgcgacttcatctcacaatcagccgagggcaaacgaaagagaaaacgcaaaaagtagcaaaacggagcagagggaaaggccgatgggacgaacggaacactcattacacacaggttgatgattttcgaaattgggcagtattcatttgtaatggctattcccccaaattgggaccttttttgtcttcaaaaatatttaaactaatgtcaagtttgaagacatttttttggacttggtagctgaacatggatctgacacccgttctgacaaataataattccgaaattggataaattttatcatatttattccgtgtttttcggaattggggcggggattctaattagttaaatggttgttagctgattcgtgataagtgagtggccacgaaaacccctgttaatggcaaataaaacctgagattggaatttttagcaacaattgctaattctcgcggttctgttgggatggaggaagtcgcagacaaattgcgtcaaagtgcgcttcagtcgtccaacgctaagcgaaggcatttgtcattggcagaacaagcgatggaaaatgaggcggagatggaaatgaatgaacaaccgtcggtaagtgcaaaagaattaaaagtcgaaattggccaacaaattgtcatgcaaaaaaaggaatgcttaaattgttccaatccgccgaattatttatcgaacatcttatttttgaattattgagaagctttttaaccaaaggctcacaagaactgggcgtttcaagagtgctctgaccacgaatttgggctcagatttgtcataagattgtttaatcggtatttttcgaatatattttctcgaaattaggattctattttctttaaaaactcatgaagaaaagttttttaccaacaatttctcggcatttctgctgacctccctcccttttttcatgtatgattgaattttcaaatgtttgagttgtaattaattacgagtcatttttttttttattagtttccacaaatctctataagattggttggagaaaactgcttttgtgataaattaaaaacttgcataagttctctatcatttcaaaaaaaaaaaattcatcagaaaccgactggtttgggtctaaatggtttaaatcggttttccggtgatttttttttttgccaacaaaatcccggtttatttttatgatttaaaaagatatcaccaaaaaattattttttgagcatttcgaactaaatttgctgttttaagattttggggagaattttttaaatcataaaaaaaaaattaatgagctaacattgtaagaagttcataagttttaattatcaccaaagctatggaaactaataaaaaaacggctcataattatgttatcaatataataaattttgtatattttcaagtctgatgacagcctttcgcagtcggttgtctttgaatgccaaagttgcgacaatggcaaaggccgtgacgaggacgaaatgggcataccgcccccatcaaaacatggaaggacggagtgacatggcggagagttggacagacggacaaatgaacgacggaatggagtttgggaatgaaaaaaaaattcaatttgacatcaattttattgaaaatggatggaaatgaatagaaaatttattataaaacacctggatggatataattttgtttaaatgaattaagggaatgttgaaaaaacgaaatgggtaaaaaacggaggcagtgaaaagcaatcgaatgatcgat

SEQ ID NO: 3175 - DNA, 3924 bp, Heterodera glycines
atgggtaaaaaacggaggcagtgaaaagcaatcgaatgatcgatcatctctttaccataaatttcctcttttgttcgatgtatgtgcagtggagcaattgaagctgtgattgggctttggtggattacgcctcggggattgggtcactttcccacggacatcggtctgagtggacaacttcacgttaggattagaggggagaacatcagcagtgggaacggaggcaaaaaggatcaattccccggggaattttaaggatggacaaccaaatccgacaaaagtcggctgttgcctcgggagacagaccgatgttgttgaagtcgttccaaagtgctaaaatcagttccgaagtcatcagttctccggcatgcgttgagatcatccgaagctgtaaaattcatgattaaacttacaattagtctaatgaatgctttctcgccataaacactccgtctttgcgcagaaaattgttggtgaatttgcgcagcgaaacgtcgtcggccattggtttttgcggatgttcgctgagcactcgcaaatatttgcggatgaaaatgacactctgagcaaacaaatgccgaacctgtgatgagagaaaccccaaaggagcacctttttcgggtagagcatcacgtagacccaatagagacaattggtgacctgcaaaaaggcggacaaaaggaactgattacggtacaaaagggatggattacggtaacggagccgacggtgagaaaccaaaaccacagaaacagaaagatcttttcgttgaacatgctgtataaatgtaaattgcaaaagagggagatgagtgagcagaatgaccgtacttgatcatgagcacacattgtacagtatgcctgtggatgttgccgaggacgcgcacctcaaagtcgcacaaagtgacacgtgggaacatccctagaaaaacaaaggatttgctgagatgtgaacagcggggaaaggacggagggagggagcgcgccccggaggacaaaaaggaacagaacggacggatggacggacggacggctctaggaaaatccccgacacaggaaaatccgacactaacattaaattttaaaaataatttttgattctatgagttaatatttaaaatacatataaaaagttacagtactgaagttatttaaaataaatattcttattgccataatctattctatctaggtgggcatatgaatattttttgtatgcccttttttgattatctcaaaaaaataaaataatctctgtgatccttgggaaacgagaatgtaaatagtgcttaacaatttttaacatatgaatgaatgatattcttcatattcacctggacctaatactccccaggcaaccgaagttgatcagatcattcgtgaaaaaatccacgcaaaaaaacaattctcggcaaattcaattcaagaacttgctaagcctaggcagatattaactcaaacaatctaaaattttgttttaatttaaagttagtgtcggattttccagtgtcgggtctcccgctggtgtcggattttccatcggtgtcggattttccgcttgtgtcggattttccatcggtgtcggattttccgcttgtgtcggattttccagtgtcggattttccggtgtcagattttccagtgtcggattttccggctcccggacggacggacccaaagagaggcgagggatggacatacccccgggggtggggggggcgaccgaagtgacacgtttatcttcatcagcggttctgccaattccaatgccaaaaagaaacgtattcctcctcctcctctaaagtcgggagcctaaggcacaacaaaagggacgcaaaacgcaccccttaaggacaaccccaataaagttatgggccaatggttcatctgctggtgttggcccattccctcgtttaacccacccgttttctcccattcgatttcgttgacaatgtctctcagaagagtgaatccgtaagtgaaatcgcgcgagcccaaaatgtggttgagtaagctgaaattggaaaaaagcaaaaaagtgacgaaggaaaagcgtaccaaaattggaccataacatttgtggagtaaaggagctgaatggggcattttgtttgaaatgccattcactcactgactgctcacttttatgccaattgagaggagagtgacgtaacatccacagtgtttgccaagtcgcaaaatgggcaaacgattgcgactttgccgttgcacttgggtcagctgaataggcggggggaggaggtcaatggcatttgcaaaatcaaagagtcaaaaggcaatggcacttgaccaacatgcacttcctcctgcatgtgcctagccatggtgtacaccgtccgcgactttatctcggggtccatcagtcgcgcgtcacatgccatttggactaatccctgcaggttgatgcctgctcattggtggcaaatggcgtaatgagttcggcactttggaatttcttttggcactgacccgagtgccaatagagaaggcctcgccacacaatgcacggaatgtaaaagaacagcgcctggagggccaaaataaatggcaccttaattggccaaagagtttcggggtactgtcaccggacggaaggaataccgtacccattgatagtatccaatctgtcggttgcgccgggaataaacctcccggggaatgtcctcctccattgggatccaataagtgttttgcacgtagctgaacgtggtcaaccacagtcattcattcggtggaaacgaacggaggacaattcactcaccagtaattctcctgcaaaagcatttggaaatgaaagactaattaattatttaaaagacggaaaagcattgcaaattaaaaatatatttaattggcacattttccctccttttcccccattaccgtgtattgttccattgcatcttaaaatcatattgtttactctttcaaagtgagttaaattatatttcacctgtaaaagtcgccggcacccaacaccttaaaatatttacaaaattatttttatttttacttttccctttttttttgcccactgaattggaaagccgacctgaaaatgcattaaatcgttaaagcaatcggttaggatgatatgctcacatattgtttggcagatactaacaaagcgaaagaggcgactaaaattggcaatttaaataaaataaatttaaaaatattcaaaaattaattttgccaacttacgaatggtcgtcgtataataatctatgacaaattaatgtaatttaatcattttactttaaatgcacgcacagttaagcttgtctatgaagtcgtcatcttaatgatgccaaatgatcgttaatttgcgctttcgcttacccaaccgcggataaagtgcccgaaatgcggaggccaagtaatagaggatcatagctgaaagggtgcctccattcggttgattttggcattttttaatgaatattttaccaggcgaagcgccttggccgtgggcgtggccttacaaagaaaagatttgaattttaaacatcccaaaatttggcctaccgcccccgtgggcgccgaagtgatggccgccgatgtgagagccgtccagaaatttgtgagactttaaaacatttagggttttggtggtgggattagacttgcctggtaggaagggatctgttccaagtgccgggccttgtctatgtgcgatcgctaaagaaggcgcgggttattacttaattaactaattggatcattattattctgactttgttttctttttgacattaaatcgtttttcaaaattaccattttagggtcgattttttcgggaaatgaaagtgcgagtgaatgaatgaggaggagaagaagatgaaggtgctttgatgggatgaaaatgaacggaaaagcggaggggggggggaagggaaagggg

SEQ ID NO: 3176 - DNA, 1314 bp, Heterodera glycines
ataaaataagcggagggaaacgagccgagaaaggagagaagccgatatgtcaattagccaaattgactttgattggatgaaaatgagaagaggggtgggtgagtgagtgttggcctctaaagacgaaatgaaaggccattttaaggatgaaaggtgacggccgattaaagtggaaaaagtgccaaagtcggggcttcccctcggggcttttcccgggtgtgtgtttcggcatgcttttgcgttcgctacctgctccaattgaccgctctcctcgagctgcttctgcttcacttgctgcgtgtgaattttagccaatttgggcgcaaatcggggctctgaacgcaattggccactcaaaggacggaatttggcagggaccaggcgcagaatttgcccctttcgctccgctttctgttttttgaactccgtccggtccctgaccacttcccccccccctacgttcggttttttggtgccaaattggccgcgcgttttgggctcctccgctgccaaagtgcgttagtgtgccggtgcttctgctgccccggttctgccgttcggccaccgattgctcttcctcctccccaatcggtcccaacggattgtccgtcccttcggcccaattttggccctcggcactgtcctttttgtggccgtttgcccacagattttggcaatttttgcgccctttcagcaaaaatgaattgtcaaataaattcgtgaggtgaaaacggcggaggaattggaggacaaagctgcgagaatcccttttttgggagacgacgaaacgaacggagtcggacgaaggcgaatggacgacggaatggcggaagagagaatgggggagggggcggtgggaatggcactggcaatgggaaaactccgatgggaaggctgagggggcatcgatcatagaataggggaggaatggcaccaactcggtgggaaaggcatggacaggaaatgctgttgttgctgctggacaaaagggacgaaaaatgggagcaatgaaaaggaaacggatggaagaaatgggggaagtggaaggggaccgattgggagggagacaaatggggagggggcgggtcaactccgtctcagcttaagaagccaaataacttctttctttaagaacttccgaatgataccaattttgataaatttgctcaacaaagaaaaagttatatggccagacggagttggccttcaccggggaagggaaggaggagaaagggaagaccaaaaacaggggagggaaaagggggaaagggtgagagtaggggagggggcacagcctttgttaagcgtatgatt

SEQ ID NO: 3177 - DNA, 1191 bp, Heterodera glycines
ccccccccccccctcaccgctcatcgggtggcttttctccccctttttactcactaaaagcatatgaagagatgaaaaaaagtgggaaatgcaaatgaaatattgtaaataaataaaaagtagaagaagaagtactgtatgtgggaagacaatataagtacggtaataagaaaaataatgaataaataatattataattaccttatagaaacagcaaaaatggacgacgaattttgtaagttcaataaaataagaaaatactgttaatgaggctgacaaaaaataagtcacagaattgcatttgccattttaattattccattggaagtcccaaaatgcgtcaatgaataaaaatgattttgctttagcaaaaaagtgggaaagcgaagttaaaagatgaaaacgttacgtggcattttattgccgcggaaacacgcgaaaagggacgggcggaaaaagtgccatggattagcacagcgggaaagttggcacttgcggagggattggcgagggatggaccacggcaacagggacggtgaaaaataaggcaacagaacgatgctgctgatcagccaatcaaattggtcagcaaatagtaatgggtacggtatgatcacttttttacagtagccgataaaaatggcaaataaaacactcaccttaaagcgagagccgaacttgagttgacggaatgcatgcatttaaaggacggccgaggggccaaattttgggagggaaaagcgatcagaaaaaaagccgggaaagagtagaggtgaacaaaaggcaaagaacaatttggttttcgcgtttctaattggctaataattaattaatcaattagcatcggatgataaaataaggcgaatgaatggcactttctctgaaagagggcattttactttcgcacgctattagcattgaagtgggggagggggcaattaatttcaacattattaaaagcatttacggcgaataaaagggaaaatgggggggggatggcttattatggaaatgtttcatttgatatgacaataggagggattgatcagcagttacaatgataatgaagagataggcaaacagcaacaagatgcgacagggattaggaggaataagcgaagaagaagaagaagaagttgacggaaaagaggggaaaggagggagagggagaggagaggggggataagggag

SEQ ID NO: 3178 - DNA, 656 bp, Heterodera glycines
attaacaaaggatatgcaagaaacacagggaaaagaaatgtacacaaccaattaaaattggaaattgtgaaaatacgagaaaatggggggaaaatagagaatttaaagcgatgaaattaaaatgtgtaatggaattattggcaacaagcagcagattcagtaaaagcaagcaaagaatggcatcgaattaaatgaggagaatcagtgggagagagttaatcgaatttgtaaaaaaataattatgagacaataatccctaattatttggggtgccaaaacggcgattgaaatggcggaaaatgtgggggagaaggggtgagacacaaaaggcattgttgtaatggaaaggggactcacgaggaatgccgaggaaatcggcaggcgttagcggcaagggaagaagcactgatgggaggggaggagggaaggggaggggagggggggatgaattgggggatgaatgaatgcccttgggcctcttcctcttctttttttttgctctcccaaattctttcgcgacgacttttactccaacaccgcttcaattcgcttcattgctcacagtgccgaaaagagaagtgaggggaggggaagaagcagcaaaattgaatttggaacataacgaaagcaaatgtgaaggggagttggtaagaggg

SEQ ID NO: 3179 - DNA, 9333 bp, Heterodera glycines
ttgtttgtctttccatttttaatttatttccaacaggggtccgtcctacggcgtttcctaaatccaccagcagcaaggggggggcgctgaaaatgaaaaaattaataatccactttatttatcaaccaaatttaaatattaatagtattcgctaataagttgactccaaaaattgtttattgtattaaaaaaagttttattttaaatattttacaatttattttagatttcttttaagtttttattacagttttgtttgaaatttatgactttatcagctttttagagaatatacatatatatttttaatttgtttgttttcgaccaaaaacattatgataattttatgaattttgtttccataattataccaaacattttaaatttcaaatgcttttttttgtcttctttaaaatccgaatttatcagcttttgccagctctcctcccactcccaaattttggttcatcaaattatgacaaaattagagttttacaaatatttattttaaaatcggattgcgtcggcggtgaaacaaattcatctgctgctttccctcctccactttcttttctctcatttccgcaaccaacaaaaagccgcccccaccttcagatgcttcatcttctgctctgatggtcgcccgcccattttatgttcaattttaggtcgtatttatttaatttttttgctcatttttttcttaaaattccccctcatttatttgtatttgacggaatgccacaatgtttttggcgaaaataaaaaattggaagcggaaaaagcataaaagaacaaagaaagtgaggggcataacaaattatgtgtttcggctacttctaatagctttacattggaacgtcataattgtcacttttgaataaaagtaatatttttaaatgatttaaaaaataataaaatttgtcacctaataattaaatttctgttcgattaattttaccattttcatcaataaagacatattaacacaataaaacggaaacatttttaaatggcattgttataaagcaaatagccgattattatttattcaaaagcgttcctaaggaaatttagcagcatttaaattcaatgaaaaatttaatgtatataaattattttagctggcacacctgttgctgatgaatagggaccgaattttgaagcatttgcctaattttttgctagctttgggcgagctaagaagcattaaaaactcatttctaaacggttttgggcttttttaccttttagagaaaaattttaaaacttttattttatttaaaaagaaatttcggcttttttatttgattctcatcaaaaaaaagacaataaaatgcaaaattttatgcttatttcttgattttatgtacttaattcgctatttttgagcttatttcgtgcttaattcattaaggagtttttgttgcttaattaaatgtttaattatcttttttttgcttaaaagtccgatccctactaatgaatgccaaatgataattaaatgacaacctttgcacataatcactaattttttccaaatgttgtattactatttaaggctctaatttatgagatgttcccttcaaaataataatttttctacaattttcccattatattaattttttctcgtgcgattacgtaaattttaattcggttattaaatttttaataaatcatttatgattcaaactacgaaccaaaaatttgtagtttcttttcttttcgcagcgtcattttccattttaagaattgagcaaataaatgaacgcaccacagagaattttaattgaccttggaaattgtaattaatatagagagaatcatttgatttggctgtgggtgagggagggcaccaccgccactctctgcctgaaaggcggctaattaggtaattaatttgatgaccaaaaatttaaatgaccgatagactgctgattactgtaagtgataataaaatatgtgattctgaactgcaataggcttcgctgttttttcttaatgttttagaaataaatttttcctttttgaagcttttgcaaattatataattttttgtaatatatattagtctcccacttaattcaggaaaatatgaattattcatgctttatcattaaccgtaagagaataaaaatcttaggatgcaacgcaatttaagtagttaaagagaccggtctttaactacccatttttatatatattttttttaatgccaaaaattattgcgaaatatttgtcggcagccctcataatgtcgagacagcgagtgtttgctgaacaaatcctcctccactttttttgtttattctaagtgaatttttgatgatttgcccccccccccacaaaaaaaatccatttttatggccaagcatttttcggacctcccccccgtcgcttcgcatttttatttgctaaagaataaaaaagcgaaaaaattctttttgttttattttatttatgtcgaattttttttcgagagagtgaaattttgcattggctgagcaaacaaagcgaaaattcaatggacaaaggggcaaaatgagctgtgcaaatttcgtttgtttgaaaaaaaatttttgtttggaaaatgtcattttataatgacaattatttcatttccaaatgtcagttcatttgcactttttgtgtttaaaaagctaaaaatgaaaattttaccttagaaaatttttggcttcaattttatttcaaaattaaaattcctgaagtttaagaaaatactatcgaattttttaaatgctttttataatttacaaatttttgcatttaattaaaactcatattatttcctctcttttaatcattttgctacatttttgtacctatttcaaaatattacgattatcaaataatgtgcaaaatttatttcatcgagtgataaggccctccgctatttttctgctgataatttttattgcatttttgtgtcattctttggttggttctccattttttattttatttttattattttttttacattttttgcgatttttaattgtttaaaaatgtcataagatattttacaaaggcagaatggtagttacctttaaacaaacaaattaactaattaattagttaattatgtttttgttataaaaaaatcattccaaattttttaattaatattttttcttaatttcccttaacatattttcaactttcacccccaccccttacttatgcctaagctttttttcatcaacatttaatgttaattgttaataatccgtccgtttaatcaaaaaatattcatttgcataatctgatgatgatgatgatgataattctgttgttttgtatggtgtttcgaatgtcattataacattcattcattttgcttaatctttctctccgcatcatttttcgttcttctccccccggggcttttatttaatttattcaaatttccgtgcccattaaaaaagaaagtgcccatcgcgtgatttgcatagtaaataatattattcttctttttttgatatgttctccaaaacgccacaccttcacatttatagaaaaacccaaatgcttttgcaaagcatcaaaaattgataagaatggcaaaaaaaaatacaggaacatttttatcacaaatcctgtgcttttccaccaaccctaataataaaatgctaatggtctattatgcatcattaatttgatttttatattttaattattttattcctaaataccattgtttttttaattttcaaaaaaaaaatcattttaaaataatcgaattttaaatatatttttaaaccttaaaatttttggtttctatttttaaaaagataagcaattaaaatcattatttttttaatattttagttattttttcttaaatattttcttttaattttattttaatttttttaacaatcacacattttaaatccattttttaaaataaaaccgtgaaagtgtttagggggtgtttaaaaatgaataaatttaaatcatatttttaaattttttaagtatttaggtttttaaacctctaaatatttttaatatcttcttaatttcaacaaatattctaattcatttttttatttttacatatgtttattcttatttatgcaatattacaacaaacgcgtcagacattagaattattaaatatttctcacatttttaatgtcctttttagattatcgtaattataagtgtattaatccccactataaattgtttattgcgaatcagttttttttaatccccccacctcccctaaaatttaatcccttcctcaaggaaatctttccaaaaagtctgtccggcgtttttaatgactttttttaaaattcatttctctttaataacaagcaatttgttcatatcgtttctcttttcacatacctaatcccctccccataatatatgtgcaaaatgtccaaccaaaataatattaaatccccaaaaaagttgtggtaaataatccaacggtcgggaatggtgattaatcactctcgagaatttcgcgcactgggattaatggggggacggggggagcatggggattaatgccttccgggcaagacaattaacggattggtgacgctttacgcatcagtcggggcggggggggggggggacggcaccaccatagccgcttaacatgcactctctccattttcacaaaacaacaaaaatattctaagggtggcatttggcgcgactaaatccgccggtgtgcctgcttaatcatcaatttcaaaaaaatttaatccgacgaccgtacacttttgatgagtaccaaatccacacctgattgacagcattttttaaattttttgttgcgatataacttaatgaaatgatgctgtttcaagacaggatatattattctcgctataaactgctcttattttccaatttgcgaaatatttaaatccctcccatcgtcaaaattaacatcggatttttgagtaagtttttcaattgttttgttttttgcctaataagcgtcaaatttcgtaaatatatttttatttaagaattttttctttttatctttttttccaatgaaatcccgttcctttttcaggtaaaaaggaaattaattaattaatttgtccctcccaaattcgaaagtggtgtcaaaaggcattattatccaattaattggtgatgcctcagtcaatgaatgataatggcccattaacaaaaactgtctcatcacaaattcactgtttaatatgcgagtgaatgactcttcttctcctcatcttccatctctttctctctcaaatttatttgtacggccgaaaattatttttgggccctccctgccatcttctctctctcccattaatctccggcggagaccctttatttatgtgagcaatttgcgtcgagaatctcgaaaatatttaaaaaagtaaatttgatggcgcagtacgaaggggaaaaattacatccattcgccggggggcatttttgcagttttgccaaaattaattttgttgtaaggacttttttaaacttagccgcctccgcgcagatctcaagatacatttttctgtcctgctgtacaataatacattctttttgaatggactggtcaccacgggaaattcagtcccatgtcgccttaatgaggtacaaatttgttttggaattagccgcttttccaattccaatttctctccgctcaattttttttgagtccggcactcatatggacgaagtaacttcttaatactaaaatttcctattttttgtttaataaaaattattttttggttagaaaattgacactcctttggttgcatagcatccaaatcagtccagcagcaggctgttcatttattaaggttaaaatcattaaattctttaattacacttcattcacttccattgctcccccccccctcgtccatttgcacgtattattattacgcaacggacgagagagagaaaaaaagagtcaaacattgaaatttctattttctaccttaaacaatattttctaccttaaaatttcactgctgtaagactaaacgaagttgggtagagaagggggaggatttttgggcaaaatacggaggatgatgggaagagatgggaagcaaagggatgccttccgtcctcttcgtcgttagggtgtaaaattcgttcagaaatttttgaaaatccggttcatcatcaattcatggtcacgtcagcccaattccttccccccccccccgcccccgcccatcacaaaatagcccaaactatacaaaaatgatgatcacatctgaaaatttcaatctcacggaatctgcaccaccaccaccgccaccaccaccatcattatcatcatcatcagcacaattgcacgccccgggggagggacaaagtgtaatgtaatgtttaaaaattttgtagcgaaaatggccgatatttaagaggtgggagggagtaatacgacgacgacaacgggacgtacaaaggagattttgtgtgtttggtgtaacatttttgccatcatatcaattattatcatcatcttcatctttataagcataatcctcattagcagcatcattagtcgttggcatggtcatgacctattagcagcgtcatggtgggcatgctaattaggctggtcgacaacaaaaggcgccgaccgaccattgatgagctcaagcaatggcacggctattattatatgtgcacaattttttgacctttccggatgggtggacaaaaaaactatttttggtgggcacaaaaatattttttgtttacgatacacttatagttgtggtaataataataaagtactggtacaaaacggtccgtaattttactaattagccaaaaattttcttttcttttcttggaaaaatggtgggaaaattttagaggagcatattttgtcgagaattggttattagaattttttttttccagattgcgtttcatcttttttctaattttcttataattttccacttttcatttataataaaaatttaattaattgtattttattttctaattttttcttcctgcttaaaaatgtattgttttattttgtcttttttatttttgaatatatgaaattaaaaacttttttttcttttaaaaatttatgccatatttattaacacataccattaaataccacactttgaattggaaacagggacgggcgaaacttgggctttggcttcgaaaacttcgggtttttaagcctcaatttttgagcttcggtgtcgggtaaattccatgaagcttcgattccctaaagatcgaatgtgaaaaacataacctaattatgggctcaagaactaagaatgatcctttttttaatttgtgatctaaaaagcataaaattagcaactttttgtgtaaatctttcaagaaatatggcctaaatttcataggcattgaaaatagaaaaacaaatggattctcaatagacataaatattcctgggaacacactaattgtgcttcatttattttttgtaattttctttaatttatttttattttatttttttgtttttttaaattttggcacaatcttttggtctctctcctcccacaaattaattctctcccataaattacttcgctaaatttgctcactgtcagcacagcatgaccttcccaaaattgtgcgcattacaccgtaaatattcgccatataaatttatttttcttacacaacaacacccgaaaatgaaataataaaatgaatgaaatttattaatgaatgaatgtacctgaatgaacaaaaatgtaatttttaaaattaaataccaaatttaaacccttaaatgcttcttattttttggaaattaattcccataaatttttattgggaatattccaatccgttaattaaaatcattttttataattaaaaacaaagtaaatggctggaaacatctttctaatatttttccacaattaattctgtacatttactgagataatttttaaaaatataaatcacccaatactttattccttctgaccgagaacggaaaattctcagcctgacaaaaagaaattaattaactaatgataattaatgtgctccgcatagaattgacagacgcgccaaattaatcaaattgtgacagccgatcaaaacatcattaaaaataaatggggaaatatttgtttgcgttggttgatccaatgtcatcgcatttcgtgtgatgggctgaccttcagtttgaaattttttgctaaatttacgaaattctcaattacagaaaataattttataaaagcattaattttgcgggggtcaaccgatgacaatttttaaaattaaaaaaaaacattttatatttatcatttccaaattatgacgtaatagagataaaattaaattattaaatctatcatagtaatttttaaaaaaaagaaatttcgtaatgccatatttgaaaaaaaaacaattaattaatgtcactttcgcgttttaacaacctttaataatgtttttattcccttctgacgtcaagtgcacatttctttcccaccaattggccataaaatctctttttatgaaaggtaaatttaccgatttggccattctaattaaaattaaagtatatttttccatttttcatttttgggcctaaattcctctccatttcattggtcccatgactaaaattattattttttgttttctttttcggttgaacagagcacaattctttatcattcacagaacgagatatgatcattattaaaataatttttaaaaaattagttttattatcacttttttttaaattgcctttataattacgcaaaaatcagataaaagtgaattttagtttcttaactaactaataatatctaattgttttttttgaataaaataacacattaattcggtaattctcccgtagataaaatcggattaattaatcaaaaacttcactcatgatcaaaatttattgcctatttatttgtttgttttgtttttgtagaaaacatttttttaaaaagactaaattttatttaaaattttttgttatttttaaaatttcaaaaaaataaattaaattaaaaaacaaattttgccaaatgcatcagaattggtcacgtgtgcaaaaatgtgatacatctgtgccgattaactgcggcttattcagcactcaagcacagtttaacttaaatccatgccaaacactttggcttaattaccttctcccgattatctaaattgtttttcaatgttttttttatattttgccaaatcaaaatgattaaaataatttttgaggggtaaaaaatagattatgccacccgagttctatttgccaacaacaccatacacaaaact

SEQ ID NO: 3180 - DNA, 1869 bp, Heterodera glycines
ttttaggaaaatccctttaaattcccagcggaatttccagtatttttcgaatttttcttttttagttccgcaattttatttgaaagtcaaatcaccatggaaattagcaaacattgagcttttttgtcataaaattttgtatataaatttaaaagtaccatttcttatgcttctcatctgtttgtattcgtctcgtttttccgaatgggtaattccatcggcgttaaaaatatttcttttattatctttttttaatttccatttaattgaattttatttaatttataaaattatttttttttcatttagcaaaattctgtattaatcacctatcaaaggtggttgaatgagaagattcgtagcagaggaactatttaattgcttttaaattattaattatttttcgtcaccaattaattaattaattctccgccaacttttttttttgctttcgtcgacactttttgtgccatttggctgatggaaatgccctcctccattgaggcaattcaagcaattcttcaaaatgcaatgcaggccggcattccgccggaccaaatgcgccaccttattcaccaaatgcaggtacggcttaaattaaaatttttgaatcgtgggaatttttttcaatttaattaatttgcctttctgtaattttaggtttctcagaattttggctttaattgaaatttccacgcttttactcggaattaattaccacggcttttaataatgttaaccaattaatcatacaaacacctgctgctgccagtgggtgctgctgtttgtgatgtatttgttcatcgtgagattttggggcagctgaaatttggcatttgcgcagatttgattacctttataaaaaaaaattagccaaaattgtttatttaataggcctaggcttaggcttataataaaatttaaaaaataataataaagaaaattttttttatttaaggactaaaaactaaattacaaacaaaattgaaaatatttattgtagtctccagaccaaaacacacaaaactgaagttttcttaggtgctgaaaatgataggaaaacaaaccaaaaaagtctatagcaaagcgtgtaaactaattactgaaccggttcaaaatctgaagaaattggaaatggcttggttttaaaggtttaatttgcatattgcgctattaaccagcgcacactcgactacagtaggtggggcgagactccgggctccggaagaagtccgcgcgtgatccgcagagataagctcatcaagagcttttgaatgataccaaatatatctgggttcaagctttttaaaaaagttataagtgccacaaatttctccattttttaagtttagaaccggttcaaaatcaggtttgaacgctttgccgcaatttttttttttgggttttctatagtttcagcacctaagaaaactcataaaatttattactgacgaaaaattatggtaaaaaaatcatttctcatcaacaatttgttattaaatttttttaagagataaattgcacaatttttaattcatttaatctttctaaaaaaaatttgtgaaatttaattatttttttttaaatgtttggaaatgatttcttttatctttataattccaaacattcgaaataattaaataatttcatatatacattttttggcaaaattttgagttccatattccaataattcctttatcatcaaatttgcccccccccgtcttccaacttcccaacgttcccattatttttccgcatttatcaaacaaatcccttttttcagtagtttaatttcaattcccattcaatagattattatactaaaagatatacatttaattaaaaatgtaattttattataataaa

SEQ ID NO: 3181 - DNA, 2811 bp, Heterodera glycines
  unsure (1)..(2811): unsure at all n locations
tacaaagacggggaaagcggcgccgtcccggagaactgtcaaagtgatgttcgggaatcccgagtgccgaccccagaaattctctgcctctaagctgttgacctcaagtctcggcacaattcccggtccagaatccccccggcacatttcttgagtctcgggaatcccgacaattttctaatccacaatcccggcacattttgatcaagtcgaaaattcgaaattgaattacaaaaggcggggaaagcggcgccgttccctggaaaattggccattttatttgaaaaattggcatttcgccaaaacagtttatcggcattttctataatacagcgctcccctcgaattagagttcccatcccctgaaataaagccccccccctttttgagatggattgaaaaatagagccccaggggccctattccaagaaatacggtaactttttaattgcgcaaatatttgaatcccgagcggcaatttttctatcaagaaatcccggcacattttgccaatcccgagcattaacatgctctaattagtgcccggacagtgtagagttttctagttttgcatttttaagcaagcactgccgcttccgttgacaatagcacacaatccaccgccgtggagcatatcgcttttcaaacaccaaatggtatcaattggttaattaattaattacatagcatttatattaattaacgtacactaattggcattttaattataaaaatccttttaaattaaattatttcggctccaatgcaatttacgcgcccaatcaatgaccatcctcagtttcttaagccataacttttttcttacttgataaatccatacatccttggtatcaattgaaagcttaaagtctcgggaatttattaatacaagaaaagagcaaatacttgcattaagaaaaaaattgcaatgaaaaaaaacctgaattcatcatttttcgcgtatattcaacagtaatttttgtctatgcttttatccaggcatttttctatacaaaaacttcagtgaactttaagctctcgattaataccaagaatgtaagttttgaccaagtaagaaaaaagttatggcttaagaaaccgaggttggtcattgattggacgcgcaaaagtcgattggacgcgtaaactgcattagagccaatttcataataaagttttcagaaaatttctcaaaaataaacacaacttaagaaaaacaggcacattctcctttgaacactgatttatcaatgacaataacggttttatccattgttacattgggaattgaatctgagcaaacgacgcccttttggacattcgaatcggacttttctctttaaaagtgcgtccgattttgactattccactgactccgtctgaattgttctttccttcctaattcgtttcattttataatattaaaaaaaggaatgaacaattccaggctattttgtgttcgtttttttttgctaatttccgagcgaagcgacgccctacaaaatcaccagcaatttaaataacgaacggggaaataacaaaagcacccaccgcaaaacacgttgcttttggaaattcaaaaatacaccatcaccagaaaataaaattgtttgaaaaaataaagaaaatgcaatgaaaacaatccgtacgccaaacaaatacattcgatgatttccaatggtcccccaaaacatcgtagtccacaaaattccacaattgtcatgcctcaacaccgaccaattcaggcggtagttcgttctaaaacatataacaaaaacagaaattcatttggttttgtttaccttgggatgttttgactcaaagtgctgcttgtacgtcttcgggtcgggcatcaatgactgaaaacaaaaacgtaactgaattaattcagtgtaaataactacaaacagttcagataaaagaaaaatggatttattcgttaccacggaaggccagttcaagaagccttttttggtccggacatcaaccgtacaacacccaaagccattttagtttttttaccatgcaaacggagcatttgaatgtcagtgctttggcggcagccgctctctgatcgttgccctgacccttcttctgctgctgttgtttttgctggttcttttgctgagacagcgccttttggtgaccacgggccattattattcagttgagcaacataaacgacggacaattcaaataaaaatgtcaaaaagaggaaaatgagagaaatattgaggatttgaataatcctaaggaaaaagtgtaaccaaaaaatgacgactaaaagaacaaatatagaaaataatagtccaaacaaaaacaaaaatgtcccttcgcccctcaaatgttcatcagatcacttcgcattccgccccgtgcttctccaacagcgccttcagttcgtccgcctccgttttgcccatgtcccctttgatttccaccggcgccgattcgatcagttttttggtctgtaccaaattcatgccggggatcacacttcgcacctctttgatcagtgcaatttttttagcatcgtcaaatttggccaatctgacctaaattatggagggaaaagaatagaatcaagcgtaaaactggacaccgtttttggttgtttttttcttattaatccagttgcgacagaggaattttgctttaatttagtcagtttttgtcaaaacaaagaattaccgcgtacgaagtctttgtggacgccgaatcgtcgtccgcgttggcttgtgatgctaaacggacaaaacactaacatanaatagtgagttaagcatttcttttttggttccactttcactt

SEQ ID NO: 3182 - DNA, 1762 bp, Heterodera glycines
tggatactgtaaaatgtgagaaatgtgagttactactgtaaatcgcccattttttgatgaattatgtaataatgcaataaattttgaaaaattgtgccaatgtttttttttggcatttcggactgttttgataaactggaaagtttcatctttcaaatggtactgaattgggtaaaaaaaaattaagcacacgggccgccaattcagtcccaagctggggaaaaattaagacccaattaggcaattatggaccaatttaaattgcaattaattaaaaattaatttttgtttcaaaataaatttattcaaaaaagaaaagggaagaaaaaatacgaatctttttggaaatgtgagaatataaaataataaaaagaagaacagagaaaagctaacacaaaacaaataaacaaaaaaatgttttttttgggagaacaaaaaaaagaagaagcaaaatttggggaaaaccgccattacaaaaaaaaagaaacaattaattaaaaccattaattaattatcccgaatactaattaaccacttaatgatgatgagacaaaaatgtgataaaactgatgcacaaagaggaggaggcaaaagggaggagacgaaaatcaatttgcgcgttaattaattagttaattaattaattttgtgtgacaaaatgcgggaaaaatgaattgaatttatttgacgattttgttgagtaatttgttgatgaaagtggcgtctgatcagctgaatttacaggggcaagatcatctcgtcagtcagtgacacagcgcaaaaacattcgctaatattgacaatcgatcaattaaagagaaatggggggctaattaggggttgctgtgctgtccgagagtctcgaccaattaagagagtcgagacggagacgtgaaaaaagatgaaatttcccatggggaaaagctaattaatcgaattcgtgaactttcttttttaagtgaggggggtctcgattttcaagtcttgtctcgaattttagggtctcgaattttcgaaattcggcaaattttcgaccccgaatagcacggcatttgtacaacataatgcttacaatcagagaatggtggtgaatgggtttttgtttattaatacaattgcatggtgccatttaaatacatcggcaacaaatgcacggcaaattaggatactcgtcgtacggtggatgaatggttttataccgtatcaaatttttggcattttttgtgccaaaagacgagcattttgaaattattgaaagcaattatacaccataaaagaagtagaaacatttggcattcattgtacacactttaaatgtacatatgttagtggggcatcagcacactttttgccaaattccttacattttttgccattaaatttccaattattttagccgatttaattggtttttttttaatgaggtattttttggtttgtgtgtgccaattcaaaaaaacaaaacaaaaattgtgcgggagagactacaaaaaaaagaaagaaatgtggaaaaataatttgtttttgtaagagaagaaccggtccaacatgagattgattgctcaacattggtcgacgacgttgttgttgttgtttttggtggcttaaaaagcgcacaaattaaaattttgtttttgcgagaaattcatcattttcttggccattgtcactcgaaaaaaaaacgcattctcgagaacttagcgtccagtctcgagacgaaccgaaaaataattctcagtgtgggcgaacgcacatagtcgca

SEQ ID NO: 3183 - DNA, 1839 bp, Heterodera glycines
  unsure (1)..(1839): unsure at all n locations
cccctcactttgtgctcccgctgctccgcccgcttgtgctccaaacattccggcagctgcaaacatttccggactcattgccatcgcgggagtgtcgggaatgttcagacgctttttcagagcaaaattcaaatcggagacctgtaaattttaccatgaaaaatgaaacaattcgaaactcacttcgaccaatgaaagttcggcaatttggtcgacgagcgaacggacgcgcggcgaaatgtccttcgcgcggtccaccgaaggcggagaaacggacggaccgtcctcaagcggaagacccagcgcggaagcctaatttttaggaaataattatgcaaaagtgaaacagtagatgagccgtaaaacaattaaatgttgaaatgaagcaccaaaagacgaacgaatggaaatgaattcaaatttgacttttaaattcgctaataaactataattctccttcaaaaattaaccacaattccaagggaaaaggcttaccgatgcccgacgaacaaacggaccgagcgctgtccggcaaattttcaacgaaccattgacaatcattgttttttacttcacttaatgcaaaaaaacgatggtaaataatgaacaaattaaaaagtaattcctggagaaataccaaaaaataacaaagggaaacaaaagatcaacagtttaattcaatcatcaacaaataaaaatgtgcgttagcagcagccttcatcgccaaattaagagacgagtgcggaggcggtcgccgattcgtacttccaagtgggcgggagcatccgtttggttttgaagtaacgggcgagacggtggattcgactctccaccaaaattagacggtacctaaaaacatgcacaaacgtcaataatcattaggaattgtgggcccaatgtcggtaattccagtttaggcgtccaaccaatgatcattctcattttcgaacataaaagaatattttgtcaattgttattagctcgtaatttaattataaaaattctgtaggttttaagcttgcgcttaataccaagaatataggcaatgacgtagtaagaaaaaagttacggcctaggaaaatgatagtcattaattggacgcttaaattgagtttggactcgaattgattttcatactttgagtcaatgtccttgcggaaacgctccaaatgcttgcggatactaaccgccttcttgatcagatggtaaagatcctccggaatttctggtgccatcccctgaaatggatatgacttactttcaaccaatcgcaattaaacaatgtgcaaaccgtaacctttgatcgaagaatgcgcacaattttgttgccggttatacgacgcacttgcgcaacgccatgagaatcacgcaaaatcacgccaatttgagacggacgcaaccctttgcgggccaacttcacaatttgctcctccacctcttggttggtcagcttctgccaggtgggcacagagcgacggtaaggcaacgccgagcgcgaaatgccttttcccgggttgtgcatgcgacccatgacgacgtgaaaagattattagagctgatttctggaaaataaatgacagttttaacagacaaaataaatatgaaaatttaatattcaaaaaagaaggtaaaagctgaaaacaaacacacaaaggaacaaagtttaggtatgtatttgcatttgtacgtttacgcatagcgagacaaaaaaaaatttgttttttcttgaatttccttctcataattatggcgtaacgcatctttaaattttattttctttccngagtttaaattcaacaataagcactttttgccgctttttttcttttttaccgttaa

SEQ ID NO: 3184 - DNA, 1333 bp, Heterodera glycines
taagcattttgagcatacacaaactgtccttgtttttttgtggtcactaacaaaaaagtgagtgtcaattttcttaatattcgttaaaaccgaacgcctattggcttaaaatcgaccgaaaacccgaaaaatagaagaaatgggcaaattaaaaaaaaacataattagtattttaaaataatttaaaaatcctttatcaaatagtacgataaaataaaataaatgaaaacaagctgctagtagaatcaaaataattcatcatcggccgagcggatccgaacctatgacaaatggtcattagcgcatttaattaacgcacctctttttgctgatattttcatttcatcgatttgttctgatcattttttttgcaccaaagcccaaaaaaacccttaaatttgagtagcaaatcgacttccattttttcaattgttcagtttcaacgacgtcggacattcggccgacgcgaaaaagatggccgatgattatttggtgggcgaattgaaggaggacgaaggccaaacgaccgctggggtttcactgccggaagaggcgaaaagggacgaaccgacggagtcgtggcggcaaattctgagcagtccggtgatttctatagtttttttttggtacttcggctattgtcaaattctccgatttaaccttcgttttctgaacgaacctaaaatacaaattccaattttggatatatttataccctaacggggagggaggaattccgcagttttccgttagaccaaaaataaatttccgctcaattagcaaagtatctccagtttaaaagctccattgttttagacttggtccaactttctgattccggttgcgctgtcgttgggcgttttctgtgcgtataaattgggcacggccatctacagacaaatggcctcctaacaaatttcatatttacaccggttttttgttgtgacaaacggatttagtatttttatgtcatttaatattgtttttattgcatttaatcagtagtttgaatttgaatattattgtactagtaaaatcatgtccaaaaggaattgcaaataaaatgatatttttaactaaatgctttcgtgttaaacttttttttaagcacttgtaacatggagtctattgaacagagttcgacatctttaatcaataaaatctctctctttttctatcgcttataatttgtcacttcgcttgaacgcctcgtgaaggtgctctcctggtaatcgctattaccacggatatatcacccaaatatgcaattattgaaatgtacaaccagccaaatacgaataacgaataaacatgacaaaattgaggatgtgct

SEQ ID NO: 3185 - DNA, 2000 bp, Heterodera glycines
ccccccccccccactcccaaattacagctgcaaaagtgccggtttgtccatccctccgcccttttttgctcacgtgcataaaattggcctcaaattcgcggctgaactggcgcagatacgagttttggttctcagcaaaaagcaacagttgtcgctggtgactttcgctcatcatgtgacacttgaagccgttctgatcccggcactgtttctggcacatttggcagaaccatttgagcttttgcagccctttggcctgaaaagaggaatttaaatatgacatgactaaagacaaaacaacaaatcattgtccccactcccatttttgaaaatatgaattgtcacctttgcacggttggcaatttctttcggcgttcccttctcgtgtttcggcattctgagcagatgaaccaataaacttcctttgtttttgcaaaacaaatgaatcactggccaaattcatatttaattaattaatgcgtcttcaacttgtgggaagatagtaatatttatatattgaaaatgtttatttttaacacttttataaacataaaaaagaattcgactcaattcggttggtttgtctgtgtctctcactttctctttctcttccctctgttcttttccgtctgctgtctctttctcttctccacattctctcgcttcttctccgccctcctctccttcactgtttccaccgtttgcttccgttcctcccattttcgcttctttcgctgtttgtttttcgcctttctgaccactccctttttcagcaggtcaacattgtcctgaaatcattttcagggggttttcaagggtgttgatcacgaagctgaacttggatttttccaattccgagccacggacccgaattcgaaaaaaaaactcagttaattgttagcgcatttttacccaattaacaattaagttttttgcaacaaaataaattgttgttaaatgaattttggtacttccgggttatgtcgcccccccccctcaaaaaaattccaaaattcgtaatttggggtttccaacttcgctgatcacgaatatgatatttattttaacatctgatgacttttaatcatagatttgacaaaatatctatgattttagaaaaatatttaaaattcaattaaatcatgaaaagagtcagacaggtggcataaaggcagcgatattgcgcaaaatctcgtcaaattcatcaacatttcgtcgcttaacgtcctgccgccacaaaaaataatttatgtgtgaaaattgtaaaattaatttatgccttttctgtccccaattggccaaaactgggttaatatttcaaaattggtttgaaaatttcatatcccaactctggtaaaagtcgaacaaaatgcgaaatgtcggcaaaaagaaaaaataaacttacaaaatttttgaaggcatttgcagcaacaattttataaaaatccggaaaataagttcaccgactccgaaaaccctaaaatagacttattttacgaattgttatactttaatttttttctggacatttcgtgggtttttactagagtgcaatgggaccgggaattttaggcaaaaccgggaccgggacttgccgggacctgagaagccaggactgggacctcgatttttcttcgggaccgggaaccgggaccaacagggaaattttaaaaattcaaaaaaaattttttaattttttaaaaaatttaatttaaatttatttcaattgaaaataatataatataaattaaattttaattttgtttttaataaaatccaaaaattaaagcaaaaaataaattaatgaaaattttcaaatcaaattttcttcaattatttcaaacaattaggtaatcatttttgactcaaacgatcgaatattatttgaaattaacagattttttcacatcaccttttcggcgcgtttttcccaaaaacttttgggaaagaagggggtccggcggtgccgataggcgccgccgggggaaatttgaaaattt

SEQ ID NO: 3186 - DNA, 7706 bp, Heterodera glycines
  unsure (1)..(7706): unsure at all n locations
caggacaggccaaatantgcgagaacaactcattgatctttaaagttttgactatttgaaagagcgcacaaaaatattggtctttgatcagaaagttgctaatacaattttaacaaaagctatttacgcttttgttacagttgagtgtgatcagccaacttgcgcattttgacgatgtcagtccccttggtcagtttctgcacaaagcggcaacccaaaccgagcgtagcaactcatttggcttcattaaaattgtgccaaaaacggtagaaatcggcactcactttttactctcatgaaacttgtctatgttttgcagacattttcattgaaattgggccacccaaaagtgcgtgacatcattctgcagcagttgcctatgaacaatgccacacattttatcatgtcggcatgctatgggtcaattgtggcagggatcgtaacttttaatgagcgcagtgccatcggcaaaaccgacatttcaaatgcgaaaagggtctgttgaaaaaggcatagtatttttaaagctgtaaatttgttcaagattgttcgtaagtttctggctgggcctggactgagtccttcggacaaatcattcatctctcatctgaataaatcaatttcgtgcagtgttttcgttgacccttctattggaaattgcttgactgatttggttcgttttaagcgaattgtgttcattttaaaacaattccaatcggatttcgttcaggattttgtcaaaggactcaactcttttgccgataagtgggcggctgctaaagacacaaaacatccgactccgatcagtttttcgttggtcccactgtcttctattggcgacaaaacccgattcaatcccgtctctactcatatgatcggtgatttgtttattcttttgattaatcttaattatccctatgatcagcagatgaacatcagtttgaatggttttgtggccatgtgaaaactgtgaatgaatatgattggttgttgcggaaagtccgtcaatcattgaacgaatgttctgccatgttaacgttagattttggcaatttacagataatttaaaaatttgtttcaggaataacgagctggacgacgctcaagaattttttgaacaattggaagagaggaaaaacattttttacgattcgttgaaagatttcatcgtggatttgcgaatgtgcaaagccgaatctcaaaaagaggccattgtgcaaagggcagtcgatgattatgtacatttctgccaacgtatagttggtcattatgaagagttggtgaaagagaagaaggaaatggtcaacgaattgaagcaaaaaggcaaattctttgggaagatttctcatccaataacctttttgttatttaaggcgtcacttacatcggtcgttccactcgccaaaaattggactcgcgttttgcttttgatgactccaattcttccgtttttcattttattttgttgagaaattcgtctgttccgccggttcaaaatcaacacacttcctttttgctttgccttggcaaactttacgagttagtgtcacgtggaaaatgtacttttgtcgatttggatgttctgcgggatggcgaagaagcgcaggcggacgaaggactgccggaggacattcgctcattgaacggatatccaagctttggaatgcgtctgataaaaatgcgtgggaacaaattgttgtcgaatgattacatggcagaggaggaacggaaattgcaatatccaattgctcgggttcgttaaaacggaggagagggcggcattggctcatggtccaaaattaaaaccaaagagaattcagataatttttaatattttcttgtatatggaggaggaaacgattcattctcgtctccataatttttggtttaaaacctgaaatctattaaggaattaaattataaaattcacgttttttaactattttttaaattgaatttcaaaacaaaaatatttaaatgtttttattgggtttcatttgcgcagattgagaacattcgacgaacagaagttggagcagtgcctgaagctgattccaaagacatccaggcctgcagtttgccgtgccctttatgtgaaggctatggtggaaattgcccgaacactgaccatatgtggatgtgcgatgattgttgcgaagcattaacttttgtgcaaatagaaaaagtaattgttgtttggtaatattagaaaaaaataattactcacaggaacaagcacaaattacgcatttcttttgcgcttgtggaaaaacgccagtggacggattttcttttcgctgttccgatgtggcaaaacatggaactgagttcaagcatttttgctcaaaagtgtcgctggaaaaggaattggatcggttgaacaacaaaggcatgctgacctttttgctgcttggtgagacgggtgttggcaaatcgactctgatcaacgcactcatcgcttacctgaaacatgcgactttgaaagaagcgcttgaggtgaccgagtttattaaatgttgtgtttgtaattggcattatctaaatccaaaataggcgaatgaaattgactgggtgatcccggcccgattttgtacgggtcgttatgacagcaaagggaatcggcaaaggattgaagtgcgactgggcgaggagagcaaggaggagcggcttgaagctggtgaatcgcaaaccaaatggccaaatgcatatgtgattccgtcaaaaggtcgaccaaatagttatttctttcatgatcattagtgacactttcagatgggcacaaagttcgaataatcgacgcgccgggcatcggtgacacaaacggcatcaatgaagacaatatcaattttgacaagacactcaacttcatcagcacactccccgaacttcatgccgtttgcattctgctgcgccccaacagtcctcgcgctacgcccgcaatcagatattgcattgaaggactgctcacgtatttgcacaaaaatgcaaccaacgtaacttcgtagtaattgggagaatgaataaatcaaacactttagaacattgtttttgtgttcaccaacgcacgcgggtccagttatgacatgggcaagttttaactgttaataagaaaatgaatttaatgtttggcaatgattttcaggaaagtccgacgaagtgttggagaaaatactgagccccattgaacgagcgcataatgtttgactttctgtttttttcctcataaaagtgctttattcgctttcccctataaaaaggtgtcaattccactccatcgggaccgaatttactgtgtggacaacgaagcgtatgaggcattgtgtctgatcaaaaagggcggcattgaatacgaccaagaagagaaggacaatttttcgaggagttgggcccatgcagagaaggaatttcggcgactgttcaaacatgtgtccaatttggaaccgcaccgcacgtgggaaaccgtgtcggtcaacgaagcgcgtcgaacgatcatcgatttgtccgaaccgttggcacttatcactgaaaaaattcaggcaaattaccatttagttgtcattttggtgttaattatgcctccttgccatttcagacaaaccttgaccggatcaaaaaatacgaagaggccatcgaactcggagtggagcaggtggaaaaagctcccactcttgaaacaattgaatttgtccatttgccttacccgcgcactgtttgcgccgcggtatgaaaaatagttaaacctaacaacactcacctttgtttttcattggaattacatttcaaaatgtgttcgtgttcatttagacctgttgcacttccatccatcgtacacttactggtgatgtcacgctgtacatgaagcactgtcacgagcattgttacctgcaaaatattactccagaactctttcccaatgagggcttgaaatattgttgggcaatgaatggaacgaacaattgcacggtaaagtaccaaaattccaaatgcttgcttattaacaatttactttaatcgttttaagtttatagaaatttgggttcttgacccgggaacacttccttgcaatgcaattagtgttaaatgtgccatttagtctttttcactcaattcaaaccaatccattttagcagtgtggatgcgagtggagcgtgcacatgcactaccattacgaacaacgccaaaaaaccctcacccttgaggaagtcgaagaaaaactcactgctgcccagcgtgaggggttgtcaacttcggagagcgttcagaagcaaatgttggaagagcgagggaccatctatctaaaggcacttttaaaactaaaaaaaacattttgtcaatgttttaaggccgcacagttttgtgccttcctgaagaaatgggcgctgaagccgtacaacgacagcatggaggcgtacatcaacctgtccattaagcaggcagaaaaagtggtcacggaatgcaaaggggcagcggatgagaagcttcatgaggacaaactggagggacttcgagtcagtccgaacggaaaccaattaaataaattatcgaactgattgactgtttaattaagctaattgaaatttaaggaatctctccgtctctaccgagagcagaaggaactcattgacaatgcaactgcggacgattccgctggaccaactgttataacggcggagaatgtgaagaagttcttcgatgagttgtgcgatttgccagtgtttggtgcagacattcggcaaatgttcgagacaaagcaaaagtcccgacatgagcatcagaaagaatactccgagaagaagaccagtgttggggtgaagttgagaccaacaaaaagtggaaaaggtgaaacggacagacccagatttaattaattctacctgtaattctatccttaattacctaagtcgtccaaccggagcagtgttggaacgaagagcagcgaaaactcttgaaggcctacgagaagaaacaaaaggaaatggaacatttggagcgggaaatggagaataagaatatgctgcaacttcgtaagtagaaagtagagaaagtgtggggaaggcaggcaaaaatggataaactctccgtgaaaatttcaattttttgttttacgaaaacggggatctcggtctatttattttattaatctcatttaagcaactggaaattacgctgcttataaccaaccgtcaacttccagcagttcattttggcgtaagcaattccaaattgtgtttttttagacttccttaatttacagagaggattcccgtgcttaattgggtcagttcgtcttccacgcagaatgggtcgtcatcatatggcacacactcaaccaacagtttcaatttgtcttcaaatttctcttctttgggtggtttggaggatgagcgtggtgtgatgccgaagaacaaacaatggcacaaccaccggggaccgaagtgatcaaagaaagcgacaaatggaggacaaattatattaatgcgaaggagaagagcgggaaaagtgcttttggactctatcattttatgagctttttaaattattaccattttacgaaaatttgacacgttttatcatttatttttattccactgacattttatttcttcattttgttttgctttttggattaaatcagacttctgactgaccctgctttaatcggtccgtttttcctcttccattccgccgtttatctcttttttgtcccttcctcttttttcttgcacttcctcccctttttcctcttgtcatccatccccccccccttctcctcttcatttccacttttttctgctcttgtcattcttatgtccgccgatcagtccaattttttaacaatggacgagacaatgctctttttcctcgtccactcgtctttctctgctcgtccatccaacacaacaattgttttgtcgtctaactgcgacgggaagacggaagagaatggggggggggggggaggcaacccgcacaaacacagagagaaagcggaaaaatggataaactttttttctgggaaattggccaacaatttggagatggatcagcagcagtggacagaaaattagttgagtaaatggccaaaacaggatttaaatgccgacacaatgggctaattaaagcttgcgatgatcattaacccattgatcagagagagagaaagtgattccgaattgatagatgtttttgaattgaactgctagcaaaagcgctgatcagctgcagcgcaaggcatgcgcgaaatgaccccccaccacacaatgctgatcactgatcagcagcattgtttttcccttagcatagatccgatcggatcgtttttattgtgtttgtttgtatttgcaattgcatttcccccccccccttttttccccgctttggtgttgggggcattcagggacaacaaaagttagtggtcgtcccccgccggtcattcgtcccttgcggggacggcccccctcgtccccgtcgttggtggcggcggcagcggacccctccgtccgcccccgtcaattggcggccggcgagtttcggcgggcggagtcgacgacgacggtttttgctgccggtgattgtcccggcgggaataattcgccggccgttggtcgagatttttgagtcccgagagtggcggcggtggcgacagcgcgagaacaatggcggcgccgcgcaaaggcaaaatgaaaggggcggcggaggcgaaggggtggccaatccaacgacgaattgttgtcatcagtgtccgtccgttgaaaaggagtggggcccatgcagcacaaccatcagtttcagcagcagaggaccaccgatcatcggccgaggacgaggcgacgacggacagcgggaaaaatttaaatattttaaaatttagcaatttcattagacgcccctctccccggaattttggcccgagaacgaaacagtattttaaattcccagaaatcatacatccccctgttaattttctaggtttttattcaaaaaatccagcttctaattaacaaattttgggcaataattttccgtattttttgtccaagaaaattctacaaaattttaaggatttttttagttattttttcaaaatcagttaaaagccatcgtatgcttaaggctttaaaggtgatgaataatggcatcgtttgaagggtttttgtacctcgggggaaaactgagaaaaatcgcgtgactatccatccttttttcacggaaaatttcaatttaatttttaattttcaaaattaagcctcaaattaggcaaaaattacgcttctttaaacatataaaaatggagctccatcgcattgacttgttcacacttctcacaacggcatttttgatggtcagcagtccatgtttcagtgatgaattggtttgtttaattaaaatttgaaaatattttttaatttaaaatggtccaccttttaggcttttcctcggcggtcccaacggtctgtcagcggtttctccagcgatgcggcaaaataccgtaacggactgtcctcagtgttttcgttccaaaactcggcccgagaaccgtctgccgggccacggcatgtgcgacagcaggtaaattgaatggcaaaatgccaatcacaacaaaaagctgacaccggcgcgaaacagttttttcgagggtttatctgatcacaggaaccctgggaatttcttnggcttccgtccgctgatgcatttaatcaaattac

SEQ ID NO: 3187 - DNA, 2672 bp, Heterodera glycines
  unsure (1)..(2672): unsure at all n locations
tgggagggagttatccttatttttttggcattctgcagatattgataatgtcccgcatattgttaattgtttgctccaattttggggatggaagggggcataaatcattttaaatttcaattttttgaaatggcttagcccggcaaaatggacggattcggtggcaccgcttccggcgcgattggtagccccaacagcgacgcgggcagcatttattggatgtcaccggacccgaactcgccggacctgcaggcgtggacgggtgcgagcggtggcagtgcggtgggcgccggcgcgccggtgccacagcagcaacaacagcccaccggcgggtgggtactcaaagggcagtgctcggaaatctgatcactataattcggatgatcggaatgatttgaaattgcgtttgggtccgattagaacttggagacagagatattccaatgcattttaaattgagcacgaaattatgatttctagttgccgaaattctttgtgccgtcagaattccgattcccgacattttttcagctgttggaatgccgattttcgattgccaaattttttgagggcgtcggcacacatctccgataggcacacagccgtccactaattgcctaggctatctgacagagaaatttgttgcaaattgatggctatcaaaattcaaatctgtgatcaaaagatccatgtttttggttcagataaggccgtaatcactttgttttgggtctttgtgtgggatccattacagccaaattttgtattgtttaccgtttgccagcactgagtcatttgggagacggtttaagtctaatttgctaccgtaaaccgtttagatagcgtttctaagaattgttaaaattatgaaaagtcgaaatcctttagggctgcttctgtccctggccaagcggttggcggcggcgcgtcatcgccgatgatgaatgccgccgctgtcgcctatggtatccaacaacagcagcttcaacaagcgcaacaatcgctttcggcaccgcaaatgccatcgcaacaagcgcaagcatcggcacaacagcagcagcagccaattggcatggcattggcacagccccaacaacaacaagttcagcaacaacaacaacagcccatgtccatgatgccataccagccgcaggtgggtgcgagtttggcactgaaatgcttcctgaaagtgccggtttatcccttcgaaatcttacccggatttaagccaaccgaatcacgaaaaaacaaattaagtctcggataaatgccaacaatattaaccctttcaaaactttaagctaaaagactgcatttttcccaagggtggtggtgccggtgtctatggctacggtggccaacagggcggctacggtatgggcggcggttacggtagttcttctgctggtggtggccaaatgccggtgtcgccgtactcgtcctacttggagaaacagatcagcacctatccgtaatgcctgatcagcaagttctgatcaatcaaattcatttttanatattaaaatttattagtagggcatttaaataattttaaaaaaattcattagtaatttttaaaattaaattccattagcattatgatttacaccctcaacgagtgcattccgtgccaacgtgccaagcatttgcttgctgtccactacccggacgtgcgtgcccactacttggagctgtccggcaacgaagcgtggcaacagcaactgcaaatagacctacagtacctgaccggggtaaggcccacaaaaaatactgtgccgaaaatcagagaccagagcttaggcaaggataaatctatttgttagagataggtatcttgaaaaaaaagcctgggcctcggctgaacctaggttccatcttagatatgggtctgggtttccgggacaaaaacccagtaaaacttaggtccaggaaaaatttaggttaccaaaaaatggcccggacctgggtttgatcttagacatgggcctggatttccgggacaaaaacccaggaaaacccaggtccagaaaaaatccaggcctggctccgggtccaggccgacctctactatttatgcagatgtaaatttaatagcataatttttaaaataaatttaatccaataatttgaaatgatttttataaattttaatattatttcatttcaggccatcactttcccttacattttcgtttgtggccaatacattggaggtgataattaattttagaattttttttttagaaaattcccaattttttcaggtgccactgaactttttgaactgcacgagagtggccaattgcggcgaatggtcgcccaatgtctgaagacggcaccaccgaaatgaatgtggattcgaatcggcgcgcttattgttaaattatttggcattttgtccgatcgaatttttgcaaaatttgcacaaacacaaaacttttcctttttctggagaacaacaaccttattgtacattttgtgtgtttattattgcatttccattaaaattttgatcaaaatcttttcaattattttataaaattttgatagtttacagtaaaatattgcagatttaatttctggcgctactttaaacaggatgaagtaaatgttgttttttacataattaaaaaggagagatagtacgccaaagagagagaaattacaatgaa

SEQ ID NO: 3188 - DNA, 2987 bp, Heterodera glycines
  unsure (1)..(2987): unsure at all n locations
tattgcagatttgtttatctttactcaacaatttgcggtttaataattaaagacgctaaaaaatggcacaacagcaagcgataacgaagaagcgtaaagctgtgcaagacggaattttcaaggccgaattaaacaactttctcatgaaggttttaactttttaagaaattttgtttttataataaatttgttggataattcaaatatttttaaaaaccgttatattctttcaaaaaataaccattatggcaatttaggagttggccgaggacggttattccggtgtcgaagtgcgtcgtgcaccttcccgtactgaagtgatcatcatggcgacgcgcacccaaagtgtgctcggcgagcgcggcaagcgcatccgcgaactgaccgcactcgtgcagaagcggtttggctattccgctggacaaattgaggtttctctacttcattttgtgttatttaatttttcttacaaactaaattagttttgtgacttaacaacagcaattttatttgaaagggctttaatttcgaaaattaatcccatttggattgcatctaaaaaacgtttcatctagtgctatttctttgtttttattcccgaaaatacatcagatttaacttaaacataaagtgactgcaataatctctttgtatcctttttagctctatgccgagaaagtgtccagccgtgggctttgtgcggtggcccaatgcgagtcattgcgttacaaagtgagtaaaaagttcaatttcgaatgaaacatttgtgtagatgaaccagacctatatactctatacacttttccggattccacctcgaatattataagtcctttctaaaaaatcagttggtcggtgggctcgccgtgcgtcgtgcgtgctacggtgtgctgcgcttcatcatggaaagtaatgcccgtgggtgcgaaattgtggtcagcggcaagttgcgcggtcagcgtgccaaggcgatgaagtttgtggacggagtgatgatccattcgggtaacccggtcaccgagtacatccaagaggcggttcgccacgtgcaaatgcgacagggtttgtgttttaaaatatggaaaaatattttgggatctatttgaaagatcgattaaaagggttttcgggtaccaaaaatacttttgagttagtttccaatgccatgcgatcccatttttctatttttttcgcctctttgttcaggcgttttgggcatcaaagtgaagatcatgttgccgcacgaccccaagggacagatgggaccgcgcaatccgttgcccgaccacatccaggtacaatattctacaaaaactgacacacggaaccgcataactcgggatggatacaaacccgaggatttatttttagaaaaaaaaactccatacctttagattagagaaggacggagaatttgctattaaaaatctaaaattctgggtttcctagacaaaaataaagttttgatactttttcctaaaattgttccttttccatgacaggtcaaagagccaccgattgacgtcgcgccgaccacgccgtactcggagcaccgcgaaccgatgaccactggcatgccgccccagacacaaatgccgcccgcccatcagcagcagcagccgatggttggccaagtgccgtccccggcacnagttttattgtgagaaagaaccgctgatgaatggtcatgatggaggaaggggagatgttcaattaaaattgttatttgttttttttacttttttttttttgctgttgaaacgcatcgtaaatggaattgctaatgaattttggaacaaaacctttggggttaaaaagtaattaattgtgcccgtgatttagcgtcttttgcccatgattagcaaataataaagtagatttagaaatatttacttcaaacaaaaaataaacaggcagtgaaacaaaaaggcatttttcagttaaagtggtcaaaaaaagatttaaaaatgtttttagcaacctacccatatacacgttgcatgagacatgtacacattcataagttacatatttgtacaatatgtaacccattatgtgtacatgtgccatgcaacgtgtacacaggcaaaaccaccaaaagaaatttcgatttttgaccaccctaactgaaaatttcacaactttttttcgtgctattagaaaataacaattttagtttatgttctgtttcagccactcataaacagattccattgaatatctttcgctgctcctcacgctccaaacgttatttcatcagagttgccaaatcgaacacgaattcgggtccaaagttcgcctcaatttcgtcaccagattcaagcaaagtaacgaatggaaagaggaacgcacaatcagcagatagagaaatcgaaaatgcagttgaatcttaacaaatgaagaattaaaataattgtattatttaaatttgcacaaaatttctaagtttgagaatttttagttattcccggctgtgtttcaatgtattttaaagcagtgattacaaataaccatttttttttgtttaccaacccaaacaaagtccattcctcgtgaaaaacaattccctgtttgccaggacaccacatccgaccgtgtgaccagttgcgaaggcatttgtgggatttgcgaaggtcttggtaccgtcgacataaaatttgcccttgcttccatacgcgtaagcagtcgcttcagaaaaaaatgacccagcaagatttctcgtattttttatggcaaatccaaagcaggcggtactgaaaaagagcaaaatgatggaaataaataatcaatacagtaaaaaatatccgaattgtattcgaatatataaaaatataatgaataaatacgcctgccggttcatttttatgatggaaatctcaaaataaaaaaggacagatgaagaaggaacggccgccaatatggaatgtttggcaaagacagtgcggtcaccaccttgaagaaagattgagatttaaacattattaaat

SEQ ID NO: 3189 - DNA, 866 bp, Heterodera glycines
attcatcgctttgcatttcttttttgtcagagtccgtccatttcgatctgctcccccgaataattcccaccgattttccctccgcgttgggttggtgggacgagcagcagcagcggacacttgcggaagaagtcgcgtcgacgagtggtgagagggagagaaagaaaggcaaacgaagcagcaaattgtcggcatggacttacacacttttttaggtgcgttagcgacggaagtcgccaactttctgccgccctatctgttcagccgttacaacactccgtccaaattcatgttgcgcggcgacgtggaacgatgggtgaaaaagccgacagagatcggacacgggaaaagtccgttcttcaattagtttatttattttttaataaaataatttgcaggtcttcgcattgaacggaaagcgctgaccatcacagtgaatgcaaatgatccttttccggaagcaccgagtgaaaaagcagtgcacgacgtgaatctgaggtggaccaatgggggaggggggggggggatggggaaatatagtacctcgagcataaattgcaagccgaatctctaatactgtaaatacctctgatttgacaaaagaatgatgcttcgacgggatatgatttgttgagaaaattctgccgtttcagatggaatccctaatccaaatttgtcgttgtgtttcattcgtttctccaattcaaccccccaaaatctaagctttgtccgttacgtgaacagatgcaaaaaccccgagatgcatcaaatgctggtcgaactgttcgcggaacgacccctctggtcacgcattgccatcagttaccgcacccgactcactgagaatgcgctaaagtgcggttaat

SEQ ID NO: 3190 - DNA, 4866 bp, Heterodera glycines
ctatcagtcaattatggtgtcatttaacacaaatcaggtgaaacacctgaacggacagattcattgtccaacatttcatatttataatcatccaaatgaattgtccatttgtttgggaaatgtttgcatttttgccagtacattccggagagatcgcgtctcaaggcatcgtcgacgccttccgttgggacgcaacagacgggccaattctttgattatttgtaccggtcaagtgggttaacattgggagaccctttatccgcttcacctttctctcccagaaatgcttccttcgcttcgtcaaatgtggtactgtgtgtgcgatgtgcagctgccaatcgcgcagaaaatttgtcggaaagattttttggaaacgctgaaggaatgcgacccggcaaatggatggcttcccgcggtactttcaccaaaccatgtcaatttgggccataactttcagggccgaattgatgccatccgatcggcgatcaaaaaggacgttgagaaaagttcggcaagaatgggcgatgacgaattcgatgaggatgttggcggaccaatgggcgctgggggcggtgctgcggaagacgaaagtgtcgctttgggggacgaggaccgagaggacatgatgctgctggacgagttggccatggaggaggaggaaacggaggaggacgagacggtggacaccggcgaagaggacgaactgatgttatttgaaggggccaagaaataccgataaaactgcactcattttgacttttttttattcaaaaataagtaaaaaataactcaaattattcgttgccgaatttatctcatcattttaatcactcccgattagtgtacatataagtctcaccggaataaacagcagcctttttcgtcagtttgaattacatgtaaaaaatcctaatgcgtcgtttttcagttgaatggggtcacaagccaaacaaacgatcattttctgttgtgttttggcttatttcgtcatcccttttatgcgttttaaatcgttgagcaataaatccctaaatccccccggcgcatcactctgttggtaaaatgtttcactccgtcgtctcccaaaatgtgctctgttcggcgcttcgtcttctgttccctttgcttttttgctgatgtctttttcgcttttgaattggctctgttcgctaacaatggctgttattcccacgatgttatggtctgtcttctttttggtctctctctctaattaatacaaaatcaaaattcgttacccactaattggcccgctaattaagctgcgtgaggttggcgagtcctttgaagcgatgcttcgtgccggttccatccaaaggcgcactgacttctgcgcattgtcttcccctctttgtgccgatgcttccgccgtttgtgctgtttggccctctccgtcggcctctgtccaccgtatccattgggtacagttgttcatgtacgacttcggcttcggactgcgcacgccgccccattggaacggtgtggtgatggaaagtgcacaaacggacggtcggttgagaaaatggcacaatgaagcgatgggagcggaagagtttcccattcattcagcggacagtcggccattcatggaaagaggcagccgactgttgtgggaagtgaccgtcccgttggaccatgtcagtgggaaacagccgggtggaaagtggggacaaattgggggataaatggccaaattaaggggacagaataagggatcaaacggggcaattaggggaaactgctgccatacatttgagtcccataaagaatcggccgtggaattggcgaggcgcgctctttctgtacgaaatgatacggcgaaatcagcaaaactgtgaacacttcgtgagaagtgcccagtaccgagcatttctgagcaacaaccgcgtcgatttggtggtggtcgaccattttttgcaggtccatcccaacggcactttcacatttcaattcattcaaattaattctccgtaaaataatatttaaaaataaaagataattttattcacaaatgctttttgggaatgtttcaccgtggcggcctttctactcaatgcttcggcgaccattcgcttctccaattggcccattgcggacggttacatcgcttctctgaacattccggcaccgccctcagcttatccgaagacgagcaccgccttttcagcccgaggcaattctcggggaattgcctatttttatgtaaaggcattcaaatgcccgattaatcccaattttccgtgccattgccattcccccccccccctcagaaatgcattcgttttctgtacgacttcgcaattcgcttttccatgcgctcatttcgctcgtccgtttccttcagcgtcaaatgatcgcgcgatttttcgcttccctcgaaattttttacggtcaccgcggagtacggctcgaacaggccgaggcggcacaccttttctacgcaggccgtgccgaattcatagcggagccaattcgaccgattagcaatcgcatcaaacactttggttgcgcgaaatgtcaaagcgaaacacggaagatgggccaaagcaaaggcaggggaattggcacgaagaaaagtgaacaatctgaaaaaggacaaaagttgagctggccaaatccgacaacaaaagcagcagcatggaggggagaagctgcttttggatgcaaaaacgccacaaattcagacggacaaagggccaaattagaccggaatttggtgtcagtctcccccaatatccgccaacaatttccgcggatcgattgggaagaaattgagagaagccctttcgtattggtcagcttcggaagcattgcgaaggtcccaaaaataaatcccattaaacattgagaaatgccttttaagctcgagtttatgcccgaggaattattccgctcatttctccgcgccttttcaaattttccttccatcatttttctttggcagacaaacagtgagacaaatgccattttagctgacaaaaagtgccaaaatctgcctaaaaatattcggtttgtccggtgggctccaatcaaaattttgctgggtaaaaaggaaatcgcagtttggcttcgattgtcccttatgacgttggcttaagctcatcccaatttgcattatgccattttgcacggcggcgtgaacacagtgaatgaggcgctgatttacggcggcagaccaattatgggccttccgcttcaggtgaatgacttttcttggaaaagacataaaaaaaagccaaaaatactataaaactttgctctttcagggcgaccaaccctcaaatttgcaacgattggtcgacttgggcatggccgttcaattggacattggccaagtgtgggccggacaactcaacgccaaaatggcattaattgagcacaattatgtcgcgttcagcagaagagcacaacaaataagtgccatggtcagaacatatcgcaatggcattggcgctgtacaacaggtgggtgctgtgatggcagaaatgggacaaactaatggaaagtgacagggaaacgcgttactgacaaatgagtcataaattgctatgggaacaaatttacagtaatccatttacggtatgtttgaaattgaattgaattaattctaattatcaaattctaaaagctaaattgatgaaatagcaaggtttctatacaatttagccttttaacttaaaaaagtactgtataactgacgcattttgctggaacccatgggagaacctccaagaaaacggccaggctcaatcgattagacattcggaaagggccgtgggttcgagtcccattgggtgcgtaccttttaggttccacacagatttggccacttcattaattttaatttgagaataagtcaattttatttgattaatcattcatcacattcttagaacttttggctccaatgggcagcaaataagccctttctgaagcgcagtgctcacaaattcttccatctccgttatcgttcatccgttgaacattttgcattggcggaattgggcacggcattggcatttttgttcgcaatttttatgtttttgtcatcataataaacaaaccttaaaataaatatttacaaatattacaaagcaaataaataaaaaacatctgtttttcatatccattcattccattctttcgtgagaatggtggtgattccctattttgctgctgataaattgtctctccgaccaatgaatggtaatcaaattaacaaattagtctattcggtgttatgtgtttatcgatatttaccaatctcttcattagtaatgcgcaggaaatgcctttaattacttattgttagtaattgactaatttgtgcattccgtttaacattatttttgtcaataattaattcattcattcatcttctttacaattcctcacatttcaaattgccttggtcttggattaatttaatgccttttttacacttgaaattcaaaacaaaaacaataacatttaaaactctttggtgcctaaatcaccagctctaccaaaatgaccttaacgatggatgaactgagaaacaaagtccaaaatggccaaattagcaccgttgtcgttggttggcccatttcaatttaaaataaaatatttgacactcctttttcactccgaaggctctgtcgatttgcacgggcgactgattgggaagcgattgacggcacggcattttgttgaaatggcgcaaaaaaaggacaaaatgtccatgtgctattatttccttgcgatgacaattgaaggtggcaatgttaaaaattattgtcaattgttccattcattgccaatgttaggccacgtggccgaagggttcgaagtcgcgcggtgggaaaaacg

SEQ ID NO: 3191 - DNA, 3609 bp, Heterodera glycines
aattcgtacaagcgactgcagccgaacaggtctaagcggagacggcatttagacgatttacgagatcaaaaagaaaagggaaacattttaagttgggcaccaacaaaaatttgttggactgtcgacaatcggacgagttcgttccgtttgtgcggccaaagttcgtccaacgttcacatcgaatgtcgtattggtggggccgacctcaacccgtacttggcattcgccgcactgatcgcagcgggcattgcgggcattgaagaaggtggggaaaggaaagcattttcggcatcgaacaacgaacactgtcaaaaaagggttggaattgccaaaggccgttgcctgcaatgtctacgcttcggccgatgccattcccgaattgccgaaaagtctgcgaattgcggcggaacttatggccaattcggaaatgttgaaaagagcgttgggttggtggttctttcgtttttattagcacattaaattattttaaggtgaaaatgttttacgacactacaaaaattcggcacgcattgaattggaggactttgaaaaggaagtgaccgattgggagctgagaagggcatttgacagatgttgaagacggacggacggacggacggaagaatgccccggggggaaagaattaaaataaataattgatcaaaaaaataatcatttgtaaaattacactttattattatatttgcattggcaaaggcaactaatcagctgaataaaatagcataaaccaatgacaattttgacaaaaacatccgcttataaaattagctgttaaatatttaaattaatgaattttaaaggaataaaaatacctaacaatttttcacttataatttattctactttttgaccattggctttctgctttttaaaaactctttgttcggcctatatttaacagctgttctcgcccaaagtgccatttgatgggacaaccgaaagaatgaagacgccacggagagaagaattaaatccaatcgatggacggggaaaagtgcccaaaagcgatgagaaaatccgaaattaattcaatttaatttgcttatatgtttttgttgttttttaggccaaatcacattttaaatggaaatatatttcacttttgtcccattgctttgcttttcgcttcttttaatgctttatcccttctcggccaagggcaatcgcagaagcgaagaccaactttatgaggatttattgtgggcaaaatgcgaaaaaattaaatagtttttttctcgaaggtatttttacaacaaaaacgtacggcccgtgaaaaatagcacgcaaattttggaagtgaaattcggcgcctctttgatcagaatcatcgacgtggtgaggaggaaaagtgatcagaaaaaagaaaaactaatcaatcgcaggacgaggtcaaccaagtgctcaccacgtcactgtggcttgagatggtcaaaaaggggcaattaccaattcggacattattaatgactaattaggcccataattaatgaccatttattcgcttctctctttcagcaatggttcgactacaaacttgtctggtgagagggaatcaatttttttttcttcttaattcaattgccaggaatccggccaaatttaatggcatcaaaaaattgtacattccctcggaccaaatttggaccccggacattctcctgtacaataagtacagtaattgtctcactaattgaccttacgtggaattccttcctttgaagtgccgacggagagccgcacatttccattgtgtccgatgcgatcgtttattatacgggtctcgtcgtgtggaaaccgccgagcatttacaaatcattttgcgcggtacgtttggttgacatccattggctttttgggctgccaaagggacccaaaaagttttgttcagatagaaattgaatactttccgttcgatacccaagaatgcatgatgaaattcggcggatggacttacaacggatttctgatgaacatctcccaaattccggttacattttcctaaaattcactccgggataagcttttattcccagccgcgcccagaagacgtgatcgagaatcgccattatccggatgggcgggaatacaaatacttggccttgggcatggacctgtccgcctatcacgcgtaccttttggcattcccacgaaaaatcattggacctttgaaaggagtttggagtgggatttgatgtccgtgacgagccgacggcacgagcagctttaccctggctgttgtgggcaggtgaacgaacaacagcaaaatgttgtgacacgaccaccttcgttcatttcaaggacaaatacattgacattactttcgcgttgggccttcgccgtaaaacgcttttctacgccgtcaatttggtcaccccgtgcatgctaatcggtacttaattgctgaccaaaaggccccctgattaatttgctgcccaattaatcccaccaattagccattttgactgttttcgtcttctatatccccgcttgtgagcacaaaatgacttattccagtacgttttggaaaatcaaaaggccattgtatcatttcgcccctaaccgtcgttcagtttccgtgttggtcactctcaccgttttctatttgattctgattgaactgatccctcccacttcgatggttatccctctgatcgggcgctatttgcttttcaccatgttcctcgtctcgttttcaattgcgatttctgtcgttacgctgaacttccatcgaaggtacttcagtgtgtcagtgatcactgatcagtgatcggggttgatcactgatcgtcccactcattaactgccgatctcactttctcaagggatggtactttgcacacaatgccccgatggatttaccgcgtgttcatccgcttccttcccaaacttcttttgatgacccctccggtggatgatgatgcccaatcggataatgacgaaagcaccagcatttcgggtagtttgcaaatgccgctttatttgtccaattcgttagacattcaaccgccctatggcaatgccaactccgacaacaatttcggctgctacgcccattcctaccgaagcagcggccctttcttggcacattcgtgtcgctctcgacgaagcattcccgccgcgggcatccgtctgtcgcaaacagcgcaagtgaaaggaatgagtgcggaagtgctgcgacggatggcggacaatgtttactttgtggccgaatatttccgagcaaagcagcaaagggacaaggcgagtgggacaacacaccaaatagccgtccccatgcccccgggggttctctccctccccctaatgctccatcgtctctccgggaggagcgggggtggatgacatgacgtgctgttacagctgctttctgttttgtcctatgctttctgtgctgtttaggtctctgaaaattggtcctacgtggccatggtgcttgatcgcctccttctgatcgttttctccacctctctcttcatcggcacccttctcattctttccagttcgcctcccgcaaaaagcgaatggggcgaacccctgagcacaatgccaacgacaaaaccactcagtggagacactttcgaattcgaa

SEQ ID NO: 3192 - DNA, 1112 bp, Heterodera glycines
  unsure (1)..(1112): unsure at all n locations
agtacgggctgtttttctcagaggacggagatgtggtggtatttagtgacttttgnacatnttatttgaatttttatatttgtttggcataatgttttttcgaatttggccaatttgttttcgtttttctttagtgcagtcgggacacttttgttgttgtttttgttggtggtaattcggtttttcatgaatatggactgttttcgacccgagtcgcctaatctgccgaatatttgctccgatgggaatttaatactggatgaccaattgactcaacatcattcgtcgcctttcaaaaccggtcttccgtctcacaaattcgttaacttagctaatttattccgatttcagatgccgtaaatatcattcgagagtcatttgaattggcccaacaaatggacacaccgaatcccattacatttgactgcgtagaaagcgaaacacttgcggaagaaggcatacaacagagaatagctgtgaaagaaagtaagtcgtgaaatggcacttgcactgggggggggcgaccagggacgggcgaattccgaatgcttaatagacttcgagcttcgtgaaaatgtcgaaacttctaattacagacccaatgatgggcttaattttttcgaattaaaaaagctggctgaaaattaacaaatgcaagtatacttaaaaaaatttctcgacgttgcctcgggctttgtttcgagcttcatcttcgagtgctaaaacacccgggtaatcctttagaattggtgtacctacggaaaagataaattttctttacacatttctagggtaaaaaattagctgataactaatctgagtttagaaacgaaatctttgatttgtctattttttctaccaatacttgaatttttcaaaatcttaatttttcttaaaatttactggcggtaaaccccatattttatgatgtagaacttaataacttctaagaaaaaaaatttttcgagaaatttttatggtgaattactaagatttttcaaaaaaatttccaaaaaatcgctgagaatttctcgaaaaaatttttttcttgaaaattttcttatgaaaaacctttctaagattattttcttgaaagatttctaagatagcaa

SEQ ID NO: 3193 - DNA, 4663 bp, Heterodera glycines
gcagaattttattcaaagtttgtattttgtagcattcctccttgagtttttgttcggcactctaaaaaaattgtattctttagcatttaaatgatcattatgcaaaaaattattctgcatggaccataaaaaatgatcagctttaacgccgaacgcctatttcgtgttttgtagcatgtaaatgatcacttttgtttggcacttttcaaatgttatattttatagcatttaaatgatcattttttgttcggcacttttctaatcaaatatttgtattttgtttctgatcttcttatccagtttgtagttgtcaaaaagacatcaaattgcataaactacaaagaaataggcccaatatcataagaaaatggcatggattatgcatatgctatcaataaaataataaatggcaataaaaaaaaaaatgaaatatttttataatacaaatacctaataattagggactcctttttttccttttttttgcctatttcaaggtttttgtgcctaatgtgcccaattgatccagaaaatttaatattttttcttaaaaaatttttggaatttaaaatatttaataatttcatttacaactgaaaatttttatgtgttttgctacctaaaaagcgttaacaaaaaattttatttgcctatttttgcctatttgaggatttttgtgcctatttagtgcctattttgcagtttttttctgcctttttagttgcctatttcgcgattttttgtgcctaaaaatggagtccctactaataatccttaaccactatgataacggatttttcttcgaaaatagagcgagttaaacacgtaaaaacccttaaaatttaaaggaactttaggtcaagcgattctaagatttatttaatactaatttttaaaaattacaaaatttttattttttgctgccagatttgtagtagagaccggccaactgggaccggaaggatttcgagtcgggacccagactaaatcccggccccgatcaaccccgaagaatttttaaattttgttgggtttaattgatcattttttgttcggcacttttctaatcaaatattgtattttgtatgtagtatatgaataaactataaaggaattctcgtggatgtaaatccattattttttttatgtataagcaaagtgcaaagtaaaatgaatatgcttattattaaatgaatttgatcaataaaaataatcaaattgaaataaaagtgctctgttcactgcttctaatcagtcagtctttccggtcgccccacttctctttgggcatgttaataatatctgatcataaatgttgatatttctgatcgcatttcttccatcattttgtttaattgtgcaaataaatttaagcatttggtttctgatcaatcacctgtcagcaatttttccgatcactttacggccactttctaatgctcactcccattgtgctttattcatcagtattttctttatgatcaattacttaattttttgaacaaaatgtttcaattatctttatgatcgcgcatcatcaccccaatttccgatcatttacttactagtcagttgagttaattccaacaaaaaatcatctatttattgcgtttaatctaacttactcactcattaaacggcttcaccttggcctccaaaaagtaaactaattgttaattgacccccgaaaagcgggaaaatatttttttgaatgaaattcgacactgaatttccacacaaaaaataactgtccaagaaatgattttgagaatcaaatttcttcacttttactgatcagtcgaatgtatacaaaaatgggggggggggagatcccttaaaaatcaaattgaaaaagaagtgcatccttgaaagaaaagtaaagccaaaaaggaaaaaaaggagttggtgtttgatacgaccgccggaaaaacatttgttggcatttctttggggggcgattggacaatcaatcgtaaaaaattccattattcttttatgatgaaaatatatataatacaatagttagaaataatgattttctgtatctgggaatttttcggtcattcaaaccactgctttttgaagggtaattaaattttttgaaattttataccattacgcttacgaataatatcaatggaaattaggaggatggccggccgagaatcagttgacctcggttttaacttttcactttccatcatcttcatggtgacaccttcacttcctcgtacaataaaaatttacaaaatatttgtattatgtagcatttaaatgatcactgcaaaatgaatacattggattgatcaaaaaagtaatagaattgcaataaaaaaaatatttttataccattgaaaaaaccattaaacacaatcaatctagacagtccttaacaaaaatttatgaaatttatttttaaattgatatttgttatcaaaaataattttgaatatttgaaaaaattgcactttcatggccctgagctgatcattaagagtgtattttttggcctgagacccgtccaaaaatcttcgggtaggatttcgggatccgggacgagaaacacatcgcattcttaggcttaggtctgcttgggcctatgcttagactttatattgtaaaatttttattgtagagttaccattcactttgaaaaagatggcattggagaaggtggtgccaacaccgttaatgttgacggaatttgatctttgcatgcaatttaaaaaagagataagtgctggtcaccatgaagattttgcagtttttttctctgtctccatatttctctcagcataatgggaaaggaatgaatgattctctttttctcattccgcacacactctttcgcctccttccccatctcatacttcttttcctctccgtcacacacactatttcccctctttgcatcaatatctctgctcctccctatgtaccaatatgcaaacccataaattttcttttaattaatttccattttagttgcatattttgctgtctgttcatcgcttctcggccttttggctaagatcaaagtgtagttacagttctttacggcttaatctccgtaacggcccttaccgggtcaaagagattaaccaatttttgggaattggtcgttgcagggggcttgctccctctcggctgtgcgttggcccgttattgcacttgcttacgggaacggcgcgtctcccctgcgggggagaacaaaattattttgtaattcttcaatccaaatttctcttttgaatagctgtgtgatcaaaaataaaaaagcgcatgcaaatgaaatttttatactggcttaggtttctggcctttcatttggctaaatttaaatttttcctaaattttcttttgcacaatttatcggatagtcggcgtcggcgagtccgtgttatcggcgataaatcaatttttcctgttttcactttttatctaggtatagcaaaaattaaatttcgtttaaaaattttaaatttttttctaaaatgttcttcagaatttttatacgatttatcggcgagtcggccatggcgagtcagcgtcggcgagttgaattgttccggtttttaggtgctaaaaactgccccaatagttcgtttttaggttctaaaaacccccaaaaaataggtgctcgaaatgggaaaataggttgccaaaaagtttcaggtttaggggttgtaaaagcataaaattttatccaaaaagcaacaaaattaagccaaagagaaaaaattagaaaaaacaaaaaaaaaaaatttaaatcaaaaaaattatacagtaacccataactgatatttaaattttacataagcaccgagccgaaataaactcttttttttctttgctaactcacttcgaaatgagtcaaaaaatcaataaaggttccaaaaaaatcttacggcgccgcctctcggtaccgcgaacccccaaaaactactaacttttcatgaaaacgatccaaaatagtaaaaagcaaaaaaaaaaaaaacggatttggttcggggcggaaccctaattcaaagaaagttgcaaacgaaataatcaaccattacttcattaatcttatctttttttggcaattgcctacaaattttacaacgctcggggtccccgactaagtgtcgaagcgggggggggggatgttgtcgggatcgggaaattggccgaaaaatgtcggggtaggggtagaaccacatttgagagtgcattatcgatgctgtttacacggtttcggtgggcgaaacggattttgtttacaatttgaagtgccggatcgcaaatgccactggtctcatgccggaggaccaaacaattactgttcgtaattgtgttgtccttaataggggtgacgcaacaatgaaggattacggcattgaaaacaacacagaacttcacgtgacggataaccggcggcctcagtcgagcaaaaaacgtggtataaaggggaaggtgttgaacttgtttggtctccccaaaagtggatgaaaacaacagaggcagaagcagcagcagcgaaagatgatgctgatgaacacctttcacgcccgttgctaaacgagtcattaacactcattaggtggttgtttttttttgtcaatttttttttggatttcagtatgttttttcattggttcagttcactcactgtccattt

SEQ ID NO: 3194 - DNA, 1885 bp, Heterodera glycines
acggccccaggcccggacggcatccgttactcagtttggaaaaagtatgaccaaggagcacatgtcctgacgtctatctacaactgtgtcaaaagagctcaacacatcccccgaaattggaccaaatcagtcactgttctgctccataaaaaaggagaccgaaatgaagtgtcaaattggcgaccaattgcactttcaaataccatcggaaagttatactcttcagttttggcaaaccgattggcaatgtggtcggttgctttcaaccgagtcagttcgtcccaaaaaggttttatgcctgtggacggttgtgccgaacacaattttgtactccaatcgatcatccaggacgccaaacgtgccaaaaaacgatgctcaattgcgtggttggatttgaccaatgcatttggttcaattccccaccaaacgattttcacagcactaaaatggtctggactatctgaccaatcgatcagtgttgttcgacagttatatgccacgaattccactcaaattcggcattcaaacggcctcactcccgaaattccaattcgagcgggagtaaagcaaggatgcccgctcagtccaatcatttttaacctcggaatagagcccatcctccgcaccattggccaactcagaactggctataagttgcaagaaaaacgcattgatgtgttggcttatgccgacgatctcgtccttgtagctgagtcgcccgaagaactgcagaaaatgttggacgccacctcaacaatagcaacttgggctggactttccttcaatgcccgaaaatgcgcgacgctggacatcgatgggcgaagaaaaacagcattgaacacaaaattttccattcaaaatgctcacccgcccatcctaacaatttatcaattctatgaccatcttggcgttccaacgggctatggttcagcccaatcagcgaccaaaatcctagaaaaaatgaatgaccatgttcaaaaaatcgatgcgtctcttttaacaccgtggcaaaaatttgacgcaataaatactttcgtccttccgtgcattggtttccatcttaaaaatggtgtggtgcaaaagaacccattaaatgcactggacaagaaaatccgcaattacggcaaaaaatggcttaatttgccacaaagagctagtactgagcccctttatctcagccatgccatgggtgggatggggatgataccactcaatttgcttgccgacataagccaaattgtccacgcttatcgtcttatcacttcacgtgatttgtcctctttgtcaatggatttgatcaaaaccgtggtcaacaaacggattcgacaacagccgactcatcaacaaattgccgaatatctaaacggctcgatgaaaggccttttccggcagtttgagtcgacggacatctcctcaaattggacacgcgtcaggcaggcaaccgcccggctgaactccaaattaaaaattgaatggaaatggtcaacgaatgaagagcgattggcactcgaactcaacaatgacccgctcaatccaaaaaccgcggaatattgtttgagagctgccattcgcgatttcttccgccgtcgtctgctctccaagcccgatcagggcaaagttttttcaatcacaagcgcaacaaccgcttcgaatcactttatgaaggccggcaacttcacgcgattcgccgattggcgatttgttcaccgcgcccgattggactgtgttccgctgaatgcaacgcgtcgattcggccacggagacaaacactgcccgccgctgtcacgatggacaattggaaaccctcccacatgtcctttgccattgttggccacatcttggaaagggaatcacgcgtcggcacaatggcatcctcgaccgcctt

SEQ ID NO: 3195 - DNA, 1311 bp, Heterodera glycines
gcatgggggttgctccccctcggctgtgcgttggcccgttattccccctgcttgcgggaacggcgcgtttcccctgcgggggagaacaaaatttttttgtaattcttcaatcccaaatttctcttttgaattgctgtgtgatcaaaaataaaaaagcgcatgcaaatgaaatttttatactggcttaggtttctggcctttcatttggctaaatttaaatttttcctaaattttcttttgcacaatttatcggatagtcggcgtcggcgagtccgtgttatcggcgataaatcaatttttcctgttttcactttttatctaggtatagcaaaaattaaatttcgaataaaaattttaaatttttttctaaaatgttcttcagaattttttatacgatttatcggcgagtcggccatggcgagtcagcgtcggcgagttgaattgttccggtttttaggtgctaaaaaccccccaaaataggtgctcgaaatgggaaaataggttgccaaaaagtttcaggtttaggggttgtaaaagcataaaattttatccaaaaagcaacaaaattaagccaaagagaaaaaattagaaaaaacaaaaaaaaaaatttaaatcaaaaaaattagaaaaaaaaaccaattaaaaaatctcttaatttaaaagaagaaaaaattaaagatataatagaaaagcttaattgtattgagaaaaacatttgttttcgtgcatttcagaccatatggaggagctcaggaaaaagataggtaaaaactaaaaatatcatcccaattggttggatgttcaaaatgccacagagcttatgttggttgtaatgcacacaaatgtctaattatcccccatgggggattatttttcaactccctcagaaaggggggggggataattggagactggtagattaatggagattgggagataatttgagaaatacagtaacccataactgatatttaaattttacataagcaccgagcaaaataaactcttttttttctttgctaactcacttcgaaatggatcaaaaatcaataaaggttccaaaaaaaattttacggcgccgcctctcggtaccgcgaacccccaaaaactactaacttttcatgaaaacgatccaaaatagtaaaaagcaaaaaaaaaaaaacggttttgcttcggggcggaaccctaattcaaagaaagttgcaaacgaaataatcaaccattacttcattaatcttatcttttttttggcaattgcctacaaattttacacgctcggggtccccgactaagtgtcggggcggggggggg

SEQ ID NO: 3196 - DNA, 3204 bp, Heterodera glycines
tagtcgcctacctttatcactttgattatctctcctcgctcattctgataaacctattctccaatcactctgctgatcaaatttcctcagatccgatctgatcgtctctccccgctcatttgggtaaccctctactcctacctgatcactttgctcattctcccacatcagtcgaatcatcggacggaaaataataaaattattattattaatattttataaaattctacaaattttagaagaagaaaaattgtaaagcttggaaaaagacaataaaaatttatttaattgttattaatcttatgacgttaaaatattaatgaatgaaaaattggcatacacttgatccctcggattgactttatccaatttgggacgaatcttaaaaatcaggacatttaatccctcggattgctttcccaattcaggacgaatcttaaaaatcagaacatgttaataatctttaagaatgcctttatccaattcaggattaaaatcttaaaaatcagtacttttctgccccataaaaggcatgtcttggcaagtgctaattcacatttcccactttcattcattcattccatattttttcctctccaatccttcccttttttgccaccaattctcctccaatgaagaagcatgggaacctttttcctttcccagttggcattgctgctgggctgacaattctaatgctaatgatgccaccaaccattgctgaaaagattgatattaaatttagaatagcttacaacggcgaagagtacgccattaaagtggaaggaagccacgaataacgttgaaagtttgatgcgcgcgacaggaacttacaacattaagccaaatcaaagtatatgtagggtggcaaaagacgtctaaaaatttttcattgagatacagagaaggttttaacgagcctctttcgcttgacaacgaacagaactcaacattccaactgaaggtgattcgttttattggacaaagaaagaatatgtaattaacgtgcattatcggaatactgttttacacggtttcggtgggcgaaacggattttgtttgcaatttgaagtggcggatcgcaaatgccactggtctcatgctggcggaccaaacaattacagtccgtaattgtgttcttgataactgttgtgtatatcactcaatattcaaatgtacgccatttactgtacccaattcgtgtcaatacccatctctcagcatcgtccataaatagccatcattttgtcactcactttggcttgttccacattcagtcttcattcatcacatcattttattatttattttattcttcatccaccgacacatcaattttattatttattcttttgcctccgacaaataaactatttttattcatcgttgtgttcaccgttgaacataacaataacgataaagcaacaatgcattattacggcattgaaaacaacacggaacttcgcctgacggataaccggccgcagtccagcaaaaaccgtggtataaaggggaaggtgtcaaatttgtttggtctccgcaaaagtggatgaacaacagaggcagaagaagcagcagcagcgaaagaggatgatgaacacctttcacgcccgttgctaaacgagtcattaacactcattagtttttttctgtcaatttttttttggttttcagtatgttttttcattggttcagttcactcactgtccatttagctagtttgtttccttttcatttttgggttcttattttatgcatttttgtcgctgttgttgttgtagcttgaataaaaactgtctatgtaaaactattaaaatttgaattaagctcctttccgatcataaggcttcgcaaaattgaaattggtcaatctggttgaagaaggcctcattttagaccaaaaaaacccagtttaagtactgtaataggggtgaaaatctctcttcaacaaataaaatcaacaagaataaaaaaaaacaaaatttgtatcatttgacaaaatgtgaaatttttaattttttaatcgccgggcattcgtcgcttttcgtttttgcccccaattttccttctgcttctgttgctatgtgctgttggcgatcatttgtgttgtgttgttgctgttcaagcgcctcacggcaaattgagtcgaaatattcggacaaactgaaaaaacaaaaattggaacccaaataacaaataagcaaatagatgaacccttaaaacttgcttaaatccatgatcttttaaaaaaataaaatatattgaataaaaaatattggaagttttttttcaatgtaaaatttgttcccaaatttcagaatcaaatttttctacaaacttttttgtagagttacaaatttttgaattttcaaaatttcttacaattagagggggtttccagaaaaaattaaaaataaagaataatataatttgaaaatttcgagaatgaatttcgaaaaaaagttggccaagaggtggaggaaccgattgaaatgcgattgaagggtgtggggggggggatacagttcaccagcttggccctgctcctccgccatctcacccaccgtctgatcgctttgttcaacagcgcgtgcgtttggctggtggacagtgccaattcgttggccaccgtttcgaccattttgcgctgcaggccgacaccgagcagtacagcggcctgggacaggtccaacggggcccggttggtgtccacccgggcggtgaagtacaggccggcaatggtgggcaacaggtcgctgatcaaggccaagtcggccaaattgcgacagtactgggcaacccggcgcaggtctaagtcggacaggcgcagacggagttcggcacggtcaagcaggcctaaacaagggggggggggtgagcgatcattctgctcgaaaatttttaattaaaaaattgcaaatcccaaggttttctgaacatttttaattattgaagtccattcaaaaatgtaaattcaattaagtagccctaaatatttccaattttcctgcaaaatttcaatttttttttattaatttgaaaaagttacgaccaaaaatggtcggaaaagcagtttttaaattattttgtccatactttcttttgaaagtcgacaaattttttgttgtttggcatatcaatgataattaaatggatcaattcagaaaaacaatgaaaggagataatacacaaaaaatcagtgtt

SEQ ID NO: 3197 - DNA, 5815 bp, Heterodera glycines
  unsure (1)..(5815): unsure at all n locations
ataaatttcttagattttatttaaaatgccaaaaaaatttggctttgattcatggataattaacctgacgagtcctgtctcgattatttttctgatttttttaataaattaaaataaaatggtgcaaagttttcatttataataaattctttcaaatttgattttctttaaaatttaattaatttaaaaagtttaaatttaattaagaatcgattgattgaatccatgcgaatcttcagcaccatttgcaactcgcgttggttcatcaagacttgcttcatcttattcctcaacaagcgtgatttgtttgagcaaaaaattcgacagggccaatcgatcagtgtgtgcttcaaaaattattttggtacagcttgtttggtttaacagatcctagtaggatttctttaaaaattttaatcagacagaggcattatgccattaccgaaccaaaattccggatttttaataatatttatagggataagatttttaggcacgaaaacgcaaaaaaattattattttcattaaaatttttaggtagcaaaaaaaagctaaattatgctatttcaatagtaaatgaataaattcaataataaaaatttttatgaaaatttttggcgtcaagaaaaaataaaataaatttttgtggtaaggaatttttcggaaatgggtataaaaaaaatgagaaaatttgcactaaaataagatgactaaggcattaatttgtaagcagaaaaaggccaaaataggcaaaaattggcattataaaaatcagccgaaaagtttttaaccaagattaaaactagtttttcttgcttatctcanagtattaagtgngcaataattttagacattttcctaaaaatttgatccctaattattaattatgaaaaataaataaaaattgaaaataattatagagagaaaaaaccctaaatgcccaaattgattatattggcacaaaatttcaacaactcaacaaaaacccgcggaaacaaatttacatacatttcacatgcgccactgacaccgatcaggtcaaaaaactttaaaaatttcaaatattaaaaaatcaataattatttttaaatatatataaaaaaattttcagatttctatcatttggcataacacaaccgttgtgataattcagaaaacattacaaggatacggaatgttgtgatgataacagaatttttttttatcaataattaaattgtaatttttatatgaaaaaaatattaaaaactaaggcgcaatacagtggtaaaaattcttaatattttcattttaactcataaaacatttgttttcaattttttgggtcctttttaattatcatcatttaaattattcttttcaaaaaaatgattaaaaatttttttgtcggtataatattataatttaaaatgagtaaaaaccttgtttcatacatattttattttgttgtttacaaaatttccaataaataaaaactttgtgttcattttttaatcatcgtcatttaatttgttgttttaaaaaattaaaatatttaaataacgattaaataaaaaattaataattgatataattatttattttttaatttacttacatttcgtctacctccacaattttttctttctttttttttttggttgggtcacttccagagcaggaatcataaattatttgcttaaggacctccccgaatttatttaatccaatgaaaatcaaacaccggtgaattttgtttgggagaacaagatttttgacgacaaatgcatatttatataccttatttgctaatttatcgcgaaacaagctgagcgacaaaatgttgctaattaatatttcttcaaaaaccttttttatttatttttgttatattgctgccatgtgtaaggtaattttttaaatgatggtttaataaatttgaaaatcggaataaatagaaaataataattcccgaatgttgcttgactccggcgggccttcccggacaaaagtttaataatacaaaaaataaattaattaaattagaaaataaaaaatttcaaattaatgtttttggaaagtcatttttgaaaattaattaattatcgaataaatattgtttattcaccgggttttggaaattaaataatagaaaaaaaataaattctaaaataaaaattgctaattattcatacgttaaaaagtaaaatttttttagcggtttgcaacttcatcaattttatgcgacaggtctttctataactttttaattaaaaaaaatttttaattaatatttaaaacagaaatttgggaatgacatgctgctgtcatgcaacgtcaaccaaatttcaagagcaaaattcgcatgtcgacgaatttaattcagtccatcagtaaaatttacaaaattccaaaaataataattaaataaatttgttcagtcggtttcaatcaaaattcaatcggtcgccatttatggaatcaaaaatgagcacagcacgtccattctacaaaattgaagaagaaactggaaagattgttaagggtaagataaaatttaaagaaaatgaaaaaaaatcaatagggtagaaaaatattaaaaaacctgaaaccggatccgaaccccgaaaatatggtaaaatttctattaccatatcagcattattttctgcattccgagactgtcattttttgattttctgaaaattaaaatttcatttcaatttggattatccaatttcagaaattttactataggctatgtaatctttgcaatagaaaaatttcttaaaaaatttgttttgaaacgcaattttaaaattcgaaaaacaccaaaaaagccctagttttctcaactttgtttaaaaacaataatctcaacctgcaatttttttagtttcacacccattgtttccaacttcggcacggcattttccatcattgagatccaaatttttggcacccacaaaaccgcatcaaccgcacaaacaattggcgccgcccgctctgttgcacaatgctttacctgccgacgcaacccatgcactgctaatcccactgattgtgcaagcaccgcaacaacaacaacagcaacaagttgctgcaactgctggcgctgttgagaaagcgtcttttgaaagcagtacaaccaccacaagcagcagtatcatcatgggaagagaacggaatgttgaaaagccgcagcatgaaaggtaatacgatcgtgttaaattaagtttttaaaaattgaaacaacaaaaaataaatttaaaatatttaaaatgaaaagtcttttattagagattgagaaaggaaaattgtaaagtaaaaaataattaatttaaaaccccaaaaaggaatttataatgaaactaatttaataaataaaattaaaaaaaagtttgagaaacaggaaaattttaaagtaaaataaaaaattaatgaaaaatgccaaaatctataatgcgaattttttttttaaagtttttaatcataaatatgtaggtccaaatgtgaatgtgaagaagaatttgtgccgtcgaaaatctccgatgaagaaaaatttggcaaaaattgttgtgagcgtaagcgcgatttatgcgacaaattaaccagaagcatgaatgccaagaacagcatggaggtgacttcttaaagaaaatgttttaactatggcattctcaaaccagtctttggggaggataacaaaattttacgaattttttacaaatttctaaggaccaaagttttgaaaaagttggaatcagggtcaggatttaggaatcctgctaggccatgggttgcacgagtaaaatcccgctttggcccggcttggtaaatatgggattaggattccgggaattttctatagagctactaagatcaatcccatctcggtctttgttaatttgctgaaaatcccctcaaattttcagcatttcttgagaaattttatggccaaacatggaaacccggcgggaagcgatttgatcgatgatcatttggtcaaacacccagcagaccgggacagttttgacaatttgatggatcggttggccgaaatttcggccaaattggacaattggaagcacacaatgcgggccaaattcaattttcatgatgagcctttggtggtctctaaaaatcaaccatcatcaccacaaccattaccactacaacagcagcaacaacaattcccgatggtctcattcagcagctataagaaaaatcaaaatgccaatgcgcgaaacagtggcgccaaatttgaacatgaaatcagtgccaacggcacaatgaacattaacaacagcacattagtggaccaaatcatcccggaaaataatacggcgacaacagtaacgacaacaatcggagcaataattacaacaacagttatggaagaaacaacaacaagcacgacaaagccacaaattgaaaagattatttcaattcaagaaaggttaaagaatgaatttgccactttgttgggcattgttgaagagaacgatcggaaaaatgccaatgtaatgttttaattattaatttgttttaatatttttttgctgttttggcaaaaatttggttaatcaacaaaatttcattagaaatatatatatatatattttgtaaattttaatatcaaagaaaaagttatttttttttgaaaattttgcgttggttttttaaccttgctaattatattagttttttcatttaaaaataattttcatccaaattaaaaaaaatcttggcacttacttaagttgattttaaaaaatgtatgttttagagttatgagaaaaatgccgccaagcaacgagcgctgccaaatgttcagacggaagaatttggagcgttcaaaaatatgaatgattcacaagtttcaaaattgcctgacgaaaagaatgtgttctcacgatggcttaaatgcaaagatcgtagcaaagttcttagcctttgcctgtaaaattagtgatgatctgatcaaaggctcaattttttgtaaaaattttaagcaaaatttttgatcacttttatactttaattgcgaaaaagtatgagcctaaattaaaaaaaaaacttatttttgtaaatcatttagaaataacacttacatacagaaataaaaattattttaattttattgtttcatatggtatcaaaaataaaataattttagaaatttaaaaaaattgcgcgtttattttcaaaattaattttgtttaaatgctctaaatcaaatgaatttgctataattgtgcgataattaataaaggcattaagctatagtattttttttttaaagaaaatgccgatgattcgcggaaatttatttaattaatattttttcatcacttaaaatatacatcccaaaaacaataatgcaaattattatattcatctgaacaggtttaatcaaaatgagagaatccataaagcttctgcagagatttagcttgactaatcgaaaaatcatctctcacatgccaccaaatgcggtttcttctgattatgagcatcgcttaattaatgatcgggcgttgctggacgagaatcgcgtcattaattaattattcgcttaatgactcgcgcatgatggtaattaagtttttgcaaaattgcgttgactattattggtggaacaatatttgctgatattttttacaatattacttgaaaaaacaggaaaaaggatgcaatatttgttggaatgagatgattaatgattgacacttttttactgcttgaatgngctaatatttaagctaattnnagttgngtttataaactgccaatgccccaaaataaattcattctctttttcattattttttgc

SEQ ID NO: 3198 - DNA, 1452 bp, Heterodera glycines
  unsure (1)..(1452): unsure at all n locations
tggaatgagatgattaatgattgacacttttttactgcataaaagggctaanatntaagntaannagnagggnnnanacctttaaaatgnncaaaanaaatnnnattntnttttntattatttttgnaattgtnttatttattttttttggaaatatttattttatttttattaataaaatanntttttaattgnataaataganagtaaatagnnaaaaagaattattttagtgaatataaaaaataaanaaaaaaattttnaaaatggttgntaattannanattgntaaaatataatgaaataataaaattctttatattaatagttttcaatccttgatataagtcttaaatttttaattgttgaatttttccgaaattttctttttttattatcttaaataattgaaaattgattttcaaaaataggcaattgcataaaatatgaaatttatgctccttttgttgctgttggtgttctgtgcccttgcccacatgggtgatgcttttggatttggcggcatgcaaatgtgttgtcccccgccgtgcccgcctccatgcccgccaccatgctgttgtggtgtgtcggcaaatattaaaaaaaaaatataaattccgattaaaatgaatttgtttttaatccattttaaattattaaattaattcaggcggaggaggaggtggtggtggtggcggatgcggtggcgggggaggtggcggcccccctattatcattaactgtggcggcggtggacagtctggcggtggcggttgcggaggtcgtgcatgattcataatttttctggaatcccaatttaatttaaattatatttaaattatttagggggctgtggtggtggtggtggcggttgtggaggtggaggttagcacatttaatttcaaaatgggtaaatatattaaaatattattatgcattttaggtggctgtggtggtggcggtggcggatgtaagtacagtgaaaaaataataatttacaaaccattattttaaaattccgggtcagcaccgggattaggcttactgtcctccaaaaatcctgtctttaatcgggctttacttttgaaacccctggaggactcgggaaaagaattggaggatttgattaccagcaattaaattccttaattacctataatcggcttttgagcattgtatacctgataccaggatcagtaatccttgtaagttttgaacttgcaccattccgtttatccgcatcgatacaggaaccggatcatttctaaataagacttcatgatcagaattttatggaataagtccctcgtttttagacgaaaaattctgacagaaaaagattttctataaaataaattttaaacgtggaggtggaggaggctgcggcggatgtggttaaaactcatgaaacgaaagcctcttcaacatttgtaccagaagaagaatgcacat

SEQ ID NO: 3199 - DNA, 6887 bp, Heterodera glycines
  unsure (1)..(6887): unsure at all n locations
tttttggcatttaatattttttacacttttattactaataaaattgaaacggcaaagttcaaccaaattttgacaaaatatttggcaacaattgggaccaaaatgaaagtgaaaaacggatagaaaaaaattgtcatttccaaaaagaaagaataaaaatttaagacaacaaaattggaaattttgaaagaaattagttacggaataattatgtatttgggttttttaattttattttttcagcttttttgtttttttataaaattaagtaaaaaattgatttaactgctcatgatacgtggcaaatttactgtttgtaaaaataataaaatgaatattaatattaaaaggcgaacaaaatattaaacaaattcatttattgcaataattcgatttcccaaaaagaaaagatgaatttttggcttaaaatattttttatatttttcgtatttaataaaaatgaatccagcaaaatccgaccaaattttgatgaaatattcggcgaagaatgggacaaaaatgaaaatgaagaaaacgcgatcaaaattgagcaaaaagaggaaaacagtgaagaaaatggaaccgaatcaattaagcaaacatgaaaagtgatcaaaatatgaaagaagaatcaaatgatcaacagaaaagagaaataattcgaaaatttgataaaatttaagaaaatttaagagagaacagaaaatacgtaaacaaagacagcaataaaattgagtggaaattggaaaattattaggcacaaatcgcgaaaaaatatacaaatggaaaaaataatttaatttaaataaaaatgaaaaacttcataagagtcaaagtagacaattttttgtattaatttttatattttttatttttaagcacaaaataaatattccaatgagaacaaattacaaaagatgaagcaatattttaaaattaaataagcaaatccaaaaataagcgacagaataatcgcaaagaaattgaaaattgcctatgaaacactaaaaatgtggaaaaagaaattttcgacagttccaaaaatgtgattttttttgaggtacgtcatttttaaatttgctaattgttgtaaatgaatattttgccaattataatttattcattatttgcattataaattttctgttattaaaataaactttttcacttaatagatatagaaaattttattaagatgaatttaattttgaaaattttcatgtaaaaattattccaaaattagtttcaaaatttgataatgaatttttctgaaattaatcacccaaacccaaataattcacaattccattagcaaaagataaaagcaaaaaattgagaaaaaaaaatattagaaagcaattaaaacacaagcagagcagacgaacataattaatcactaaaaaaaagttaattggaagggaaattaacggggataattatgaagagacaaatggggagcacataaatatgtaattgcataaaataacgaaagccaaaaaaggcaccgaatttaatcatggaaaatgtcattgggccatcccaaaaaaaggggggacaactcagcgaaaagagaggggaaggaaaaatttgggaaaatgatcagcaaaaagtgatcgcaacacaatgtctggacggatggatcaacagcaaatcgggcgcaacagcagcgaaacagaaccggattagcacagaaagcagcacaaagcacagaacagtgagacattgggcaaaagcaaagcgattggacagagtatttaagggctaattggatcaacgaaggcacacaacacaaccacaaattcatttacagaacctcaatcactagtctcaactttttttggcacttaataaatggcatgtcgatcccacacccttccaaccacaaattcttattgttttgactaatccccaattaacgggtctcattaacaaatcgaggacaatcagtaacccgaccccaaaattcgagtagatgtccccagtgacttccctaagccccactttattggtacttcgctgggttatggcatgccgtctcccgacattgccaacaattttcctctaaattcgagccgcttgtcacctaattatttttctttccctttagccgcttaatcttaatcaaatccgattaaaaaatgttcgtccgatcatctgccattctgctgatcgttgctgttgcgctggtgccactttccgatgccattctcttcggcggtggtggcaacaactgttgctgctgttgctcccctccgccctgccctcctccgtgccccgtccagccctgctgctgtgccccgccatgtccgcccccgtgcccttgcccacctccgtgccctcccccgtgccctcctccgtgccctcccccgtgccctcctccgtgccctcccccgtgcccaccaccgtgcccccggccatgctgttgcggtaagttgggcgaaatcgttttaaaaatttacactgaaaaatggatttaaaaatttgggtaacatatagccattcaaattttaaaattcaggaggttgcggcggtggcggctgtggtggcggcccaatcattgtgaactgtgccggcggatgcggcggtggctgtggcggattcggattcggaaaataaatcatttaattcgcttaattttcacgtcaatccacattagattttcatactgtagtgatctttttagtttttttttctttgttattgatatgcaatatttctcgcattgcattaattagaataaaatcattagttttaagacattcccagtgaaaacggctcttttaacactaaatttcatagatgacaataaataaataaattactttaactcattaaagtaaatacaaataattcgcttcccgaaccccgaaaaatcttcatgggagtgtctacacatccatgatgtgcatacttatcatataaaatgcatatattaattgcatttttttttaccaatatccacgccattgaccccaacgaaataaatgaataattaacattaattaaaattaaatgtttattgaaaattcaaaaaacccggtgctgcctatcggcatcgccgcaccacaaacttaccttttattaaaaagttgcttaaaaaagcaaaaattgatctttttggtgaaaatctgttacctaatgcattcaaattttcgaattggcgaaaaatgggacaaaaatgaaactgaagagaaaaggatagaaattgagaaaaacaatacctcactatcaccagttgatagcggtgaagaaatggggaccgacccaattgatcaaacaagcaaatattctaatcaaaatgttatcaaaagtgatcaaaatacgaaagataaacaaaaatgaaaatgaaaaatatggaagaaagaattggtgccaaaatataataaaagtaaaagaaatattcattttaatattaaattaaaattaatattaatatttttaagcacaaattcaatattccaatgagaataaaataaaaaagatgaaacataagattaatttttatgactcttttatgaaagaattgctaaatatgtttttcagtaattattagtgaccggacttttaggcaccaaaatttttaaaataggcacaaaaggtgagaaaaggcataaaaaatggacaaaaaggacaaaaaaggcacgaaaaattggaaaaaggcagcaaaaagaaactttttttagacaacattaaaaaaaaattttttattaaagatttttagagagcaaaacacgtaaaaataaatcaaaaaacttacaaaggcatatgcctcgaaatccggtctcatattttatttttattttctgtcaaaaaaacattatgttcgacaaaatgattcatagtgccaaatggggcaatttttgcgcgctaattcaaaaaatatgtagattaatctgccttttttgcattgtttattttgatgatcagccatagctctcgagttatctccaacataactgaacaatataatattgaatacgataataataatgatcaatcacatttattcaatatttaccatttattctgtaatctaaatgtcacactttatatcttatgttccaaacaattgtctctctcttagtgagtggttctttggtcaccccctccatctttgattacgcccctgggggattttctcttaatcactattattcacatcgagtctctccccggccagtctctgctcccgagaccgagtcgggaagagggcctaagcattgtatccttcccccagaataaaggcgtactgttgcttactgtattaatgcggaacaaagggatacaaatggccctacggtggctaaggacattcaatatttacaatgtgaaacatttcaacactggttttttataaattcattcaaaaataatttgcatttcaccttaggaataaattattgaaaaattgattttatgcaataattttgtcgatatgcattgaaaaatgaatttattgcttttaaatttttgtatttttcgttgctttcgaaattgaaaccggcaaaatccgaccgaattttaatgaaatatttggcgaagaatggggcaaaaatgaaaatgaagaaacgtaataaaaattgtgcaaaatgagcgatgaactcacaatcagcaactaattaattattactaattaaaaatatgttttttattatattgaaaatttgaaatttcaatccttagaatcttcacacaattccctttattattcatcattgtatcttagtgcttgggcattttttttttatcaaaaaatcatttttatttagaatttttattttgaatgccgcatcttgaacttttgcacgaccgaaaacaccgtacttaagcaaatattttttgaaaattcaaaaaattttcttacagattatattaaaatatctaaaaaaattcccgctcggcttctaactaagaataaatagagaaatatagcatttttgacaacaaattttattaaattcggttttagtgcagaaaaaatcatgaaatgtagtcacgaatattgaaaatttactttctgagctctccacttcatcaatttaaaatagttaatatctatcactaaatatcatagattacaacaaaaaaatgaattattacaatataatatataaaaaatacattctaatattaatcaaaatgccgtcgtgacaacttttgtttttgggctcaaaataggcgtgacttttacaacatttattggcaaatgattggcttggagttgattcgccgaggaagaagcattgtttggaaagcaaaagaagcggcgaattaggccaaactcatggacaaatgctttccgatattccgtacttaaaattatttaaatttaaaattattttatttttacctcgtcacatacaaaactggcccattggaggcggcactgacattaacagtcaaaatggcgacaaacattgtaattgtccaacatttgattgggtcctcatgaaacaaatttggtactatgaacatatagtaagcggaacatatgtaatatcccgaaacattgatcaaaatgatgataaacaacgaccgaaagatgcgtcggttgaacttttccgcgttcgaattgtttgaagctggaaaaaacaaaatgaaaactttcgaaattttgacattgatgaatcataaatttacaattttttgtttgaaaaatcggtaatctccaaaaataagaaattttatgatgagttgatatagagttcgactgggtcccggaaaattgggcatcagacaaatggacatcaaatattggacacaagaatattggaaatttttatccgaccttgaccaactacaaatccccaaagaaattgactccgacaactccattcccgactacgccaagctgcttattaagcagcttcactccctcttaagcaccgcctccgtcctaattcattcacaggctgcggcagtcgacgcggtcgaagaggaacgacgactgagaaccgtcgttgttacaaatgtgcccgaaagcaaatcggacaaagcaacggagagagcccgggaggaccgtgccgttgtggacgaaattttgaatgccacggacgttgatcaggcaccaattgtcttccgtgtcggcaaacgaatagatggtcgaccgcgccccctcaaaatggaattcccgagcaaacatgcagcgcggcacgtcatccgcatgcgcggaaaggtgcaagcattgaatggtctccacaatgtccgcgtccgcgaaagcatgaccaaggaccaactgtccgagaggcggaaactgatcgaagaatgcgggaagaaaaggcaggcggacaacggtgattgggtgatatatgccaatcaggtcgtgctgagacaggacattgaccatattcgaaaaaatttttaaattgtccaaccaaatcactgcaaattacctataattattacccaaaagtacaaaaatttttccggtctgtaaaaaatttctaccaaaaaattactcatccaaactttttaataaaaaataaagggaatgttaaatgctgcctaataaacattaggtcactaatgaataaaatcgatgaaatagcacttatcttagaaaccgaaaaaatagacattcttttaattaccgagacttggaccaaagacggggaagaaatcaatttttgcccttgggtaaaagagaattacaactatattttttcatcaaggaaatcaaaaacttgtgggggtggttgtggtattctaatcagaaaagaaattggattttttacaaaattttcggattcaaaatttaattctgaaattttagttattcaacttcaaaatttacaatgcatcagatttgttttggtgtatagaccacccaaaacanacactcagacgaaacangaaaatttgttcaaatttttgcaaaanatttttta

SEQ ID NO: 3200 - DNA, 6532 bp, Heterodera glycines
ctgcaaaacctattggggcaaaccgaaaacatattagattccctttgaagttgccgcccacataaattcgatttccccaaatccgtgcggttgcttttttttttgcacatccctccccgcgccgccgcgcagcgacgcggaaggtaatcaatcatccacctgtcaccagagtgacaggggaaggaaattcgattttttcttttgcaaatttaatcctaatttctaaaggctaaatccaaactacttagacattacattattcgcaatcctgagattttttttttgtgatgctttttctgatcctgaaattaaactcattttgaaaatttgccaaaaccgtgcgggttttttttgcatttcctccccgccccaacgatgaggtacaatgcaggcgtcgcgcaaattaaatcgataatgaaattgtagaagtgtagaagtgcaattttaattggtaatgcagcaaataatgccgataaataaattaatgaattggacaataaaattatccaaatccaatttaaaaacaaaatcgaaaatgaataaataaatatgatgaaaaaaacttttccaaaagtaggtcatctgtcaataaaatatgattaatgatttttagcaatatgggccaaaaattttttaaaaatctttgattgataggctttcgtttttgaaacgatttcgcaatatggacccatttttgaaatgattaatgagtttttatccttttccagcacaatgtgcaagtgacagacccaaaaccgagcgggtaccggaagggcccctccaaaatccgaaacctattgaaggggtattttcctttgaagttaccgcccgcttgcgggggcggtattttcttttgaaattgccgctacgtgatacttccccgcaaaatcccgagcctattgaaggggtatttccctttgaagttaccgccgcgggattttcccctaacccattgaaggggtgaaatccgttggatgatttatgaacaggttcacaaatcaaagatattgtattagtttaaccctttaaaggcgccgcccacgcaaatccgatttccaaaaccgtgcgggtatttttttttttgtccccatcttcctctccgccggtgcgccatgaagtcgccctgccgcgcaccgccgcggaaagttaatcaatcattcccctgccacaaatgggacatgtgaaaatactttcaaccaaaattcaagttcttatacatcatatcccaaatactttgtcgctgttttttgaatgctgttcattaaaatttactaatacgtgtttaaaattccaaatcctagaaaaagagcgaaagtgttctttaactgaacataaagataaagaaattatggtccgacgaaaaattttaaaataaaaataataaaataaaacgaaaaaattaaacgtaaagataaattaaaaaattgaaattttcaattgttggtgctgtgtaccatatttctttccaaaatcgaaaactatttcgcaaatttgaccaacaatttctgaaaaactgccaagcaaaattgattgatggatttattatttcgaatttctcatttattacacaatatgcgcgcgatttacattaaaaaacgagttcaaaatataggctgcccaaaattttgaaaatttaagcaaaattaattaattatcatcagtcagctcaatgacccaaagataattcaaatcccattttaaaaaaataataaaattgaaaattctgaatgtatgttgtttaaactcattcgtagcaatttaaaaaataatttttcttgataattttttgctcccttcaccccttccccataaattgtttttttctgttattcatcattatttttagatttcggatttagggaagttaaaaataattactcttatgtctttgccacgtaattctcgttgttattctttctatttcaaatttaattgaattcccaaattattgtttttgcatttaaaaatttgaaatatttcaataaataatttaatatgaaaaggcaatccttttgagttcccgaaccttttcttttgaatatatattttaaccgttttacatttttgaatgtttaaattataatattaattttcttcccttaaaaatgctttttttttgtgacataagatggtatacagcttttgaatatgtctagataattgaaaacacttcccaacttagaccttttaaaatctccaagcttaaggcattgaaaaagatcgggacgatattaagatattgattactcatgtaaaaaccctaaaaacaaaaagctttaaaatcgcaaattttgtccaaaaattcattttaatgtaatgattttattagattacacctaataagattatacattttcatggattaaaaggctcgagtatctcgttttcctcattaaaccttgctcactccattcatagattggcagagctatgacagaaaattaatgaacacctgtgcagattcgaaacgcctattttgccaacagccgccagcgaaatctttaacaaagattaaaattaaaaataatatcaggcaccgaatgtaattctgagcaggcttttgtgggattccaatctacaatgatatattttaggaatatttgaaaaaagaatgaaaattccattcatttcaaataacacttatagctccctaaaaaattattttcgatcaaaaagttatcaaaaaatctaggaacaaatatttttaaaggtttcaaattttccaatagaattagggatttttaatatagatgaaaaaaataaaatatatctttctttcgaccgactgtttattaaggggtaattagtatttacatgactttaattatttttcgtaattttgcaaatttgtttaccgttctcaaaaagtttcaggaattaaacaaaaattaacctttttaaggaggctttatatttaataaaatttcaccgaaaaataattttttaaaagacatccaatttgaaagggatttaaattttttctccttttgaatattattgcattgcgtttcactaaatttttatcaatttctgaaagtttattgttacaataacagacagatgaataacattttattatgttaataatgtataaataaaaattaattgcaaaactaaatatctttaaagcacaacaattttgtaaaatgaataaagaaagaaagcctagaggaagacctccgaaaaataaagaaaaatctagtgaaacatttaataaaaaagataatcctcgagtagaaaagaatttttcaaaaattttaaagcccaaagtccaaaaagaaaaatccaatgaaaattttaataaaaaagtaaatctcagagtagaaaagaatttatcaaaaattttaaaacccaaagtccaacttaatgggaaaagaatagaaataaattcagaaagggacacaaatgccgttcatactaaaataaaacttcctccgatttatgtaagattatagatgacaaggctaatatttcaaatatttatgattattgttaatcaatcacttcttcttatcaaaaagcattttcagcatttgacaaaatttgcatacgatgtaaaatacatggacaatggctgcttgaaaaggcagaggaaatagtatgaaaagcaaaagaaaaagcaattctaaatacaaggtgaagagagggaaaagtcaatgggaaactggttaaatgtttacccgaaaagggaagagagttgtgaaactataaggaaaaatctaatgctattgtttcatagtgaaaagagatgaatatgcaacgaaaaccggtgaaatgagaatgaaaaggaatgatgatacaagggggatagatgaattatgtgttagtatgtggtcaaacaggtaatgaataggtaaaactctgtgataagtcgtgaaaagcaaatgtatatggtgaaaagtgaaaaggtaaaagcaaaaatgttcactgataaatagtgaaagttggtgaaaagcagtaggcgacaagcgaaatggttagtggtaagtggtgaaaagaggtgaaaaacaatatgcgacaggtgaatgtcctgtggtaagtggtgaaaagaggtgaaaaacaatatgcgacaggtgaatgtcctgtggtaagtggtgaaaagaggtgaaaaaacaatatgcgacaggtgaaatgtcctgtggtaagtggtgaaaagaggtgaaaaaacaatatgcgacaggtgaatgtcctgtggtaagtggtgaaaagaggtgaaaaaacaatatgcgacaggtgaaatgtccagtggtaagtggtgggaggaggtgaaaaaataatatgcgacaggtgaaatgtcctgtggtaggtggtgaaaagaagtgaaaaccaatattcgacaggtgaaaatgtcctgtgttaagtggtgaaaagaggtgaaaaacaattggcgacaggtgattttcagttataagtggtgaaaagatgtgaaaagtctaagaacattgatgaaattctagagaagtgatgaaaagaggggaaactaaaaatggaaaagtcaaatatttcaaaaacagaaaatacaacgacgatgctgattttcgtgttatgtggtgaaaggcaaaacagaacagtagttgagatagaagctattttaaagtggtaaaaaggcaaagaaatgttcgaatatgtaaaaatataataaaagaatttaagagatttacatttaaaaatggcaaaattaaccgctgttaactctgcaaaaggaaagttttgtgacgggtattgttatcacaaacacaaaatgacaaaaaataaaacttggtggaagtgtgaactttaccaacaaggatgcaaaggtcggggttttgagagtaatgttgagtttttcggaattcgaatgcataatcatcctccagaccaaattctacttcaaatcgagatagaacagtagatttgaagatgtcaaacatagaaatcagatttcaccttggaatttcaaaaatatcacgtgaactttatttttcctctcagctgcgtgattttgggtaacccaaaagttgaaaaaaaaggtttgatatttcatgactctgagcttttgaatgagcttaatttttgtttaaaccggttcaattttagcgattgaataaatggtaattaatcattgcgtttaacaggtgcagacctacaatttagttcgttccccactgatggtccaccagaaagttgggcaccgggtgtttggaaatcagtaagtttgggcacccggaagtttgggcatcagaaatttaatcaattcgtacagctgattagacatagggtaggttaagcgtctacttgttttccgccttagatcctggaaatgctggaaactgcggggctttcaaatcagaatgccgtcggtcggacctattcgtctcccctgccgtcggtggcaccccaaaaagtggaggcactctcgtcaccacatgctaatcactaattttattgttaactttccttttgcagagttaacagcgattaattttgccatttttaaatgtaaatctcttaaattcttttattatatttttacatattcgaacatttctttgcctttttacccctttaaaatagcttctatctcaactactgttctgttttgcctttcatcacttaacacgaaaatcagcgtcgttcgttgtattttctgtttttaaaatatttgacttttccatttttagttttcacctcttttcatcacttccctagaatttcattaatgttcttagacttttcacctctttacaccacttataactgaaaatcacctgtcgccaattgtttttcatctctttcaccacttaccacaagacatttcacctgtcgaattttgtttttacctcttttcaccacttaccacaggacattcatgcttttaccttttcacttttcaccatatatatttgcttttcatgacttatcacagaattttacctattcctttgcctgtttgaccacatactaacacataattcatctatccccttgtatcatcattccttttcattctcatttcaccggttttcgttgcatattcatctcttttcgctatgaaacaatagtattagacgtttcttatagtttcacaactctcttcccttttcgggtaaacatttaaccagtatcccattgactttcccctctcttcaccttgtatttagaattgctttttcttttacttttcatactatttcctctgccttttcaagcagccattgtccatgtattttatatcgtatgcaaattttgtcaaaagctaaaaatccttttgataagaagtgattgatgaacaataatcataaattttggaggaagggaggaagtgggggggggggggattttacaccggattaagtggtatttttctttgttttctcgcgcatatttttttactctttttctctgtttctcttctctctcctatgtgaatgcgcatctctctgccctgggggggcaagggtttacaccggattaatgggccatataatactcatacctaatatttactgtaatcgctaccatatagcattttatgcgaacctgctggatttga

SEQ ID NO: 3201 - DNA, 3705 bp, Heterodera glycines
  unsure (1)..(3705): unsure at all n locations
atagtaatagaaaaaagggttttattaaaaatttaataaaaaaaatttaattataaaagtttatagaaattacttacgacaagttttttttaaattttacattttgcgcaataagttcattaaaaaccctatgttctttacctttgatatattaatattttcaaaaatttattaattttattttaatgaaaaataataatgtttaaatataagaatttttttcgttttctttcacatttctttaatcggcacggcgccaatgaaaaacattaaaaaatttaatagaaattcagaattttgttcaaaaaaaatttttaaattttttgtaatttttggcttcgcttttttctgaattaattttcactgacgaaatcactcactgacgtaatcacttactgacgaaatcagcgggaaccgccgcgaatgaccgagcgtaaaaataaatgtttggaagcgaggccgcgaagcggccgagccctccccaccggttcaatatcgcaaagcactcaaatgtaaaaaatgctgaagaaatttgctgaggttgagtcccagtgcttggaatgccggagggttgagtcccagtgattgtaattccgcagggttgagtcccagtgattaaaatgctggagggttgagtcccagagattggaattcctgagggttgagtcccggcgattagaatgctggaggattgagtccctgtatttggaatgccggagatttgagtccatgtgactggaatgctggaggattgagtcccagtgtttggaatgccgaagatttcagtcccagtagtcgttttatcattcataattctacaacacaatcgtactaccntagcgggggatgcgccgaaggcgctaaccccgctagtaaacttaaaaatactataaagaaccaaaaaaatggatttaaaattaaaaaatgcaattttattttgtcgtgtcagttgtataaaaaacacctccaagtatgccaatttcaaaaaaaatccgcatttaaaaaaaagaaagattgcaaaaaaaaagtgaaaatatttgttaaaaatcccaaaataacgacgaaaacccaaattttcgtaaattttgggtatgtaattttttaaaatttcccaatagtctacatttacgtgtgtatttttcgctttttttttgcatttttttgtgaaaatttgtcaaaaatggccgaaatatgtactaaaaaggcaaaaatagcgaaatatggatgattcccccaaaaccccaaaatctggttttatatggactaaaaaccttcaccaaatcaaaaaattttaacgtagaaattctatttttgagcccctttcttcatagcatatgtgcagaaaaaatatgtttaatccatataatttacaaccctactcatcatactaacgatgttcagttgtcaaattatttgtccatattaataattaattcaaaatttttttacttctgaaaaggatatatatttttcaaaaaatttttttggaaagaaaattcttattaaaataaattttcctctgttctttcgtcgcattatataatagttgttatagtttaaaaaattttaaaataatttttgtgtattttaataagttatttttaaaacatatagaagaaatgattaattagtttatcaaacatttctaatttttagtaaatgttgtaggaatgaattagcgttcaatccgtaataaccactaatctttataaaaataattttgtttttccgtaaaatttacataatcataggtcattttagaagtttattggaaaattttttgaatatttttcatcagataaattcgaaatttttttgtaatcattttttattcaaaagattaaatgctttttctgagttgtcgaaacttttcaataaattctttttccggctcaaccgcattcatttttgtgctcaattcgtccattttttgtttatactccgtgtaatttgttaacatttcattgaatgcatccgcaaaatcatttttcaatgttttggagcgaatgtctgaaaaatttaaaacaagaaattaaatttcaaaattggcattttaccaatcacttttgccacccctcgcgccgccaatgcctcggcattgttaaactgatcgccaaagaatgggaacaaaatcagcggaacgccacttttgactgcctcattaatgctgttctgtccgccatgggtgatgaacagtttcagtccgccgtctttttttaaatttaaatttaaaaaatttcaaatttattttttaaaccaagaattgccgactgttccagccaactcttggcatacacattgtccgccaactttttgtactgttcgccggtgccaattggcgcccttttgccccatttgatgatcatgttcatctgcgggtactgcttgaacacttccaccacaatgttcttgagtgcaactgcgtgtgcttcgccatcattcatctccacaacagagccaaaactgagcaacacaacgccaccattttcattttcactgttggcagatttaaatatttgtttggtatcctgcaaataaaaatttttttttaattattaaaatattcatatagaacagatcttcttttaagggaccttacgaaattactataaacagaccccataacaccataaaccatatttataatatacaacagagtcttcctaaatgaccctcactaaattactgtaaataggcccgcaataccgtaaccaaatttataatatagaaccgagtattcctaaacgacctcactaaattttatcaaagtccaacctaagccctcctatttatcatgtcatttttttttgcaaataattttaaaaatccaacattaccccatccatttttggcacaacaccctttggcattgtgattgcgccaataaaattgatacaattttctaatttgccttttcatattggaattggacctggatttcttggacaaaaaatcaggaaaataaaattaaaaagagtcaaaaaatcaaacaaattctaaaatattatccaggaaatccaggtttttttgtgcctaatctaggcctggtgttttatatttgttatccaatattaccccattcaattttggcacaacaccctttggcattgtgattcctccaataaaattgacacgattttcttttttaatttgccgttctcgctcaatttcctgctcaacaacaggaaaatcgaggaatggttgcacattggtgaagtacaaatccatccgattctgaatatcccatgatgaagcaattttttcatgccgaatgaaatcgccaaattcatcctttgacaataatccgcgattaattgcatccacatatttttgtcgcttaacaatttaattaggctattaatttattttattaattattacaagcaataatgttgaactttcaactggctttatgtataaatcttcgtttcgttgacgaaaatgatttggattttctttgatggcactttttgttgctaattgatggtcgctaatccgtgccaaatccctccctaaaatttgtcttcattaattaagttaatgacgattttttattttttggaattttttaatttttttcaaggtataatttttaagcttatcataaaaatttaattcattctacgataaaatatttttttaaatttatttatttagactaaatatgttaatgatcagtcgacaaattttcaaatgacatttact

SEQ ID NO: 3202 - DNA, 4051 bp, Heterodera glycines
  unsure (1)..(4051): unsure at all n locations
tagtatgtgatcaatgatcggaagagagtgggagcggtgcgaacaaaaaaggggggtgatgtggcgctttgtcaaattctttatttttattcaattaatttattaatgatgatttttgcccttcattaacattgttgggcggtgtccgtctggtctgatcactcattatttgatcataactctgtataatataaatgagagggtattttgatttgaaactttttgcttttcaatttcagattttatttgtttaatatatgcatgatgctttccgatcacttaatgactcattatgatcactgtgatcaattgatttccatccaaatttatactctttaatcactataaaaaaaggttccgtcatctttaaatcgtttgccctcaaattgatctgaattctctgatcacatttcgatattcatccaaatctgatcacatttctgatcactctctctctctctcacatttaactgcacagtcaagggctaatcattttaaaatctacttttggttttcatcaatcacaatctccaatcattttttctacaattccattcgcattccgataaccattttctgatcaaacaatcacagcttttcacactaatgactcctctgatcagctttcaacagcacagcacattgatcacttccccgcccgatcagatcgccccttccgatcacccacacactgaccagtggcatgtgtaaacaaagggcacacaaatcactcaccgatcagccgagcataaaaatggttgcgcaaccgtaccgaattgtgaattgaatgaatgaatgacctcaacccaaataaaagcacaaaaaataaaattcaaaccacccaatcccagcacaagtacaaaacataaactcgatgatcagaagagtggaggggaagaaaaatgtgcccaataaatcacgcgaccaaaaatgcaatgatctgaagcaattaaaatgcgcaaaaaattgggttgatcactcactcactcactcactcattcattcattcaaaataccctcctggtacaaatattgtctctgaaaagcaattatttgttcaccaattccttccggcaaaaattttttgtctccgatcacttaaaaaaatgctgatcacttttacagtgtacggcaataatttttgcatcttgttccatatggaaactgtcatttcctgctactaacttttgtctctgatcagcaatcaccccttcctcccggcaaaatttttgttgtctctgatcacttgaaaaatgttgttgacttttatctgatcacattgcaaaatgtcacttcctgttacaaacttttatctctgatcagcgatcattccttccttccggaaaaaaacaactaaaaaatttgttcttttctgatcacatgctattggaggatcttcatttccgatcactctccaattaagctttgctcgtttaatttgtttctctctctctctccgactgatttttggttttttctcgatcattttgttcgtccatggccctatgtcaatcaaatcaccaaatcgtcgtgcaataaacttttaatttctcgcgcgtttattcggcagtcaattaaaaaagttaatcttcttttcgggaaccttctttttatgttttaggtttttcaatttttttttattttttgtttatttttatggcgttttgactgtttcgcaaaatcttatttttcgaaacatttctcctaattttaaatgtctttttttttaatttaagctcaaccgacccatttttaattttttttttccggttttaagccaatttttcaaaatgaaatttttttatgtctttgggctatctgcgcccctgcgcccataaatcaattggcaaaaaaaaaaaatcctttaactctgaaaaaactctaggttttacaattttcatacaaatttaggggggttttttcttaaatttttcatactccaaattttttgtactttttttttaaactgccatttaaattaattcaaactttttcatttgtaaactccaattttttgtactttttaaactgccctcaccatttaattcattcaaaaattttttcatttccccccccccccatttaattggggacaaaaactggaaatttcaaaccacaaattttgaaacttttaatggggggggggctgtatggggaggaggacactctttttaaaaactctccgccggaggggcaaagattgggcgccaattcaatgccaaatcattcccccggcccccgcccccaaaaatttatcgtcacgcctcatttgtcaagaaaaaaaggcccccaatttgagatttaatgaggcacatcatgccgatgatcaaatttgtttattttttctgcaaattttctgtgcgttcacttttgtggcgttttgtttgtttttgttttgctctgccgccgccaaatatttgcgcgcaaaattcactttttgattttgcaattttaattaatttcttttttaatttttatttttggaattcagcatttaaacatttttttttaacttatatttctcggactaaccaattattttcaaggactgtccttgtcaaccaaaatcaaatatttttaataatatttaccgagcctaattcacattttgatttcgcaaattcaatttttaatatacgaatttaattaattgcatttattttatttttttaattttcaaggattttttaatttgcaaggacttttcttgtcattcaaggactgtccttttttatgaagatcaaaatataatggcttttttcaaagaaaaacaatttcttatgtggtttgggtgtctgaaaaataatgaataaaatatctaaataaatttttaggtctaagttttcagcttaaagcctggcttaggtttcgattttcaccttgaattggtcacattaacttttggcatttttgcgcgagagattattttttatttgttgttaatgttgtttttgttgttgtgagttgaaaagtgaatgcaaaacaattttaattattcccaatttaatttgttttattttttaatattttttcattcactttttaaatgtccattaaattaaattaaatttttttttaattcattttttgtaatacaaaattctttactatcaactatttctgatattctttatcttgtactattttaaaccaaatttgacccgtttaaagataaaaaatcaaaatttagttggacaacacggaaaatttatttaatttaaataattatttttgtttttttctgccattgatcacaaaaaaattgaaaaaacactgcgatgcctctcccagctctgatcagtgttgatcagcttaatccgacacaaataaatcagcaaaagcagcagccaagcccaccatcatcaaccgtcactgttacaacactgtcagccaccggcaagtttacggaataaaattttcaaaattagacttttcgactttttggtatggctctcgaacttggataattgcctaatttgtttggccctcctccctttgccctgtgggattttagaccgagaattgagccgggagagtcgagaattggtcccggaggacagacggagacaaaaaaaaacacgagaatttcccggttcgagaatttaagtcgggaattggcccccgggaaccgagacaatacttcaaaaaccccgagaaatttctcgagttaagaacttcggccggggtaattgaccccgtgaagcgatatatttctcaaaaaccccgagaactttctcgactcgtgaatttcggcattggctccctggaaaagaattcataagtagggctaggatttttatgtgctaaaaatcctgaaatatgtaataaaatatgtgctaaaaaatgctgaaatatgtgctaaaaacccccaaaaatgccaaaatatgtgctaaaatatgtgttaaaaattgaaaaaataagtgtgtttttgcataaaaattcccaaaaatctcattctttatcatttttagcccatacaacgcaaatcaaatacatttcgaagtgtttgnggtaaaattgtctttttttgataaatcatttctataaattg

SEQ ID NO: 3203 - DNA, 4823 bp, Heterodera glycines
aatgcagcatggacggtaaaaaacgaaaaaaattgccaaaaaataattggcgtaaaacaaaacgccaacacacgcaaaaacaaagtatatgcacttacactggtaaatgccttttttgtattttttattttgatcagccataacacgcttcattcccaacaaaaatgaacaaatttggtatctaaaaaaagattttgaaaaggagaatctttttctaagtgaatgctaagcaatttgacatctcagaaaaaagttgtgggagtttcaaattttcattatgttagaactcaagtcctaaactactgttttcaccaaaaatgctaaaatttattctttttttatttattctatatgtccaaagtgatcttgtagcctataaaccaaaattgttagaatttgagagtttcatgttttttatgtgttagagacatgaaaatagtacgccaaagcgagagaaaaagaaatgcaaaattttcatcacactataacttaagcaccgagcgtaaaaaattaaaaatcgagcgttaaaaaagttcgtaatttttttctctatcgatatgcaaaatttggagtggatttaacgtgcaggaaaaaagttaaacgtcacgaagtaaatgttgttctttacattattaagaatgaagagatagtacgtaaaagtgagagaaataaagataaaaagtaaatgtgacagaacgccaattttttcccataattattagggcccggatttttatgtgctaaaaatcctgaaatatgtaataaaatatgtgctaaaaaatgctgaaatatgtgctaaaaacccccaaaaatgccaaaatatgtgctaaaatatgtgttaaaaattgaaaaaataagtgtgtttttgcataaaaattcccaaaaatctcattctttatcatttttagcccatacaacgcaaatcaaatacatttcgaagtgtttggggttaattgtctttttttgataaatcatttctataaattgaaagttccagcagagaacttcgaaatccaatgacgaattaatgaattcgagatttcattagtttctacaatcgaagaaaaaattttttaatttgaaaattatgttaataattaggaaaaaagtcgatttttaggggtgtatttttcaattttcttgtatttttattgcaatttttctcaaaaatgccaaaatatgtgcaaaatatgtgccaaaccccaaaatatgtgctaacatattttatgtgccaaaacgccaaaatatgtgtttttatgtttttataagtcgctctaaaccaaaaattgttcggagaaaatgctatttttgggcttctctcgccataactaagccgcaaaaaaaatatgttaaaacataaaaatcctagccctattcataagacttggcgcacatttcactactaattattttttgcgtcgtagatgatccgtccagcagcagctccaccaccggcagtctgtcgctgcgctcggtgccgtcgtcggccacggcgcataagcagccgcccccgctaatccgcttcgtccactccctgtacaccaagtgggcatgctttatcgtcaagaacgcgtgggccgtcatcctggtctgcacagtggtgaccacactgtgcaccgtcaaagtggcactcacaccgtaagcgcgcaaaagtgcacacgataaatttggcatactgtaatggctgtaaaattcggtaaatggcactcacatcgtaagcgcgcaaagtgcacatgggaatttggcgtactgtaatggctttcaaattcggtccaattaatatggcactcgcaccatattcgtacgctgacccacaaaatgtccagcccacgaaatgtccaagtctcgaatttgagttttttattattcagatgggcctaaggttaggcaaggggtaatatgaaggttatattcgtattcagcgaccccgaaaaccctaaaaatcctaaattagactcattttgtttttataaattttgaaaaattttggacatttcgtgggtttttactcttttggacatttcgtggcttggacactttgtgggggtgcctattcgtacactaaaatttggcgtactgtatcaaaatcaaagtgttaccgtaacactcatttaaaaatagtgaatgttttgtcttttgtttccgcatttttagcagggagttccggggcgaaaaaaaaagtcgggatattttcgggacaaaaaatttatcgggatcgggacctggattcacatccggaaggccaaaatttttcaaatcagacctcacactaaaagacttagtaatgtaccaaaccgtaattagtctcggtaattacaccctaattgaacacaactaattttgcagacagaaaaacgatatcaccggctatacgccgtacggggcacggtcaaggcatgaattggcaattcaggtaaacagaaatattccattcaaattttgatcagtacacaaaactcattaggaatattgctcgtctcgctttctcgcccttttttggcttctcgttctcgcttttctcgcattttatttttttgtccattctgatcaaaataatttccaaaatgaatgagtgttcatgatcaaatttgatcagaaatgttgtgatcaaatatttcatccgaacaaaaaatgaattttctttttgtataaattttgacaaaacattttttcaaaattgtttttcaaaaaacaaaaaacaattcagatactgtttttataataaacaaaattattttaagataaaaacaaattaaaaataataatttttagataaaaaataatttttctttattttataaaaatatttttaaaactattattttttttataaattttgaaaggaaattttttggcattttgcataaaaattcaataaaaaatatgccgaaaaggggacataattgggaacactgacactccgatcaacaacatttggccaattgtaaccaattttgccacttttcaaaggagcattttttcaacgcccaaggccttggccatccgttcggcgtgttcgttttgctgttgccgcgccgtgccgacgacaattttttgcgcccccaaatgctcgcggaagcggcacgcgttgacgagttggtcagcacgcggtttccgctgttcaaccaccggacaaatcggacagaaaattttgcccaattttgccgcgatttttgccaactcaatgaaccaatgcgacgatttgcggtcagagaaattaaaattataaaattaaatttaaaaattaaaatttttttcatttaaatttaaagctaattaggtaatttattttttaaattaaaatccgatgacaattcatgtaaaatttagaaaatttttaaatatatttattcgtttaaaatttaaaatgaatttattgcaattttcaactttttaattataaaataatttaaaaatctatttatagaaattaaacaataatttatagttagtttgataaattaagcatttctattttttaaaatttaattctctgtttaaatttaaaaagaatttattgcaatttatagcgtttaattaaataaaataattaaaaattgataattaatctatttttaatttttattagccaaatattcagtgaaaatttttatacaatatattttttttcattttttaggaagagaaaaaatttttttaagttcaatgatttttgccgacaattaattatttaatttaaaatcattttccacattttaggaaggctttcaattgcaatgggatatgttggttgccaatgagacattgaacgatgccattcatctcaactatccaatcagcagcattttgggccaaaaattcaacatccaagtcggtgacaggcatattggcaccagggatgtttcgggaatgtgtcaaaaatctccacatttttgagtcccgcatcccggacagaaaaatttggaacggcatcccggcctgagtccaaatctcgaatgctgaatcgcgacattttttcgggcccggtatcccggccagaaaatttgggtcatccctataagaatcttggatgccgaatcccgacattttcggataatcttaaatgccgatccgaaaatttttggatttttggaccaccgacacgaatcaccttctcgaacatctcgtattggtctccctctctacctatatacattggcattttgttgccataaaataaaatgtatgccaaatttgcagccaaatttcttcggcatccaatttcgtactgccgccactcccgcaacaacagcaacagcaaattcaacaacaagcagtaccagccacacaacaacagcactcggcagcggcggcggtttgtccatctccaacatgcgccgcgtggaaatggtggtgctcacttataaggcggaacgcatcggcgcgtggacagacgacgaaatcaaggagtgggagatgagcgtgtcacacttcttcgaacagtaattatatcaattaatttattattattgttcggggaaaggggcgggcatggtcaatggggcagggcacaagagtgcgattgataaagccgtaaatggccaactcgccgggattcgtggcgattaattgatcgggaacaaagactgtataaaggccgagaaaattgccgacattttaccctgggtctaaagcggggttgccatgtttggtcgacaaaaagccgggtcgggtttcgagatgcgaaaaagtcgagtcgggaaaaaagccgagttttgaagatggcgatttttgtttggggtgaaaaatgtggtctaatgacgtcaattttatccaggccataatttagaggccgtaatttagatgccccataatttatctcg

SEQ ID NO: 3204 - DNA, 4283 bp, Heterodera glycines
ctgtactttaacactactaatgctcatgcatgatttttaccaaattttatttttaattaataatatatggcttatggtccaatcatatctttcctttcaatgaaagtttacgcgcgacttaatgttaatatttgatttacagcaaatgtggctaaacttaatctcaattctaatgctcctttgggattatatctaattttaaaaatcttgaatctattttaactattcttaaaccaaaaaatagcgcgtggacaagattgcgccacctttattgggaaaagaggacagataatggaaaaacacaacgccatttggcttcagccagagttttctggtgtttatgctatttaaaattaaactttaaatttttggaattgttttttgataccaacccctcagattctttaattcatttttacgccaatttgtaatgtatagagtaataataaatatgttggaaacgatgtgatagtgttcattccgttggaattgcaaatgtcaaaaccgatttaatagatttttggatttcttaaaatattataattcaaaaaggtttacgacattcaatttccgaagttttaatttaacttcattcctttagattttctgtttagtcgtgttcagtttctgtttcctcccagaaagtttccttaaatcattttttattccaattaataatataatttaatattgtattctcaagcacatgcttctttttcttgactgtttaaagcctgcgcattgcattcacctgaatttatcttttacattgtatcatctaaatagctcatttaaatcccagtttttcctcaatatggagagccactaaaaatgatttctgatcaaatactctcatatcttcattcattatctgattagaaaatataccgtcttgaattagaattcaccttgtggcaattttaaaagaaattgcagcttcttatatttcttactcaatgaaattatgcgatttaatatataacctttaacttgcagcgaatgtggtcaaagttcagcttttaatttcactgatgcgtctttatatattaattttcttaaaaacactgcataccttttaccattcttagaccaaaattagcgcgtggccagtaatttcagcgcatttcaatggccaaaatgagaaacgacgcaaaaaacaacaacgcctttggcttcagccagagctcatttatgagctgctcctttttatgctgcctgacaaagtttggagtgttagacgcttgctgagaataagcgcgatattttatcggttaatcgccggctctaaaaatgttgaaaattggcgaaagccatataaggtcctaggccagtgtttaatggtaatcagtattataatattgtggtgttttttaatttttaagcaagatgatcaattattttacaaaaatccagtgaaaaataattttaactaatttaaatttaagagcatgttttattttatttttacaaggctaattgtgaattgatcgtagaatccttaaatgcctaattggtttcatttttccaagacctaaatttccgacctaaaaatcgaaactataaatattacgaaactaggatttttggcagcatattcacaaaacttaaaaaatataaaaatatttattttagtacaccaacattaattcggaattgattatttagttaaaattcgtttttttttgcctttcaggcgcgcgagtccgaatactcatacaaggttctcaagccgctggataagtttccggtacttatgcgtcgcttttcgagcgaaggccttccgtttactaccattgacccatacaccgcaaatttgtactttaaattggacgaaacttccgagggcccgggatcgccaaatcgtttgctgaaatttcaagtgttggtgctcttggctaagagcagtatccccgataaggcgcgtcacgtaattataattttattcaattcactcctgaaattcgaaaaattggttcttataaaataatatatataagatttcatttaatcaaaatcctaaaaaagattcattttgttaaaaacccactaacaatttttactaaaaaatttaaaatttaccaaaagacaaaattttttcaaaatttcgagttcaaaattcttcaaaatttctttatcaatttatcactatttatttttaatcacgttgttttccctttttagaaagtgcttctctgtcagcggcttaactccaaaggtgccaagtcggtgatgcttgaggactacggcgtcgatcatttcagagccgtttctgatccagcaaatgtgggtggggtttggccaaagcattgcttggttttcatccttttcagagatttaatttttaggttcgacgattccttttctttttgatttaaaattctttttcatatgttcttttttcaggaacatcccaatccttttctttttttttcttaattacttcaattttggatttaatttcgtcaaattggctttactgtttgtatacaatttttctgttgattttagacgaattttttttatcacacaaattcttttttgactacattttgattcaaccctcggtttaactcctgagatggggttttgtctttattttaattattaatattattaatttttgtccttttaggaatatgtgatgatcgaagttggttttgtccgcaattttgccgatccaccgttctatgaactcggagctgtgtgtgcgactatgaagaatctattgggctttttgacttcttacgtggatagcaaatttccctgccctttgaaatagggcaatgaacagacaaaatggcaaaaaaatgtcaattttttatttaattcgacaatttcatttttcaaaatttaaattaccattccagtggttttcaaatttttcattatgagtatcattgcttttgtggagagaaatcatttgttgttttgaataattgaattttgagagacataaataattcgtcgtattttagaaaataaaaaaatttgagctcaaattgctcgaatcgttattttttataactttatctttaatatttaaatatgtaaaaaatatggattaatgtgagaatgacaaaatgacgaatgagtcaaaaaaaattaacaaaaagagcaagtcacgaaaacagaaattaattttatcttatatttattgccctttatccaattatccatcctgtttgagtatatggcattacttaattccccatccattggttttatgataaaatagtaataataacgtttccatgtaggcggtccagtaggaatcaaaaaagaaaaaattaggaatttaatatgaaatggcaaattaatgaaagacgggcttgcttttacatggaaaatttagatgggaaacctacttaatcactcgtggcaagcagccaaaaaaaggaatttctcctatctttacattgccatcctaagattgcacttttttgctttcccttttagttaatatttattactttgccctttttaatatataatttttttcgattttttcgcggcaacgaatatatttctacacaattttatcaaaaaaaaatcctcaaggtgtcttaaagtctacactctctcttatacattgaccaacgggacttccccaaaaaaagatatcgcgtcaaaaaaaaatcaattttgcatacaagattttgctaaattttacaagaaaaaaagaatttcttttttatgatgcattcaaatttattgggtaattctattgagtcacatttattcctttcaatgaaaaacttctttgatttcttttttcattaaatgattagataattaatcgtttttaaaatttatacaaaaaataatctccatccgaatttgtggtgccttcttttccaatttcccacaaatagagacttaaccgttcacttagttttgcaaggctatttactcaaatcgatttctctggtgccctttagccccattctactccatttttcatatttaaattgtgtttgctatgcctttacttaattcactcctccattagcgtttttattgatataattggtagtgatgttcgagaccgaaaatttcccgagactcgagaccgagaccgagacttgaccccgagacccgaccccgagacccgagaccgagactgaaaaccccgagaccgagacccaaaaaacccgagactcgagacttttttcaaaaaattttcctattcgcttaaaaatcgtttaaaaattttttttgactctattcttaactaatttttggttttttttattttgattcaatttgataccatatttatcatt

SEQ ID NO: 3205 - DNA, 2328 bp, Heterodera glycines
  unsure (1)..(2328): unsure at all n locations
aaaatgtgaaaattgcgaaagccatataaggtcctagccagtgttaatggtaatcagtattataatattgtggtgtttntaatttttaagcaagatgatcaattattntacaaaaatccagtgaaaaataattttaactaatttaaatntaacagcatgttttattttatttttacaaggctaattgtgaattgatcgtagaatccttaaatgcctaattggtttcatttttccaagacctaaatttccgacctaaaaattgaaactataaatattacgaaacttggatttttggcagcatattcacaaaacttaaaaaatataaaaatatttattttagtacaccttcaccattaattcggaattgattatttagttaaaattcgtttttttttgcctttcaggcgcgcgagtccgaatactcatacaaggttctcaagccgctggataagtttccggtacttatgcgtcgcttttcgagcgaaggccttccgtttactaccattgacccatacattgccaattcttacttcaaattggacgaaacttccgagggcccgggatcgccaaatcgtttgctgaaatttcaagtgttggtgctcttggataagagcagtatccccgataaggcgcgtcacgtaattataattttattcaattcactcctgaaattcgaaaaattggttcttataaaataatatatataagatttcatttaatcaaaatcctaaaaaagattcattttgttaaaaacccactaacaatttttactaaaaaatttaaaatttaccaaaagactcaaaattttttcaaaatttcgagttcaaaattcttcaaaatttctttatcaatttatcactatttatttttaatcacgttgttttccctttttagaaagtgcttctctgtcagcggcttaactccaaaggtgccaagtcggtgatgcttgaggactacggcgtcgatcatttcagagccgtttctgatccagcaaatgtgggtggggtttggccaaagcattgcttggttttcatccttttcagagatttaatttttaggttcgacgattccttttctttttgatttaaaattctttttcatatgttcttttttcaggaacatcccaatccttttcttttttttcttaattacttcaattttggatttaatttcgtcaaattggctttactgtttgtatacaatttttctgttgattttagacgaattttttttatcacacaaattcttttttgactacattttgattcaaccctcggtttaactcctgagatggggttttgtctttattttaattattaatattattaatttttgtccttttaggaatatgtgatgatcgaagttggttttgtccgcaattttgccgatccaccgttctatgaactcggagctgtgtgtgcgactatgaagaatctattgggctttttgacttcttatgtggatagcaaatttccctgccctttgaaatagggcaatgaacagacaaaatggcaaaaaaatgtcaattttttatttaattcgacaatttcatttttcaaaatttaaattaccattccagtggttttcaaatttttcattatgagtatcattgcttttgttgagagaaatcatttgttgttttgaataattgaattttgagagacataaataattcgtcgtattttagaaaataaaaaaatttgagctcaaattgctcgaatcgttattttttataactttatctttaatatttaaatatgtaaaaaatatggattaatgtgagaatgacaaaattgccctttatccaattatccaaatttggcttacaaattagcaagattttgttcaggtttttctgtgctctcaaatttgagattaaaatagtgaatatacatatttgaaccacccgaaaatggggtataattggttcctgccgatgccatttccgtattaaagaatattttcgtaatgagtgatatcattagaaaggctctaggaaaatcggacactggaaaatccgacaccggaaaatccgacactggaaaatccgacacaagcagaaaatccgacactagcggaaattccgacactggaatttcgaaactaatttactaattttaaaaagcatttttgattgtttgagttagaattaaaatacatataatacatataagttacaatacttaattttttaaaataaatatttttattgtcataaaatctatctaaagtatacatatgatattcatatttatttgtatgcccttttttgaccatctcaaaaaatttataaacaatcccgcaaatggaatcataggaaagggcata

SEQ ID NO: 3206 - DNA, 2465 bp, Heterodera glycines
acccacgggtgactttcggtgccaatgatttccaccaggggctgttgcatgaacagaaaatactaggtcgttgcataaaaaagggcgcttttttagaaaaaaaattttataaataaaatatcaaaaataacaatcataacaactgtaaatacaatatcactcaacaaaatagtttccctggaccctaacaacctttctccaacgagaaggaagtttcctaatgccgcgacggaaaaaatctgtgccgatctttgaggtcaggtactgccccaccgcctcctcgacctcggcgtcttcagtgaagcgcctaccccgtaaaaagtttttgagagaaagaaaaaggtggtaatccgagggggctaggtcagggctataaggcgggtggggcaacaaattccaattcaatgtctgggaaatgtactgggtattggccctgctggcgccggatgcggtaagcgatatccaccgcccgcagttggtttatgtatctattactgtccaaaatagtgccaggtgccagcagttcccagtacagtgggccatgtactgaccaaaagatacacaacatgcgctttttttggtgcaggttgagtcgggggaccaaaattgggtcttcctccttctttctccaaacaattttctgtgctgtgccatcgtaacagatgtagctttcgtcgcatgtcaccagccggttcagcacataacctctccggtgccttgcgatgttcgaaagacacaggtttagccgccgctgtttctgctgatcagtcggacggtgtgccacccatttgctcctcatcggccgacgaccagatttccgaagccagcgccatgttgttgttttatggcaatgtcccaccgacaattctgcgcaggaactttccgggtgtcgttgcgtttggtgctgtttctccccgcccggaattgttggaaccatttttgcgcttgacgaggagagatcacatccgcgccgagaaattcattcacttttcgcgccgcaggcgccgctttttcgccttttttaaattgctggtgtaatagcttatgtgcaaaggttccaattcttcttatttctatgaaatccccatattttcaagttttgaaatttttataatttcacttgaacctggaaaatgatcagaatgatcaatgacattgtcatccaaatcgagatgacaaataaattcaattcaactttttgtgcctttcaacattcccgctcgcttcatctgcacaattttgtacagggtgaagccattaatgagcgaagttgaaaagaacacaaaagtgttgaaggaggcggtgagcaaattggtgtcaatctgacaattaaaaacaatttttaaatttgattttaaattcaattttccatttgattggccccatttcttacaaaacaaagtttataggcggtaatgatcggaatggatcccttcgatgggtccgctttatcaagtggggccaattggacaacagtgatcaagcgatgcgcagaaaacgcaaaagaaacgacaaaagcaaatgcaattactggcttacaagcacgacgccaaaactaaaaaaaatgaaattaaatcacaaattaatacataccgtaatcccaataaaatagctttggtccataaaccgtactgctttttgtcggaccggcacctaaacgcttgagaatcggttgagtgcgatggcaatgtgcagcatgtaaagtgcgtagttgaacaagtagatcagaaatgtgccgacgttgtaaaatgccgacggcgaagtgccaaaccatgaggaagtggggccaaaaatgggcagccaatagtacacaacgtcgatgatgtaatggccaatttcctttattaatataaaaaatgtataatatttttaattttagttttaccaaaatgccaattacgctcaaaaagcggaagaatggcgaagaaaactccttttttgtgagcagtacaaaaatgatgcgcaaatacagcggaattgagacgatttcataaatggaatagccgacaaaggaaagagttgaaatcatttttgggaaaagtcagcttaatacattaattcgtgaaccaattaaatgtggctaatttcttattcaaaagaccttaaaatttatcgataaaatagtgacattatgccataaaatttcaaaattataagtatatttaagaaatcagaataatttctaccccaaaatcagaacattcttataaataagaacaaatggaagccctggtttaaaggccagcttggactctctattattggcgctaacgaaatcagatgattaaagtgaaaaaaggaagatttacgagcatttaaaaagaaaaaatggtttttttttgggttaaaataaaatttggtcattacccgatcggggtccccgacccccgacaattgagctcctccccgccccgaccccgacatgtcgccccctgaggtccccggcccccgactttttacccccc

SEQ ID NO: 3207 - DNA, 2363 bp, Heterodera glycines
  unsure (1)..(2363): unsure at all n locations
tataaaagaaaaaggtaaatatgcgttggtatcctccatattatatgaatatatattttggtttttttgaaatttttaattaattttagattagttctaacaaaaataatttgaattggttctgaaagattcatgaccaaatagtaaaacgtaaattgcctaatttgcgaccaaaaaaattcagaattttggctacaaaaacctaaaaaattcgatattcagagctaccttcttgtcagcacatagctaaaaaatctttaattttaatttggattcttggatttattttatttttaggcgaaaaacttaccaaaaccaaagacgatgacaattcatggtcatcctcgtcattgtattcttcgtcctcatcaccttcagcctctaaatcaagcagttcagaggcaatggaagagacgaaaaaagaaaaatcgaaaacaaaaaggaaaaagaaaaatgggagaaaaaggaaacataaacagaagaccaaaaaagaaagtgcagtggagaaaaaggaaaaacggggaaataatgatgatgatgatgatggttctgctgccagcagtggttcgtcaagttcaagcagtagttcatctgctgactcggacgaattggatgacaaaaagaaaaacaaacaattggccaaggtgaaagaggagcagaaacaggggtcaaaaggaaaaaacaaagcaaaaaggaagcaaaagaaaggagagaaaaaagggaaaaaggattacgaagataaaggtgaagaggaagaaagccattcatcaagcagtagcagtagcagcagcagtgaagagccaaaaagagaggaaaagaaaaagcgccgaaagagaaagaggagtcattgaggcaaaaaaagaggtacaaatttaaatagattaacggtgctttatactttataacgaccaatacatatataaaattagttctttagaaccaattaaggggacgcccactcataaaatgtcattaatttgtctaatttctaactccgaccaccggattatagcaaattgaattttcttttccattaatgtgactcataaaccaaaattttctgggtcagaatattcgaaatgttgaaaaataaggtcaaacctgtgaattgtgaatgccattatttgaacaaaataactaattttacaaaaagctggaatttttatttaaaaattgcttcaaatatgttcttttaccattttatcaaaaaaattattagaaatttttgaaaaaaacattcacatattttggatgtcagttaaatgtttaattgtaacgcaatagggagacaatttttgaatttttgagcgatatttatttttaatatttttatttaaatgtaaattagtaaatttaagggatatgtctcggctttcaaattagtgaacattaaatagaatgacgacatacagcaacgattattcacaccaatagatgctttgtgcaattctgcttatcattctgctttttaatttattatttaaattggctgttggtgtgatcgatgctttctttgtttttctattttattatttatcataaatttcttaacatttatgtgaattattttgaattgaaattgtagagaaggctattttagtcagaaaacatgttgaaaagtcatataagatgcaaaaacatcaaaaaagcatttattaatttcttgggtaggggtaggaaaaaatcaaaatccgaagtttttatgtttcaattgtagaaatttttttttaaatattctaatttttttatcatgaaatgaggtaaattgaaaaacaaaattataatatattagagaatacctagagctaccttctaatagtaattaatttgattaagcttaaacgaagttaatgatttattatttagcaattaaaagtataattaaatttaattatagcgaacattgatacttttgtcacttcgcccacatgatagatacttttgtcaatgttaccttttacttactttaataatttttaaaaaatcataatgaaaatattacgcatatgttttttttaattttataataaaatagagagagagagagagcaaaagaaagagagagagagaaaggaaactggtaagaaagaaaaaaagaaagcggagaaagtgaggagagggagagagacagagcgtgttaaagagggagagagaaagagagaagagagagagagagaaatggagaaatgaaaatttatttgccaaaatatgcaacgtttattttaaaagaaatttttgatgtggtgaatatttctacattgtatttatctttcnaatgctttcatttttcttgccatgcgnaatgcaaaatttctaaatgtacaatattttanactttattttgtatttattagaaattcatt

SEQ ID NO: 3208 - DNA, 2733 bp, Heterodera glycines
attttcatgatcacttttgtgatattctcaatatttcaatttcttatatccaaatgtattctgtataagttttcagtaggaaattgtaatttgggggttattggcgatttcaaatggatcctcccggaacactgattctgtttatatttagatcgtaatgatctgaaaatgtcagaattcaaaaagtgcgattgcgaaaatagtaaatttgaggttattggcgcttatcaacatgatctgtctgcaacacttaatcagtttatatttaaatcataattagcagaatgtgaaattctctcatttgttaccaaaagaggatttttttctcttccacaaaaaattagttccttctcatataaaaatggagctgcacctttgcacattaaaattcaaagtccaacagctggagaaaaagtaaaacataaaattagaatttcaataattaggggtaattaaaattgcctaaggtattcgttggctatttcactgcggccgacggagcaattcgttgtgtcgccgtcaaattagtcaacagaacagaagcggcttcatctctttttaagaattcgatcagattgatggataaaatctacgaaaaatttgagaaagagcagaggaaacatttagtcgaaataattgacacgtaagaaaatttaattaattaaaataataatttctttcttaaaattttattttttcagtggctatacaacaccctatatggagggcattgtgataatggaattgggcgacgagtcactccgccaacgattgaaaagcggcagacacccggcactcggcgcaaatgaccgtgacttaatgagtgccgtagaaaaattggctcagccacttgtcgagtttcatgaaagtccggcattaatttgaacatttggttgcccaggactttcccaggggaaatcccggtcctagtttttcaaaattaaactatttaattataagacaggcgcagtgtgtgataatcaaaaagatttttgtccgtaattctgtccgggtccttcgggaatacgagccgggttgtctcaaaatgttgagctattaaagttattatgattcttgtgattgatttgatgcgcctcagttgcaattcacatggatgtgaacccgcgaaactatttgtacgtgtcggagaatggaaatttgttactgaaattgatcgattttgagggctctcaattgctccggaataaattggataaaaatgaatgtgttccaatcggtgagcatgctttcaccccagagtacacggggccagaatattacggcgagcatggcagagaggtgggcgcaaggatggggaacgtggtagaaaagtcgggaaaaggttgtgccaatccgagagagggcaaatgccatggccgagtgggaagggccaagggcaaaacatgcaaaaacaaagattatcgttacgactaacggcagctcagcaatactcctctttaatgctgttttaactgtcagatttcgactaaatttgacatttggtcagtgggaataattgtcttcgaaattctgcttggtcatttacgtgccgaacaagggaaggggccgatggaagaggtgaaaatggaaatgatcaagttcacaatttttaagtgaaaatggaaatgatcaagttcacaatttttaagtgaaaatggaaatgatcaagttcacaatttttaaacatatgtaggatgaacaaaaatcaatgctttttgcaattggcaatttattcctcggatttacgcgaaacaatctattcagaagtccgggggaattcaaaaatatgccaattgactattcgaaaagggaatggtttgaacagaacaccaatgcaatggagacggtgctgcaactttggcagaaatttccaaagacggcactgctggttacggtaatggcaagggaaatattgtagtggtgcttttgtgccgaggacaaaacaatgatggcattttcatgaattaaaggcagagcgattatttatagtgaaaacgaaccaatatgtattatatgaaattaattttagaatatgttaaatgtcgacagaaagacgcgtttaacagccaaagggattttaaattatattaaaggatcatgccaaattggagagttcagagaagtcaaaagttccaaagatttgcgaatttttaattcagtgaagttcggcgaatttttaaataaactgcgaattatcaaactaaagaataaagcgaaatgtttgattgaaaagtatagggaattgaatggaacatacaaaaaaataaagataatggtaaagaaagtgatcgaagagcaacaaatggaaatcgaagaaaagaaaaacccggaaaaactcgacgattgcgaaacgaattgatcggcggaaaagcgaagcacccttcaaaatttatctaaaggatttatttgaatgacgtgattacaagccattttagtgtacggaagaaaaaatgttcctttttccctttggtgatatgtcaaaattttctcactgatcccctaaactttttttaaaaaaaatcgtttttttagtaaatcttactctagaacattgtttaagtaattttcttaaaattggtaaattggtgtaaaaaaaatttagaaaaatttttgttcagttgctaggtcgaactttaaaaaatatcaatgataagaatattttaattattatattattttatttgcagaataataaatcataacttagctcaaacttagtcaaattaatgaaac

SEQ ID NO: 3209 - DNA, 2107 bp, Heterodera glycines
  unsure (1)..(2107): unsure at all n locations
agggtgtcttatttgtgcanctgtttttatggtagcacaaatcttaattattccatcatttttaaatttatcttaacgtttacctctgcaactttgccccaattgctgttagtcgcaacgatttttggcaaaactgcacaaatattaggatccaaaaagccgcacatctgattaaagttggttgttgttgcccataaagctgccgaaattttttgtgaaatgccgctagacccgaagaagctaatgtagaaatgtaaggactttcttgattgcttgcatcaatccacgaattttccaatttcaccatttccacaagcactttacgcaatgtgcaagcactttgtcagacgtcaattaattttttgtccagttccgattcctttgtctgcagagtttcaatcacttttctgccaattgttctctcatttggcaaaagatcagctgagagtactgatcgcttttgcagatgccgttcaatactaaaacttttcccttatactcattcaaaaccggttacattaattcggcataagcatccatgaaatgcttgaatccttcgcccttgataattgaaaagggacgtccatcagcaacacaaaattcaaccaatgctaattccattttgtcatatttgtcatttgtgccaaattttatcccatgccaattttccaaatgtctcctcaaatccaaaaatatttaaattaaagtctttaatataccgcaaattatgaaacccggcataattaaatgtaacaggtttcgcaggtggcacgcaggatttgcatattacataattagtcaaatttccatttccatccaaaataatatcgtagtattgacggaagattcgactttcagcccactctcgccgttgtctgggactttgaagatcaatccctgcaataatttcgcattttttcgactttggacgtggctcgccgtcatcataggcaatgttatccaaccaaaattcatcaatttcgtattcatcggaatgactcgccataaattctaaattattatgttaacaaggcaaatccgtagaaaaattaagagaggaaaagcaacaagaagaagcattctcgaagaaatcgctgtaaacgatcgaaatgattgtcaacggacggagagacggctgtaggcgatcggaaaataggagattagtcaatgtttcaattgaaagacaacaaattgattgacaacataattttttgctttcatatttatttttatttccttcaattccttttatagctaatgagatatactaaataatggaattcatttttaaatttttaaaaattacgttgatatttaagttgatggcgtaatgtttgttgatttaaataaatatcaacattgaggttgattctccgcaaaaaaaatatttctaagtgaaaaatgttgatttgccattctctactcgcaaatgcctgcgtcaaaatgccaaacttagccttcaaaagtattttctttggattatgccttttagtgcttcgtctgtgccgttcccattgagtgccaaaacggatgcttttgccgtctcaaacagttctttgtcatagaatgtctctttttcgtcgtttttcggtgattgccattgaaaatatcatcgtatagctatgacccagggaaacgatgcgagaaccgagaaatgaccccgggaaacgatacgagaaccgagaaatgaccccgggaaacgatacgagaaccgagaaatgaccccgggaaacgatacgagaaccgagaaatgaccccgggaaacgatacgagaaccgagaaatgaccccgggaaacgatacgagaaccgagaaatgaccccgggaaacgatacgagaaccgagaaatgaccccgggaaacgatacgagaaccgagaaatgaccccgggaaacgatacgagaaccgagaaatgaccccgggaaatgatacgagaaccgagaaatgacccagggaaacgatacgagaaccgagaccccaaaaaacccgagaaatttctcgacttgggaatcgagaaccgagaaatcttaaagaattaatttaaatgtattttttaaagatcataaacacataaaaaaggggtagctcaaacggaatttttgcgtagga

SEQ ID NO: 3210 - DNA, 2765 bp, Heterodera glycines
tgcccaatgcagaagaggcagtcaaccgcttgactttaagtctttgacgcctcccgacactttaattgttgcctcatcagtttcttcactagtcgcttttggccattgttgcccaaaagcatttgatgccaaattggcaaaaagaatggtcagtacaagaaaggaatgcattgattaattaatttttattcaatttattaattgatattattttagtgtgaaaatgtctaaaaagttaatcgcttttaaacaaaaattttgttgcgcttaggagaaccaaagtttgttgaaatttgaacaaaaaatttgtttagctgatctttctttagccaaccattcaattgatgccaatttatatcgattaaaattatttaaaatttatgttaaaaaatttttatgcacttgacagttgactaaactaaacttttgtttcgagttgacggaaacccaaaaaatttgaacaaaatttgtttagctgaactatttatcatttggccaatttctaatgttaatttggccaagagaaattttcatcaattaaatttgtttgcttctcattattgggctcagacgccatcattagtttggtcgttttcattaaatttaattgactttttgaatgatcactcgggtaataaaagctaaacagataaaattaaaaaattctatccataattataagctaaaagaaagcgtgctgagtcaaaaaacagaaaagtgcaagcactcacaattgtataaattgaaatttaataaaggaattattttaaaataaaaataagaaaatttgaaaagttggaaaagttattgtgctttattcaattttgagcaaagtaaaaaaaattataaacaaaattaaacgaaaattgaaaacaatacattagaacggaaagtgccaaatttgaattcatattcttttttcagacttctttttctttagcattttggcaatataattttcattttttgttgatgagttttaaataaaataaataatattcaattacgctgttttcatccttaatgacccaattaaaatatttaaatataaagcccttaatcttttatttcatcaattcttacagttgtaaagaattatatagtccagcagaatagaaatagttaaaagtggaatggataattcgttaaaaatatacattccgaaatttgttaaaatttctatgctttcggtagcatttttacacttttaaaatctttttattttaaatccttatttgatgcccaagcatcccaatgcccaaatttactgctggtggcgcaagctcgccacctcataacttttaatttaatatgtagattagttattttaaaattaataaaatcaatctaaaataataatttatgaaattgaaatcattcaatataaagttggaataaatattcatataaaatggctaatatttgcaacattttgggcaatctgtacgttcatattgttcaaatttcctccccaatatggtcacattgccaattctttgtcatcaaatacacaatgccaagatacaattcatgtaaagacaaatgagtatggctgcaaataaatttctcgttttcgcacatatttaaatattttgagatttttagaattaattgaaatttttaatgaaaatgcaaaaatgacatttttgaaaaggtacctcctaaaaatctaaaatcgatttaagaaaaatagatactaaaattaactaataaaccaaaacatcatttgtccatatttacacattttggcggtcatgtttaatgtctgtatattgcgatttttcttacataaacttacgggtcggggtcgttttcgcgtgggccgctatcctatgaaaagtcgatactcaatgaaatttagcccggataaagcggtgtacaaatacagaaaatggccatgctgatgaagcagtttaaaaaaggacaaagtgccaaaaggtaattaacggagccacgaaattccctaataattataattaaagggggggggggggggcctattttaaaaaatactttgtcctaattgttacgtaaatgatacaaaaattgaaaatgattccaaatgtggcgatggttgcccataaaagtacacagccaattagagaacagctgggatttatgtctttgaatgtcaaatgaaactaaaaattgctaatttgaaaattgtttattttaattgaaatttttaccgaattgttattaatgccgtccataattttggcaaaattagaaaaaataattttgttaaaaactgaaatatttaaaaaattaattatactgtaagtggccactaaattttcatgataataaaacaatctaaaagctatcgtatgataccccaagattattttttaggttatgtttaagaaaagatatgacggatttttcacgaaaattctgtaaattggcagttttacgaaacgccaatgttggcagtttttacggaacgacccagcacgaatccatattatggagggtttaggaaattttaaaaaatacacctcaaacaatattaaaaattgagcttagaaaaaaggcaagaaaaaatgttcaaaaacgacccaaaaggttagaaaaacgtgtccggttctcattggtttttatgttaaaaaagagtatcaaaatcttatttaaatcctttaaatcgcttatttaaagctgttaatgaaataatagtttaattttttttcttgcaaaaaatatttattaatattatatatgttttaatgaattccgactttctaacttaaatttaacaacgacaa

SEQ ID NO: 3211 - DNA, 3079 bp, Heterodera glycines
tttttcagcctggttttaagaacttttgaattttgccgagttcataaatttttaaggcagggccgcgacgggatatcgtaaggaaggagttagctagacgttaaagcaattaaggcggcggttgataagaggcgtatttgcctcggaaggcaatggccatgatgccaaaagactggatttccaccccaagacttaacattttgccaattttttattaaacgaatgaaatacataaaattaaaaaatttctttgttttggggtaatttaattctgcgccacaaatgtcattttgactgggcgccgcaagtgtctgcgccgcaaaagttgttttgactgggcgccgcaaatgtaacaccgcaagtgtcagcgtcgcaaatgtcgcatcacccagatggactattaaaatgcaagcgtgtctttggtcaattaaactgaattaaataaataattgtctcgaaatttaaatccactgattggttcaaattgattttgaaatgctaaaaaatagcatttagttaggctatcacataaatataaaattatgtacacatgttgaattaaagattattcttactaaattttaaaaaattgcaacgtcgacattgaagcttttttgaagtaattcatttattgttcggatttctcttttttcatatttatttaaaagatttttaattatattgtcattgataaaagagtcaaaggaagaagcacggcttccaccagtaatgtaatcgtaaatccgatttttaaaaagaaatatgaataaaataaataatatacaatatacggcttttgatggtccatgcatttccattaatatgaataataaaaaatataaatctagcgaataatttttttttagatgacgtaacatttacataaatccaataattgattacatttaatgtccatattgtataaaaaatatttctttttaaaaatgatttattattttatataggttttattttattggcacgattgtttttttaattttattggcacgattgttttttctaaattaatacggtaacaataagatttgatggttttttatataacgccctttttgagggttttttatataacgcccaattttgatgaaatgtcttacaatttgattgatttgagggttttttatataacgccctttttgagggtttttatataacgacatagcaccttaaaatgccatttaaagaataagaagcataatatatgtatgtagttatacataaaagtgccatcaaatgtattgagagtggaaaatgggtaaatatttaagaaaggagagaattggtgtgcttttgaaaggatgttcatctactgcggtcggtcagaggcgagtgaaaattgtggtgaagtgaatgagcgaatggcaatgagtcacaatgccttttttctctccccctccctcgttaatcccttcattttctctctctaaccatccgcttcactccactctttaaccatttctggtgtctctctatttttgtctcctcttattccttcacactatttccttctctttctgctacccctttattcttttataacttgtctttctcttctctatcttttcctttgccccctgatagaccttttctctctctctctctctcgccactcccctttctctctctgttgcccattttctctctctctctctcttatcttctcatgttctccgctcttctctatcagccactctcactctctttttctctccctccctttccatctttttttaaaaatcattaatgtttaattattaacattttgaattctgcatttccacgacaaaaatctaattttaaatatttttttctttatttaagaaaaaattactttttttactaaataattttcaataatttgcaaattatttaatttgtttttattgtacaaaataaaaacaatgaaaaatagcagataaaaatacaaatgccatagtcatttttagacaacaattctgctcattgacggcgtaaaagaaaaagaatggacgaggggggggggaatttttcacccaagtaaatttgggttttgtaaaataaaatttttcaacgaatttctaatttttcaaaaaataagaaattgtgttgtctttttggtattgatgaaaaacgaatggaaaagaacagcagagagaggtagaagaagataaacagtggggaggggtcgccggtgaagaggaaaatttctaaaaaatttagctaaatcaaatcattaaaaacccaaattccttccccgttgcgcctacttttaaaaaattggctcaaaatttcaaaagtttggttcattttaggataatctgttacaaatcgtattaaaaactgtaacatttctccttttggcatatacttaaaatgagaggtttcaaactgaaaatttttacattatacaaatttttccaaaaattggaaaaagaaaggccttccgtaaaaacagcgaaaaacaacaaaatatccaattttagtgatattttttattttgtttttttttttcgtcgtcgtcataattcggccaactgttcgttcagctgctcaatgtcacgctccaactcgccccgtcgtgccaatttgtccaactgcgtctgttccggcttggccaactcgccgctatcaattttttgctgaaacaaaaaaatgaataaaatatggataaattttattgaaaggagaaagccccaaaatttaaaatgcgtttttctgtgatttttcaagtgcgtaaatccgccatcttcaggtattgctgaagcattttttgaatttatacaaaatttctcaacaaatgaaacaattaaatgactcgttaaataaaatatccgcatgcatttctctctccatattaaataattaaacgaaaatttacctaggcccaagcaagcctatgctaatgaaaaatttggagcatttttgttgaattgtattaatttttctcaacaaattactagcatttgcaggattttctccaggtaaaatcttagaggggtcagaggggtggtggttcgtcatgacagcgaatcaaactgttaaatttgcaattttctgccgttcgacccccccccccccc

SEQ ID NO: 3212 - DNA, 2940 bp, Heterodera glycines
  unsure (1)..(2940): unsure at all n locations
acaaatggatttgggttggactcgttaaaagtgccttcanccgcnccttttaccctttgctgcggttgtttctgttgctgtttcgatggcatttgctcttgctttgtcggcgtgcctttgaccattgccaccgggtcccagcccaacggcactttggcgccactgtcctcggcgccgccgctgcgctggcgcagctccgcctgcgcccggcactcgaagcgcggctgctcgtcctgcggcacgtagccggccttcacccggcgcggtttgcgccaactgcctcaaatttgatggaatttaaaaaacttttttttaattccgaaaattcatcgacacgacagccccatcctggtgtggttgtggcactatgcctctccccatgcacgaaaactcggaaagtccctggaaaacactacatctataaaaaatttggcaaaattcgttagccagaggggaaagattataaaaaatgatttttcaaatttttttggatttgagttttctgtaagttgacaaattttctaaaaattaaggtgaaattatgcgtccgacggctttgacccgacgaaagaattctccatttttccccaaatgtggagggtttctcgctacttacaattctaaaattagaaaaaagcaaaacaatttggaaatttaccatcagcccgttgtgtggcggcaatgaaagtttcacctgaaaaaccaaaatacaaatttttacagccaaaaaaccactgtcctaaaatttgaaaaatttactactacccccccccccagacttagttagcctcacccaaattttccaaaaatttcgctaaatttttcaaaaaatccacaattgtcgcgtgtatgaaaatgaaattggctcaaaaaggcgtaaatgccacattaataaatccatgcatttatttttgataattttttaaaatttgggtgcccataaagaggaaacgcgcaaataatagccaaccattttttgttttcgtacatttcgatgcctacccgaaacagttttcacgcgcacatcgcccccatttggggtggtctcggtgccgtcaccaccgtgggacaacctccgctgttgttggggttgggaagttttcgacattttgttgctttttgggcgggacaatcaattgagacaaacaattaattaggcagctttaattaattagttaattaattatttggatttgatgaagttgctaaataggagaatttatgaaaaattaaataaaaataagaagatgaaaaatggtaaatcgaaaggcgacaaaccctattattgtttccatgaattatatacatgttttaatttattgagcaaatcgccagacaaaaaaaaaacttcagcaatacaaccgaatagaaaacggagcatacaaatgaatacccatccaaataatgagcatgattcagagaaaaaaaatataggtagttacggccaccggacaggcattttccatttttggcaggactcaaaagcacaaaaactcgggaagggagcgcctaaaggtctaggtttatttgttaaaacataatcatcaaaaatgagtggttttcaaccatttgtacggcctaattaagcacttttgtaattaaacacgctcaaaatcccccatttttgtaaagaatttgtcgggacattcaaaggacagccatgaaaaccctccgaaatgaaactgcgttttttgtccaacaaatttgaaaattgcaaactctatgttcattgcgcacacatggaaagggaaaattgcctttgggtgtgaaaaaggaaacaacacatacatacacaaccaaatcaatgaaaaagtgagaaaaaatcgaatcgaatcgtcgtaattatatcatttagttgagagaggggggggggggactgatcgatcaaaaaaaagtaaattgttcgtccgaggacaccagcatccatcatcgtcggtcagatcagagcctgccggtttgctgcaaatggtggtaacaacggagcaggtaatgcgtgtcgcatcgcgcatagtcaaccatttgcttgctgaggggcctgtgaaaatttgtgggaaattttttcatcgaaaatttatagaaaaaattgaattattgtagcgagaaaaatttttcctcggactaagaaattgttgccaaaattcaatgtgttttgttgaaaccaacaaaattaaacttttttttgggcgacttttaaactcacacacccccaccccctcacgtgaaaattttatacgaaaaatcagtaattcttgaaaaatagagccgcccctttcccctgaataaaagcctctcttgaagaaatttaaaaataggttttttaaattttaattggttgcatcggttggaaaatttcgttccaacaaactagcggagcaactttcgccccgacaaatttatttaaaaaaatgaaattttcaaaatctcttagaattttttaaatcttaaattttttataaaatatttttttggttcattttcaaaatttcttataggattttttttaatcttataaaattatttttttgtttgtcgtaaattaaaaaaaaaattgcttagcaccgaccgtcgcgtccaatcggcggtggacaacgatttgtccagccaaacgccgcacgcctcgtagaccaacgagcgcaggttgagccgacagccgccgctggtgtccaccaatggcacggcatgggaaatgccgagctgaccgaggaagcttctctcctgagcaccatggcacacctaaaaaggacaaaatgccaaaaaaaaaaatttgaataggctaaatccaaagaaaaaagttcgcaaaaaatgtgtccccaccttttttatgcgtttgtcggcaaaaacagtggccaaaattgggtgaaaattgtcgcgcacttctttcaccaaaacgtccaccaaaatgtcagtgtcttcggtggaaatttgactctagaggtcccc

SEQ ID NO: 3213 - DNA, 1944 bp, Heterodera glycines
ggaaaatccaacaaaaaatttgttagaaaattggccgccagaaattgcaaaacagattttccacaaaaaaattataccaaatttatggttggtctaaatttaggagaaaaatggaaaatgttccaaaaatgggggcccatttttggcaattttttaaaaatcattcgttgtcaactcactcaaaatcgaacgcaaattcgtcgacgctgcacaatttcttggcaagccaaagaaggcccacggtgctgacaatttggaacaatttggtccgcaaaagggacaaatgaatgggcagagggtcctgaaaaatggcaaaattgtaaatgagacagcgggggacaaagaaaacaaaaagttttgataagaaaaattattaaaaaaatttaaaagagtaaaaaaggattttgtagggaaaggggcggaaagacggagaaaacttttcaggatgggaagccatagttttgtagcagatttccatcaaaaaattggtatttttgtggggttgaaaaaattaagctatttttttttttgaaaatttgggtaagggtagaaatttcaaaaaaagtaatgtccagaaatactttccgagcatttggtttataatcttttaaattcagaatcattgctttccaaattggacagtctatttttttaaataacaaattatttcaagaaaaaaaattgaaaactacaaaattagggaaaattttgagaggcatgacaaagggtgtaacttttttggggggaggggactcggaataaacgaaagaaaaaatggccaaaaaacgaaccgggaccaccgtgtgcagttgctgggccctttccgtggcacgcgccttgcgccgttgggcccgctttttgaatttgctgtttggcacgccgttccatcgcaacgccgaggagggcgcgaacggagaaaaagcggccgtttttgatgccatcgacccagtcccgttggttgctgcttcctcctccaatttgtccatcagtttgtcctacaaatgcacacacattaaaaaatttggaattgccttaaatattttgctgggccttcaattttaattagaactgagcggaaccgggaattttcgagttgaaaaaccgggaattttggctgggaaaaccgggaaataacggggctagtcccggtcccggtcaaaaacgggacttcggtactcagttgtacgttttttcagtaccagtcccgctcagctctaattttaatcatgtaaaaacgggttaaattataatttcaaaaaaaaaaaaaaaattagacactccattaaacagaagtacgtatatcaggcacaaatgaattttaacaaaacgaaaaacctagaatttagaacttatttattttgtaaaaattttggtataatttttttacagatttcgccacgaacagaaaaaaaaaaatctttttttcgcaattaccaattgcatgtggtggcgctcgttgactttgaaaaaatcggtggccggccgaacagtggaatcttttgcaaaaacattgggcaatccctgggcatgggcgagtcggttcagcctgaaaaatatgccaaaataaaattgccatatgccacacatataaatagagcaattagcattgaaattgcattttgggagggtagtggaatcaattaaaaattggtcaaatatgccaagcctgtagccaggaaaaaaaaattcggagggaggaacccgaaaaaaacgaatttgggagggtataaaaaacagcgatttatttctgtttccgagaccctccattctcaatccactatcaaatcctatgttcccccatttttaaattccatgcacaattcaaaaatgaacggaaaatttattcaaaaaacggtgccagcatttgagaaaatcctgcaagaatgccgatcttggatttgatgactggacaatcgggcactcctccttcccatctcctcacaa

SEQ ID NO: 3214 - DNA, 3495 bp, Heterodera glycines
  unsure (1)..(3495): unsure at all n locations
ttttgtatttgagaaaaagtgagaaacaatgtgatgacattaattgtttgtccatggttataagaaatggtgagaaacaaatattgcgaaaaaatcttatnancaattnaaaagattaaaattccaatttgaaagcggaaataaaaaacaaatcaaactgtgttgttgttctggggaaaacccctgttaattgcccaaagcatgttcaatagcataaaagataaaagcaacaatttgctccaaaatttcctcaaatgcatcgacgttaagtcagtcagttaatgtcttcgcgccagattaactcgcataaatacgagtccatcattttgcgatgatcgaccgcgctttgcttgctatttttttaaagaaataaatttttagcattcctgaaaaaaactgccatatttttgacactttctggcacttttttgtgtttttagaacttctttttgcccttattttgccatttcatgcttttttcgcccttatttcgcgatttttaaattttttcatgtaaaattcacaacttctttaacaaaaatgcattgaaaatttttttgacgtagcttttttggcgacttgtttaaatattcaaaattttttccactaaatttgtttttctttcttgaccaaatttggtttttgaaattttatttattttagaaaaatgtattcaaaaatttcgaatatatttaattatttgcaactgtaatcaatgaataaaatgtgtgccttaatttgataataaaacagtaattttaaaattatacccctaaatttggaactttttcgtgcttattttcgcacttatttcgcgattttttcgcccttatttaaggccttattttggactttttcacgcttaaaaatcccatcgctaatgatcatataatatcaaagttcactcacaaaggagtaggaaaacgaaaagcatcattcaaagcaacacaaaaaaagtcaccacctcttcagtaaaaaacctctttttctaaccaatttaaaaaggctaataccaaatgttcatgtatttttggggtaattaaaattttaattggccaaaaaaatgcgatgatacaaattgcaacagtgcgatttgagttttgtattcatcactgagaataaacatgaatatataaatgaagattaaaaagaacaccacggttaatttttgtgctaattttttcaaaattttccttattttaggctaaattacctatttctaaatggcaccgcccgtcaaaaaaaagaaaaaacattcccccgtcgctttgaggaaaatgtgagccgaattctttttttttgtcaattgctcaattaattttcccgcatttcagcttttgaccatgcccaacttggcctcaaattggcactgatttcgccacgtttcaatgcgctggtggacaaacatttcgatggcaaaagcgaattggcactttcgagtcactttacaattggcaggatgagaacgagagcaaaattgtttgttaagaagagcaatgccacaactgaaactgtgccatttcttttgcacgaccgtctccgatgcacaacaaaattcgctttaaggaccttcggattgagtaaatcaaacaatcaaagaattatcaatgggttccctttcaggcacattgatcattccgtcagcacatttcttcgttccaaccagcaaatttttgacaaaggcaccaatttggatttgcatgtgtctttatccaaagatgtccagctaatttggaatgcttttgcccgtgaaatttggcccatttttgcgccaaacattcgccatttgaattttatgtatggtcatgatcttcaaaatttgtgtcgccacactacgccgacaattctctccgagctcgacatcatttcgatccattcccatgatttgttgcccggtttgatcgctgatgatgggccaaatgcaactgcggcccaagcattgtccaaatggttgcatattccaacaaaagatggacggctcaaacaattgatttgcagtggtgctacgtcaaaactcaatgcattggtcaacaatttcaaggaggtgtgaccatattttcgtaaaatatttggattgattgccattggcttttcgtttccattgtttaggcatttccccgtgccaccacttcttcggccagctacaaaattcgacttgaaacttttgaatcaacggaaattggcccatttgaattgttgaacgaacggaccaacgaaaagctggtattggagaaagaagaaacaaattataaatattataatatcatcgatttgctgttgaagtgatgccaaattgggcggacggttcagtgggaggacaaaaagccggacaatttgaacaaaatcgctttcgatcttaatggagattgcattgggtgagtgacaaatcataaaatttttaaaaattctaggttttaaaatttttttttttaaaaattttcgggggaaacgaccttctccggagtgacccagtttttattgatatcttcacattcaaaattgcagtttatttaggcgattctctccaccaaagacggacaaaatgaaggcaaaaggtggtcgtatgaaaatgaatcccgggcctggtggacagcagaagaaaaaatgaacgaattattgggaaatgaaagataaatcgatcattatgaatggaaattgatctgaaaattgcatacctcacatttatttgttgcttttttgtttgaatatattttaattgtttggatttttgggacttttacacatcagaagtgattgggagttgggttagaaaaaatgagtaaaaaaaatgtgccggcgtgtccctttccatccccagaggataaacaatggattttgacataatttttcaaaacataacgaaaattttttgaagtcttattttatggtcgtgtaaactgcaatagagccattgccaaccagcagggttgggacgcggacagaaaatcccgcggtcgcggattcaatttgcaaatgattctttcggaaatttttccggtcaaaaaagctactttaactgctgggggccgttctaatagagtttttatggaaaaatgcaaaaatatggacataacgccaaaatatggccaaatatggaaatcatgattttcgaccccaaaattgatttgttggacttgatgttctgattatttttcgatggaagccctccctgttcttatatgcttttaatttggttagcagaaaattgtggaccgacatttaccgaccattatttctataatgaactgtctgaaaataattttttcgagaatttgatgctccaaagtagttttttatgtgatttttcggagttaagcagttaatgtaatgaaaatcgaaaaaatttatattgtttcaagtccacttagagtgctcaaattttagtcacttcattgcacccttaaggaaatgatctgatcaactatattttggtccgatatttggcctatttaagatctttttagttcatatttcgggcttttttagtcctatatt

SEQ ID NO: 3215 - DNA, 4293 bp, Heterodera glycines
taatataagaaatatcatgagaaatgtactttattatattttgagaaatgaaaaagaatatatgtaataaaatgatgaaaaccgagtaaaatagaccacctgaattccttgttcattgggtactttccatcgacagtgattgccgccaccaacggtttgtcgctttccttacggtccgcaaggccattttgttcaacttcctaaggaaaatttgtctgtgtgtacaaactcttattaataatgtaattagaaaacacctgagcgaattcctccttgtcgctgacggcaaagtgcactttgcgcttgtaatcctgcgcaactttgagcacacggtttcgccagtagttagaacccttcgggtccttcaagtagtccacggtgtagtaaacaacaaccaatggacgatgcgtaaattggaagagatttccttgggtccgaattccagccaacccattgctaaaaatatataatttgaatgcaatcacatttcgacaaaaaaacaacagtaattattttaacgtacgtttcgtagaggaggaagtttttgattttgtccgtgtcataattgccatcgtaatgaaattcgttcggttcgaatttgttgtgcaacttcttcgagacaaacaccacaatgtcgcttaagtgaaataataatttaatgataaagggaattaaagatgttaaaatcctactcggtgtatccggttttcttcagcaaatccgggttagaggaatgcgcaaagcggaaacggtcacgctcggtgtcggccactttatgaaaggagtccttcagcttgctttctccttcaaacagcccaataacgctaacgtcatcgccatccacaaatttgtcaaagtcactgatgcttttgagttctttcgagctgggtccggcttgtcctcgcatgtactgaatattttgaatttgttattattttaattcctccaagagacattgatcctatgcttaaacccgatttttcaaatcaaaacagcataggttaaaaacttatgaaatagagacaaaattatgagccataagcagtcaaaaatgcgatttacagagaaataccaaaataacgaaaaaataattgtgagtttgacagaatcttagcaattagctaaatgaagaattctttttgaaatactgttggaattttttgtcagaaattccgacttctctaatcttaggaatgcatttcttgtttttgttacaattcgacaaaaacaaaagttgtatgtaaaattaaaagtcgaaaattattattttcaccagcgacgttaaaaaaagaattgtcagccgttttttggatgcaattttttgtgacacccgaaaaatttttaaatcaattttaaacctaggtgcaaatgtcaagtaacaatccaaaaaatagactaagttttttttagtttttgttgaaagtgattttacaggacttttttttctttaattataaccccaattattagtttcaactgttaaaaaatgtaaatattaagcttggaatctttagtaaattaaatttcatgaattcgtgccgtggagcggcttctggatactttcaaaatccgatttgtttttcttatccaataaacattagtaaaaagtattgtaatcaaccagtttcgggcttaaaagtaacttgtgcattattaaattgtttcatattcactagaaaccaacgcttcgatcaatcgttgtagtaattggaatttttccagcatttcactaagcggaacaaagttatgttcttcaatccttgtgtattttatcgcaatgcgccataatttttatccaataaaattaggtattatatagtgttgaggtcctacttgcgagtcattgtttttatgttattgttattgcgcgcacagtcaaagcgaccttgcggcgcccagttagaatggattttcggtaccgatatttgtggagtcctcgcaattacggcgcagaattaaacgaccattttataacttgcatccgtggtatctataggcgccgcgagggaaaatccaatttttattgatttttgttaaacaaatttgtccaaaaattaaagatttttaagaaaataattttttcatcagaatatatatgctcaaaagcattacttttaatcttttaggcagatctttcagaaatctttttttttaatttttaaaagattgagttttacatgtttatggcagagacggtttttgtgtatgcaggagtttgctgacaaccagatgttcattcaactagatgcaattcttcaatcgaatgattaactatcacaacagataagccaacaactttatttttgagaaatttgaggaaggaaaaggacattagaattttcaccaggaatggtgaatataatttgtggagagtgatgaacttcacaaagatgcacacgaataactggtggaaaacagccgtttatgttataagcccaccattcggatgccgaattcggccaatttatgtgttcaaaaataacatgttgacttaagactagtagtcttaataatgtttttgttttatttatctttgttagtattttattttagttgaatttaatcacgaattctttcccctttggtagcaggtgtttggattaacatcctttctttattggtcacttcgttcgcaaaacattgaaacgtggcaaaaaaatgtttccaacataaccaaaaaaaagctcagctgacactcatagataaggcctagcacggagtacagaccatcccaagtccgggcctgctcgcgcgcagcctaccacgagtgttacttcctgatgcagaagtgtgtgtgcaaaagaagaaagaaagaagaatgagaaaataatgaaacggatagaccgtagaggagacgaaaaaaatagcaaacttctggtgacgaaaaaatagaacatatatatatataatccatccatccatttgatgagctgagtgaaaatggatgggagtaagttcatgtaacccattagagtttaaaacagtgagaaaatgattgataatatgttcgtatctgttgtaggtaaagatgatataatccattttacgaaattacaaaaggctcaattgcttaggtatggaccaacgagaaactatgcggttaaactttgaattttaactgcgctggcttgtccacttatgctcatatatcaggcaacgttcggattaatcgggttttcaaataactgtcgcagggattaagtcattaataaagaggaattaaaatattaacgaatttattgatttgttcatttttattattcttttggaggggggagggggggtggtaaagaaaaagcaatgtttcttgaggaataaacgcattacgatttcgtgatttaccttaacgattccttctgcatctcttggtccatcatattccgaagaaacatgccccttcctgaagattttcaatgttggaaaaccgctaactccaaatttatcgcaagtctctttttccgcagtacaatcgacctgaacttgtctaatccaattgatttataataccgttcacaaaacgaactttgatgagtggaattggtgggtcgttgttcttcagtttagtggccgctttttcgtattccggagcgagttttttgcaatgtccacacctaaaaagcattttttggggaaacagcacaggtaatattattcaaaatagaaaaatgcttcgctttcatttgaagggtaatcgataaatatgtgcaataaaaaagtgaggaatgaagtaaccaaccagggggcatagaattctgccaatgcgatgtcgtgctgctgcattcccgagtcaaagctagcatccgtgtattccaacacatcgctagaggagacagtggaaagaacctggctgagcaggaataaaatggagatcgataaaacactattcatctattcggtcctatgatggttgagaaattcttctaaaatgaataagaaaaacagtttgggtttctttttcgataaacttttaagtgaatcgattgccatttgcaataaaaaaaaattatggagacccccttctcttctcatcatctcgtgttaacggctttcctttcaacaaaaataaaatgaatgctttttggagaaagaagcgagcgtagaccgccgcgtcacagagtctgctgtcaattcccaattggctgttttgtccttctttctttttctattacagtaagaataaatgcggatttggcggaaatttaaaaaaaagaatggagaatgaacaaaaacaacagaaaaagcagagcttgagaaaattttttgaaaattcaatcaattaagaaaaacaaaatt

SEQ ID NO: 3216 - DNA, 1177 bp, Heterodera glycines
tatgattgtttgtcatttaaaaattgtagtctctaatttttgcttgaactttcagtcctgctaaaaatatgcaaataggtttcactgaatttaaaaatctgatttttgtgttctctccgtagtgtcagaattagttgaatttttgcaggaaaatagcctactataaggcctctctgcatgccaaatttcataggattttacacattcaagttaattctacgtatcaactcccacatcctagatgcatattggtttaactactctgttattcaaatattaataatttactgctttattacgcgtatttagctggttttgttctaaaaatgcaaagttcgaaaaatttgaattttcgaacttttgttcgaattcaggtccggggttcgaaattggtcgaaatagatgccggattcgtgatcagcggcccctaaacccctaggaaacatgctttcatgtcttttgaaaacaaaaaaaaactttttcaaaaaagggggggggtaccatcgacagtattacccaaaattttaaaacacggtaaatgaccgaacacatacctagttagtttttaatggattaggtggatatcgaatcttttttttcgtgactagaaaaccgagaaaaaagctcgggcattgatactgagagctcatagtccagaaattgcatgacaaatacaaataaatacagcattgaaaaattttttagctaaatattttgagaaaattttcgagcatttcacaattttacattcattttatccttttatccgtgacgcacccttagttccaacattttttcttgagaattttgtggatttttatgtgagcctttagcgctaccgaccttcaattattttaaatagccatcataggagttttgtagttaaaagttagatttttcaagtctaaggaacaggcattttttattttaatggcgacagagttatgttttaataaggattaaaaacaaatcccgagaaatgcataagaattggctacgacatgtgaggcgatcgatcccttttgcctgctggccatcttccattagaaacatcataaatttaaaaggaattaaaagaaagaaagttttcacactcctatttctctttcatttttcccttattttaatctttaatctctacgcctctcactctctctctctctctctctctctctta

SEQ ID NO: 3217 - DNA, 2186 bp, Heterodera glycines
cggcaatggtctagaattggtgtcccgacgaaaaaaaatgtttaaaatttcccaggtattttttctaggcttaaaaaatgagctggtcacgaatctgaactaagattttaaaaatcagtgacttttatctatgatttctcatccttccgtcatttccctcctagaggacagaatggtggagctgatcgaggggttcccctctctcgaagaaaagcaatggcattttactggtattaatgtggttaataagttcgaaaagattcatttgcctataaatgaatactaaaattaaggatacaaatccagaagagcaaaaaaagcattggtagaatcctgcgctttacttcaagtcccacaaaaaattaaatggaagttaaggtctggtctattgacagtttgagtgtgttgttgtcgtttgcatagcgatcgctgacctattaggatttcaacatcaattgttacgactattgttgatttgtgtcatcaaaaatatttacgcatttatttttgatcgtgcacgtaaactgggtctggggttcgaatccgcttggctgcggattattttttatgatgtttgatgaaaaatcatagataaaagtcaatgatttttaaaatctgagttcagattcctgatcagctcattttttaagcctagaaaaaatacctgggaaatttttaacattttttttcgtcgggacaccaattctagaccattgccgcaaaaccaatgctttgtctctgccgtttcagttgatgcaatccttccccggcttcaacagccccgaaattgttgaacagatccgcaacaacatgccgcagctcacttctctcgtaaatgacttaaagacaaacaagctcatttcgttgttccttcccctcagatgaccaacccgcaaatgctgcaggtgatgtccaatccccgcgtggtcgccgccctgcaacaaatccaacaggcatctcaggtccttcgacaggaggccccacaactttttaccaactttccgttcgtgttcccaacctcgtcactcttcattcattttatttttagtggggcggacatgttccaaaaccttggtggtatggccggccttttcgggggcatggctaacgctgcgagtcaggcacagcctccgacttccgccggtgcgactgaggcgggcccacagccgaggtagtctttttcaatttccaatactaacacttccatttccttctcaatccctttcatttcagtgcccctcctggtcaaaacattccgagtggttttgcggaattgcttggttctctgatgaatttaagcaccacagtgaatgtgaatgatttgtcttctaattgttttctaattgtgcttaattattttcagagcagtcagcccccggaggagagattccgtgcccaattggagcaactcactgcgatgggattcactgatcagcaggcgaatattcagggtaggatttgttgcaactttcaactgcttgtttattgaaataaaaattcggcattggttgtaaatttattgaaacaacgctagttaacagattattattgaaatttattttaaaaaacccaaaggggaatttagtttgcagaaaatgttttgtcttaaaaatcgaaaaaaaacatggaccccgtggaactttggcactacacaattctttattctttacattttcagctttgttggccagttttggcgacctttcgggtgccattgagcggctgctgggcggtggcgggcaagggaatgccgataccttttgagagtgacgaagtgctttgaatccattcctgaaagagagctcctccgacgtatttctcccgctgttttgttgtggtgtgataaatttgatcgttccttataattgccccccccccaaaataatggctaaatttcactgacaatgagtgtgtttttatctgcccacaactcgtcatatgttaatcgctttatacacaatgtatcggcttaggacgcgccgtcattaattccattgtttcggttgaaatgtcaattaaactattattaataaaggcatttattgatttcgcttaatgtgtttctatcgacttgtaaatttgttaggaatggaattaattattagcttttaaattcgatttgttgatatgattgatggatactttcctgctgtcttggggtcgcacttcaaaataaaaaaaaaatc

SEQ ID NO: 3218 - DNA, 1369 bp, Heterodera glycines
ctcccttctccgctgcttctgatgtccactttgtccccccgggcggcggctgttccctccccctttttcacttctgccaattcatccgctggaccggatgaatgaacgaacgaattgtggtggcccttttcaaagctctttttgccgtcggcaaaatgccaccgattgatcatttcccccggggggggggggggagtggacggcagtgattaattatttgatctaagccgggccttttgtttggccatagcgttcacttttggatgggtcgggtgggtgggtttaggaggggtatctgatgaaaggacaaaaagagttattatttgggttgggtcatttgtgtaaaggcgcggccaatgggcgaagggaagggacagccgacagaaaaacggacagacaaattcaaaaaacaaacaatcattataagtaggtaagtaatgatcggcagatcaattcgaattggccccattgatcggacggactttgaaatgattggccaatgatcggagggccaatagccgcgggctccgttctcgatatttattgactgattctttggatgccaaattatcctgtcgtaatgagtacagtaaaatgacgataaatttgctgcagcccttttttgtatcggtgtaattttggcggtcccctcccctttggcatttgtttgttttggcaggtgcatttattttaatattttcggttttttgtcggaaatagttgccgttttcttctctttgatttatatttctttctctttttcttcactttctttcttcccatttgcttcactgcttctctttgcgaccatttttgacggtcatttttctttttccacccttttctaccataattcactctttttcactatccactcttttttccattctattttcctcccctttcctcctcttcctcattcctcctcctttccgccttcttcctcttcctttccctctattgcccctccctcccccttttgccctcctccaattggtcccctcctctctcttctcttagtgttcgctgcttccgcgttcgtccacttccccccccccccctcccctccctcttcttcgtccgttgccaattgtcttatggccctacaccaaaacatcaaacaaatcgaatccaatttgacccctggggaaacaatttatgttgaggacatttggccttaattttcggagaaagcagcaaaaaattatgtaattgccatggacagcgatgggacaattggcgaacgaataaaacaacaaaaggccaaacaataggagcaattgacgccaaattcggcgaaagagcaaataaacagacaaaaatatttatcgtattttgtgatttatcccgttgttttaatttgcatttc

SEQ ID NO: 3219 - DNA, 1146 bp, Heterodera glycines
aaatgaatattaatcatttatttttgattaatttcgagttcatgaaatgatcatacttcgataagcttctgcttaattgtgctggcgaacaccaattggtcattcgtcccgacagtgacgcagaagaaacccggacggagcaccctcgccacggcactttccttttgcgaaagagggcgtaaaaacaaaacagtacaattaaactcaccgaatctccgtaagtggcactgagcatcagagttcgaggggggagagaaacggcactctgaaaagcaaaaatagccatgatttacagggccaaattgcatggcacaccttgtcaaattcgcgctgcattttgtgatgggtgagcatcaaatctttgattttcagcacagacttaaagaagatcgagtcaaagatcagcttgtccgcctcgtcgagcaccaaaaatcgcagtttgttgagtttgagctgtacagtaaggagaatttggcacattattggcaacggggaagtgaccacggagccaaggatgagagccatgccctaacagaaatggacgccctcccctcgaaagatttttttgaaaagtgggtatttttgaaaattttgtaatgtaatattacgcgttatttttcattagcccaattgaccaacaactattaacaaacattataattttgaaaattatttcttggaaattacactgggaaaaaattaaaaatcctcaaatgtcgccctccagtttttttctggtttacaggcctgattgtgagccaacaaatttataaaagaagacggaattcaatctcttgctggcaaaaaccgttttccagcaaaaaatcatagaacaatcgatttgcctttctttcatttgcaaattgcatcagccgcccaatggtggtgaccaacaagtcgcagccctgcgcaacatcggccaaagtgtcgggaattggaatttcgccgtaagtgatcaccactcggagagaagtgcctttgcgagaattggcaattacccggactctttaagtctctgctcattacctcgacaatacgtccgtgccgtgtcgcccaattgctgtgccaattcacgcgttggagaaatgatgaccgcctttcagaatcgacaattgtttaacacatgaaacgaatgttttacttcgg

SEQ ID NO: 3220 - DNA, 1541 bp, Heterodera glycines
ttaaaggcgataaagtggctgaaaaccattaggggcttttttcaagccgacctttgcatgagagaagcgttttcttcgggttttgctgtagaagatgagtgtgaagtggaatcttttaaaaaacgaattaatgcgcgcatttaccgtcgtaatattgaccaaaaattttaattaccattggtttgggtgtaaaataaatgctttaaacaaaaagtattaaacacaataaattaactattttgttttattattccctgacaattctctaataatcattttaacccacctttgaaaagcaattgccatttaatgcgcccaaatctgaataagtcgataatataataaatgacataacaaaaaaaatgtcacccccccccccacaattacaattcgtttttctttttttgcggaattgtgtggcattccgtatgaaatttaattccccgctgcccataaccagagggagagctattgcccccatccgaaacagaaatatagtttaaaaagaatctggcaaatcactcgcctggacccgactaaagcagcagcactgtctccaacaccgacactaattaaccctgcgaaatgccattggttaattgtcaacagagcggcactgccttttctgctcaacaatcggatgtccaacaaaatgggcaaattgagtccgatcagcaacagaatgggagttgtgatttgttggagtgattcttgacgaccgtcgatgaaaacaaagagccaatggtccaaattagaaaagggctgaacacgctgagaacggagcacctttacaaaggaaaaagaaatagttctaaattaaaatttgtttgcaatccatcagaatcgatggtcaatttatttcatcagagatcaaacccaaagttttggtatgaaaaaagaccaatttcgaaggggcctgcccatcaatagaaggagtacccggatatatcgggtcagattatttacgagtttttatgttttgttaattaaaatacctcgataataatgaaaatttggagcaccaaatgtacacaaagagccaacaatgatgggtcataaaagagcccagtggcggtgaccagtgaagcggtcaaatggaagaatttgcgatgagaagtcccaacagtggcgaaggacgaggaatgacgacgattgtgtacaataacacaaatgaacaaaagtgaggccaatgagcaaagtgaccaaaacagcaaaagacatgaccttaaaaatgagacgatattttaatgaaaattaaaaaaaaatttccataggggcaccgccgtacaattaaattttttaaccccaaattggctttatggtgcaaattgttaattaatcaggccaaaatttccctataggcttcggtggcctcttactttatgcaaaattttttaaaaagcggcaacattttcatggcaacactaccatttcttctgcttaaattttatgaaatgttaaatagaaagccgcataaaaacctaaaataagtgccatcaaaaaaacgtcgaaaaagcacagccggcaattccaggaaggca

SEQ ID NO: 3221 - DNA, 4243 bp, Heterodera glycines
  unsure (1)..(4243): unsure at all n locations
attattattattagaggatttgttgacttttagttttgtttccctataaataagccattttaagaccaaaaatgagaaattcgaaatttgaattttcgactttttgctcgaatccggattcggggttctacataggtcgaaattaatatcagattcggattctccgacccttaaaacccctaatataatcttttctcgaaaaaactaaaaaatttgttttttgaaaaaagggggcctaccatcggtactattaccgacagcaaataaagcctatatggaaaaaataaaatgccaataaatcacattattgtcggaggtcatcttttcgatattgaaataaatggtcaccgtttgaaacgctttaccttgttactgatctaaaaatttgaaactttcatttacgtaaatcagagtataaatggggcggggattgtcaggtctttttttgttccaaggaatttttgcatatacgagtttagaaaaagtaaatttaaaaaatttcaataaatcattaaaattaaaaattttttggtttctgtgacaaaagttagacctttcaaggaatgagagttgaaccaatagggacgacacactaaaaccagaatgacgttttagacgataatcttcttcaaattttatatatcgatagcaaaaaattttcattaggtttcattttgaaaaatattaatctcgttggggacttaaacacgactccataactatgcacaattaaaaaaacaatttccgagcaatttttcccacccaattttacatagaaatcacgaaattaaagattgcggaatttttaaaaacataaattatattttcagaatcaaaatgcatctgacccaaaaattgcaaaaaatagccaaaccacttcagcctcgaaaggtgcaaaatagcaaatacctatatgatattgtattaattaacaattttcagtatccatttgtcgaacttgttcctttgatgggtaaaaatcatcttgacactgtctcagagagagttcgcggtatctctaataattcttttttacatacatataattttcaaaattcaggaatccatccatgtgttgaagaaagacataatttgtttgcatgtttgaaaaaatgggactacgacgacatgaaatgcacaaaattctccgattcattattcgtctgtttagctaattttgagagcatttaaaccattttacaagcttgattttggaatgtcataagtagggaacggatttttaagggcgaaaaattccaaaataaggccgtaaataagggcaaaaataaggtcgaaaaaattcaaaatttaggggtataatttttaaataactttttttaataaaaataatttaaaattgagacaaacaattttattcattgactaagttgcaaataatataaatttcaaaattttcgggggtaaagggtcgatttaagggcgaacacccaaaataagatttctaaggtcgaataagggcgttaaaacgcaaaattttcgaacaaaaatatgtttttcgtgcttttctcgtcgagttaaaaccgcagaaaaaataaggaaaaacttaaaaatccgtttcctagtcataaggcttagaacaattgacattaagtaccagcagaattttcggttaatactagagctggagtattgttgtaacgctggaaagttaaaaaccccaagtggcatgtagaataacaaaagtcatttctcaagctgattgtgagctttccggcatccatttccgaaccccgggcccgaattcgaataaaattcaaaaattctaattttacgaatttctcatttttgttaaaaataatttacataattagtttttattgaagtattaataagttccattttatttccgggtattagagccggttttgaaccaaaaatttgaaaaagactactaatcttttacaatttagagttgtatggaatcaaacaaaaaaattgtcgctgcacacaatgagcaaagaattaagggagagcagcccttgcacatcgtcgatgaagttagtcgaatactcgcatctgttgaactctggaattaaattaatgcgacagtaaatccgtatttatattgtatagattttaaggattgacagtttaacagttaaattgttgggacctcgatttatgaaagttggcactatcgtttatgtggtccttaatttctgtataatttcttgaactaattcattccctgaatctaagggtagcagtgtgaaagcggaggcgtccaacatactccaagcagacattgaccggcttttccgcaaatggaaacagcccgaacttggcacggcgagtcctttgcttgtcttttctcacaatttgagtcccataactcgaatagtttagatccaaaccaaagttatgaagcgccgcggacacatgccgtactacgtggactacttccaccggaagaacatgaagggatggcgcgcctaagaaaaagactcaattgttttgtaaaaccttagttggatttcagctgaagcttttcaaatggcataaaattgatacaaaatcacaaaagtaaaaaaaaaaagaatcagtcaatcttcatcttgtcagtcataatacctttcgcgcaagagacagttgccagcaaatgtgtgccctcgggcatttttcaattgcatttgaatcacccaccgacactcaatgttcaccacgcacaaacaccaataaatatttgcgtcgctaatgccaaaatataaaaatttgaaatttttcttcgaaaaaagggcggtaccatcggtggtattactttgtcgtaattgcttctaatgatacatttcaccgacaaagagaacatatccaaaatttcagttttttttttgttacccaattgaagattattttaattcatcatcttaattcaccgtcaatttcttcacacatacataaatgtgtatttctctccaaaatagcctcaagccgaaaattagtctttataatgggcggagaatgaatgaattgatgagcatgacaaattgacaaacaccgaaaagaaacattaatccacagcagcaaaaatttggtatttaagcagtgcaaatgcctctccaactgctcattctttctcccaaagtccattcatttgccattttcactgcccttttttaactacaaatttccaaagcatcgaaacatttcagaaaacaagtaaatgtctaacaacaaaaacactctgtcgcttcaaaactccgaaacttcctcgtccgcttcttcttcctccccccgtccaacgtcgccgaacggaattatgaacgaatacgtcaagtgagttgggcatgaataaaacaaacattgcccattccaacggatgaatgaatgcctttcagaagtgccactgagcggatgatccatctgagtgtgttggaggtcggccgcgtgggcaacgacggcgttggcattgtgcaactgcacaacaccttcgacttcggcgcgtcggacgcgcggcggacctgcgcttgttgtgccgttctgtgtgcttccgggtgcgggtgcggccgtttgctggcggaaggcaagtgccatggcatcggaagatgggctaatgctttaatccatcaaccccaattttaagagaccatcttcaactacgcgaagaatggcatcggtgcaaagtttgggagcggaggccgaggatttgggcggagatttggtcgcaaatggcgcaagaatggaagggacggacgcctcgaaacgattcgcgaagggacgtacggaagagacacggcaatcgaacagaacggtgagagggcgggacacgggacggtgcagagaggcggcagaagacgaggagtgaccgtcagaagaaatgagatgcagcggcaggagcaatcgatcggccagagcgacttccatcttaaagcgatcagcggacaatgcgacttccaatggcaaccgatcggatgggacgacgtctttcagcgagaaatcgccagaggcaactcttttgtgacgtcatttggaagaattgacgaagaacgtgcagaaaaaccgcagcagtcggtccgtggaaggggaggaggacgcggacggagtgcaaacggcggacgggggagacgcggaaacggcgccgggcgcggatggtctcgcggagcatcgcgaaactttgaccaaggtggacggactgatcactaattagtgctaatccccccccccctccttcagaatgncagatcgatggtccaattgtggcaggcgtctcaagttcccagtcggg

SEQ ID NO: 3222 - DNA, 3060 bp, Heterodera glycines
aattcacatgcactgttccgttgccgtttgttttggtgcgtaattgatgctcaattctgaccccgccgtgtctattcggcctcagcccacaccacgcggagacaattttggcatcctgtgaaacagcagcagaagaattgggactttatttttgcgcttatttattggtcaaataactctaaagttcggttgcaattcgatgaaacgcgtccaaattgcgcttcggtcctgctcagtcacttccaactcccaacaattgtcttgtcgaagagtgccaatcattagacgattgttggacaccctaattgaagaaagaagaaaagaaagcatttttgttggcccttcctttccttaattaatacatcggaatgcaaaagatgtctctgccccaataagtgaaatggacgtgtccgggagcctcaacctttgaaagagggacaaataacagaatgacaattagggagagggggagcaacagaagtgatgctcgagagtctcaaatcagtcggtactcgagtatcaatgagccgcaccaacttcgagtccaacgccgcggtttgggtaaacggaagtgccatcgtcaccggccaatcgtcccccttccaatccggcacaattcaccaccaaagtgaactgatctgagtcgatcaactaaaaagaaatcggggcaattcagctaaattattgcatcttttggcataacacctgctccaaagattcaattcgttggcgttggaaatgcaaaagcccttggccactttcggccaccaattggggcacggagccacggcacatacagccgaccctccgccgcgtagtggtgtaatgggcgccataacttaacaaaaggggccgatctcccggaaacaaaaggagaaagtcggatgcacagaccaatacggacggacgaaaagtgtgcgcaattcgcgctcactgagccacttccaattgtacacaatgtcggacattgaactttcctacacaattaattaattaattactcattatcaaaaataaataaataaaattcacttgcgcttcgatccattttctgtcattggattggcaatagcccgaaatgaggcgaactttgtcaaaacaaaggattagtcatgaaaattggtgcccattcaccgccagttttgtgggccaactcgtccttttcggttttcgcccaaaattcgaatgactctttggccaatcgctccgttcccggcacatcaacccgaaaaatgccttccggtccgtaactggtggtcttttcaaagtcccggtccgagaaaacagtgatctttatacgacgcatttaaatttaagagatgaagcggtagcacttgtcccattagcggggggagggcgcaaagcactctctcatcatttctctaactgtacatcctcttgttttcacacagtctttcgtcgcttcttcccccccccctcgcattaatgggataatatatctctatgaaactaattattgttatgttgtgcttattcaaaatcagtttgacccatacattggcattgggatgtgctcgacggatggccaacgcaacgctcgccccaacggcgccttcgcccacaacggcggctttcatcaaaggaaagtgagcaaaatgtcgccgaaataaataatgcacagaaattggagaattgaagcgtaaattcaacggaaagctgcagttataacgcataattatgattcacaatctcaagctggcaaaatacgctatgaaacctcgaaatatggccataaaataagaccaaaaacccaaaaaaactttggttaaattttccaaaaataggtattacaaaaaacattttgaagaaaactaatttattaattttttaaattgccaattttcgagagaaataaaataaataaaaccacggctccaacctgtcttataaacattcaagtaattaaaaaaaatgtattttatatgtgcacgcaacaaataggtgtgtaggtgcttctgttgcatgcgcgcgattcgcttgcccctccgccgctcgcttcgcccgccgtatatttggagggattgggtagacgagaaatgcattaggggggggggggggggggcggaatgtgtggtcggtcggcgtccgtctgtgccttgcgtttgcttctccctcccccttcggctgtcacttttctctgcgtttgtcgcttgctctctctctgcctttggttggtttggctgtctctgtcctcccgccactctcagcggcggttaatagccgtaagagtccctcccttcccccggcggtccgctgcttttgctgtggaaaggcaagaaagccccatccatcaattcttcactcatttgccaattctcctcccaaattccttggccatataaattcacccacaatcagcaacactttgtcaatttgagattggtggagtgatacagaaaagcatttaggaaaactgtcgataagtaagagaaaaaggagaaagagaaaacgactgcagcagcaagcagaactgctgacaaatgagggcggaaagaagaattttcgaataattaatcaaccaccaaaacaattgatcagtgatcactcacaactgaacaaatgcaacatcaccatcagttgaattcgctggtaaactcaatgaaaaacttcaaaaaaggaattcagccgggcaattgtagaataaaagtgagaaaaatggcaattctaaggatcaaaaaatcactctcaatgaacggttttaaccaaggcaaagactaagaggaaaaatacagtgaaattaagcgctaggcttcagaaagctaattcacaatttaaatagcatatcttgcggcatggatttctagcctttttcacttattttgtggttaggatttttatgtgctaaaaatcctgaaatatgtaataaaatatgtgctaaaaaatgctgaaatatgtgctaaaaacccccaaaaatgccaaaatatgtgctaaaatatgtgttaaaaattgaaaaaataagtgtgtttttgcataaaaattcccaaaaatctcattctttatcatttttagcccatacaacgcaaatcaaatacatttcga

SEQ ID NO: 3223 - DNA, 1984 bp, Heterodera glycines
tgcaggttttttaaaaaaatagaataataaaataaataaatcatttgttttttgaataaatgcccttccgctgacaaaacccacaaattgggcaaagattccattggttaacccaaaaatatttccagggctttttaaaacggctttttctttttgaacatttccaaagaatgccacacaaaaatattgtataataaatttccgtcaaaattgggcggaagaacgaatgtctggtgggaaaaaggaagtggagaaagcgaaggacggattttgctaaataattataataatccatgtaacaataaaataatttattattttgaaatggaaaaattcaattcccgaatttttttcggcttaatccctttcattttgcacttctacccttttttgtgagtccaaacaactgatcatttcccttagttgcttctttaatttttctcattcgtggattaagcacacttcttggtacatatcgatacaacaaacttcagttaatggcctcattaacggagaagaactcaatttctgtactttaatgaccttttaaatcatttttaaattgtttattaatatcttttttcgaaagttcatcgaccaacctaaaaaacctttcggaagtccatttggccaatgaacgaaatccttttgggaatcggattggcattttgtacgttttgaatgagaaggaagcgcatcggtagagaagtgggcgggggaggggaggagaagagtgatttttttcggaaatggactctccagtttcattgatgcacttattccatggaattatatctctgttttttcagatttattattatttttatttaaataatattcccaataatatttttatttgttattcattgataaagacacatatttttcaactcaaattcaaattttaaatgtgcgaatgattctttgaaagagagggcaaaaagcgttaataaaatatgaaagtgatgtgaattttttcaactgcgactttccctactgaaaaaatatttttgctctttttgagaattaatttctctttattttaaaaaattttttgatttttttcgccagacattcttcccgttgcgttttcataagtcattcataactttcgcacttttttgctttgttttgctggcattttttgcattatatttcttctttttcttcttcctaatttatgttctccccccgggggccattcattcgttcatcccccccccccctcttccattggcattggcatttcctctccccccccttggccaatccgtacggcaaacattggccattccacccatcccaatcctatcccatcccacgaccaccccataccttaagggcattcaaattgggctcatttttctgcctaattgagcagtgccgactttccggctccaaatttttttcacccgccccccggcgacgcctccattcattttgggttggcacgcaatctcttcccactgcgtaggaaaaaattcattcagttcattcgtccgtcggtggtgggaaaaaaatgttggccttttggtggggcggggaacggtgctattttgtaataagaataaaacaaaggcatttctgtggccataagccattatttcgcggagggagtgccgtcattttcgcacgaaattttaaggcacgcaaataaagcggaaaattacccctttaactttacagaaagtttattatttaaattttaattaagagaaaatgtctgttgaatttaactcgaatgatctccaattttgctaaaagcaaaatttaataaaaatttagctttagttaattgcctaattttaggcaaagccctaaaaagaaagtcgaagcgatttgccgacaaattaatttcattttttggtgatcaaaaatgaattaaagtcatttattgagaaaagagcatatttatgtagccaattgcaataaattggcgcctaatgtgcctttgtttggggacgccacgacggaagaggccaaa

SEQ ID NO: 3224 - DNA, 2659 bp, Heterodera glycines
  unsure (1)..(2659): unsure at all n locations
gccattcaatgcttatgtaagtgtgtaaaacaataaaaaaagaaaactcaaattattataaattaattgaaaaaactatttgtcnccattttaagctaaatcccggctttgacaagcgatctttcgattccttcactggccccggcttcactgggctggacaagcgggccgctttcgacaccggcttcaccaattacgacaaacgcgcgttcgactcgttcactgggcctggcttcaccggacttgacaagcgatttgaaccgtttgatggtaaaaaggacaaccctttgattatatttgatttatgttttcttttttcaggctatggcttcaacggatttgagaagcgatcgttcgattcgttcatggggcccggcttcaccgggatggacaagaaaaagagggcgttcgattctttcacggggcccggctttacgggaatggacagaaaatgaacacaaaatggacggatggccaaattcaatcaaatcgttaaaatttgaaatttctatgtgaccccagctgttttctttgctgaattgcaccagttcgatattctcaatttatgcgccattaaaagtgcgatatttgtcaaattccccgaaacgatggaaaacgcaaagattgaaaagaaagttgaaaaccaattatgagaaaaatgcttgttatcactaattgtgcaattaattcgcctaattattgcacataaaaatggacgttattttcagcagattatgagaaaattcaaaatcaagctgaaaatcgcaaacaaaaaatgaaaaaatatatttctctaactatttaaatcccattaaattaaaatattaataacacaaaagcgaaattagcgcatttcgttatttcacgcttcttttgtcaatcattcgggcaaaatcggtccgcgagggcgtccgcttttcccagttgccgcaatgtttctttttttgcgcttttccgcttcatcttcttggcttatgctctgttttttgcgcttttccgcttcatcttcttggcttatgctccgttttttgcgcttttccgcttcatcttcttggcttatgctccgttttttgcgcttttccgcttcattttcttggcttatgctccgttttttgcgcttttccgcttcattttcttggcttgtgcttcgtttgttgcgcttttccgcttcatctttttgctgtcctcttttgttggaggcatcggaaaaagaaatgtgccggtattgagggggtggccaatttgggccaagattcagaacgggcggttcaaatgagttgttgccgaggattctttcatcgaagcgcttttggcggcctccgtttccattcttttcacctgctttttctgccgctctttcgtttgttttttccgcttttcccttcactttttctggcacaatgccaaacccttctcttttgcgttcactctcttccgcattatttttcgatttgtccaatgaattgccgaatatttctgtgaggaatcgcttctgtcgtttgctttttcccaaagtgccaattccgtcgttgttttttgcgtgccgtccttttccctttttttggcttttcgtcgacgttccttttttaattgttggcatcgaattgtctttgtttttgatctgttgccccggtgcctcttttgctccatggccttttccctgttgagacagtccatgtgatttctcacgctgtgaaggcgatcccgaagagtgatttggagacgaacgttggccaaggataagcgccgcaaaagcgaccagtaaaattgggccaagaaaatgggcacttcccattttttggttttctaaaataaaattttggtttttaaaataataaaatgatattttcctgtgggtgctttttcctttcatcgccttccttttataggcattttttgattcttttgactgtctaaacaaacacaatcatttcaaaagctttctctaatcaaaaagcttttcgaaatgtttgtttgcataaatttaaaatttaataactttttttaaaataaaataacactgaaaaaattcagtctcagacaatcgaaagttcttttttaaattttaataaaaatatcgctatttgaataaaattgtaattaaataaacattaattttatgtttatatttattatctctctttttattctctgaacaatcttttccttgtcatttttccaattatgtcttaattggctttgtggactcaattttcagttctcttaaggctaattaggaaaaaattatgagcaaatgaaaagacctcacagctcgcgatttgtcaactgagcaagcaaaagcaaattcaagtgaaaaattaaaatgaaaatgaaatggaaaatggaatcacaaaatatgggattagagaacgaatgtccatttgatttacattttttttcaaattctatgaagaaggggagctttatatcctttctatgttcaaatttttaattgataaacttataccaaaaaaatgtatcaatctcgacttgacagtcgagaacggaacaaaatgttctaacagaaccaaatattctaagttgcgctgtcccccattaccgtcccaaattttacccagctgcaccccatacggtaaatgcgtcagtgatacaaatatcaggaataaagttcttagctttaagtactatagtctaaaag

SEQ ID NO: 3225 - DNA, 5551 bp, Heterodera glycines
ccagattttttaaaaaaaagagcaattttggagatttgaattttttaaatttaggattttagtttcgcgatcgattatttcaataaaattcttatttcttccaatccaaataaataatttctctctgattacatcggtgctaggacaaagaggattttctaaaatttaccatagttataaaaaatttggacaatatttaatcaatgcgtagcaaatgcaaaattcatcaaaaccaccctataaatgaaagtgattcagcggcaggtgctccctcccaattgtcactgcccccagggtaagtaccaattttcttcacaatttcgatattttttcaaattaaatcattgtgcattttgtcatgtgtcatgtgtactcagctgcaaattaaaattgaaatttcttaataaatttgccaatgctttcattaaatatttaattcaacttccatttgggaaaaaattcaaggatggctcgacttctgttgcggctttttggcttggccttcgttttcgccgttttggcctttggcactgcgcagcccccgccgcccttccaagggagcggttcgttcagagaaggtgaagccatcaatttaaatatttaatttgttatttttggcattttaaggccaattcggcgcccctccgtttggtggctctccgccgtttggtggcaattcggcggacgtttcagtctcggcgagtgattcgtcggaatgcagcggaggaggaggaaatggagtgcaaggaggtgaaacaaatgcgcatttctactctataattcattaattcaggtgggcattacggtaatggcaatggttacggtaatggcaatggttatggcaatggcggctttggcggaggcggtgccgaaggtggccaagggatggacatcgatgtggatgttcagcagtcatccgaggaggggaaacgacgccgtaaaagacatagcggattcggacaattgatcgacaaaatcaaaaactttgttggcggcaaagaatcgatggagaggggtaagccaaattagcaaaggaacaattagtgaacgattaattgacccgggattattatacaatttgcaaaattgtaaggttagttaagtattttttaaaacttttattttttaaacatttttcatttttttcaaaataaagtcatttttgccccttattttttaagaaaatgataaaaatgggttccgtccaaaacgcaactataaccctttgatgatgggagcaatgggagcatcgcaatatggtcaaattgatcatcaattaattaacaaaaatacaaacatttgttcccaatttgcaggttcgatgtacggctcgccttatcagtcgaactcggcttatgggaataatcaacagtttggatatccgaacaatcagcaaaatcaatttgggtactctaatgaccagcaaaactcaaattatcaaatgcgctaccaacagcagcagggatttaacccccaattgttgcaacaaaattcgaatgatcccaacgatttttatcagcagcagcaacaatataattcgaatcagcaatatggtgcgaatttggcacaacagtacgacccgaatcagcagcagcaacaacagcggatgatgatggcaatgatgggacagcagcagcaacaacagccatttcagcaaatgatggcaccacagcaacagcagcaaaactatggaatgtattgaaacgaaagattgagaaaagaatgaatgagtcatcgaaatggaaaaaaggagaagcgattgaaattccttatttaaaagtgaatcattcactgatcggtagtacattaattaaacaagaggaatgttttatttgctgctaaaaaggcgcgatgagaagagcgaagagagaaaggaacgggggaaggcatgacatttgtgtcaccgtaattttctctgctaaaattggggaattcttgggcgggggagtctgtaagtctgtaattacgggtttagtcttttttttttaaagtagcaatttggggcgctcacacaacaaagtcaaatccgattgcgcggcacgcgccgcaatgattcctttcctcaaagagtttttgcgcttttccactcatttgtcagcccactttttgttttgaaaatgtatcatttgtaaagcaaaattaaaacccttatcagaaatttcgaaaatattaaaataaacaataaaattcgcaattaccaaaatgcattttcaatatcagcagaatttactcctcaatgagctcccatttgccagttgttcttcgaaaatctttgccaatttccgtggagggcaaaagcctttctccgaccaacgaccatcggccaatggcaaaagagagacacctgacgaagggggggggcgaaagcgacggacggcggtgattcgataaaccgatcatcattcacaaacaaacaattaggaacaaatctttcaataacaaatcttttagcccgatcaaagaaagcgaaatgatcaaaaaaagtgccgtcattccttcccttttgctatgcgccattttggtcgcccaatttattgagcaggtcaaaatcaaacgaataattaagagctaaatatccattaatcgattgcttccgtcgttgtcccctttaaggccaatgcttactgttgtaaagtgtccgattggccaattggccatccgccgaactgcaacatttttggctgcaactgcgactgtctccattgtgtgaacggttcgccaaatttggactgatcatgtccaaaatttgaatcgatgttattcagtgattgagaagggttgttgcattgcgcaaaagacggggctgaccgttggctgctcagaaacgcgcctcaaacgccacgcgctgccgcaacagccgaagcgggcggaggccaaagaggtgtttcagcaagcggacactgacggagacggggcactgagcatggacgaagcggtgggacgaaaatgaaaagcgatgattaggaaaaagaataattaagaaaaacggaaaatgattgggaaaaaggataattaagaaaaaggagatgatgggaaaaaaagaaacacagattattgactaaaagaaattaaaaaaatagatttatgtttttctaaaccacagcattttgattgttttcaggtcaactttttggtgtctaaatggaacatgacggaaggtgagctgaccaaccccgacaaacgccattggttcaccgaaattgacgtgaaccgaaacgaaaaattggagcccgaagagatagacgaagcaatgacaaagtgagagaaagaaggagaagaaaagcggacaaatgaaagaccaacggaataacaaaattagcaaacatttaaataataaaataaatatttccaattaattttttgccaattacgtaaattcatttgtgaaattgtccattgttgcattagaaacgattgggtgggcttaaaaagaaaagcaacgagaaaaataaatggaaaaacgaaaatgttttgtttaatttcgtgacaaattttaggcacgacggaaaaaaatgttagtcaattagtttaaaaaaatccttaatttgtgtgcagtgatagtataattaacaggccactcaaaaaacaaaggattgattcggcgatgccaaaaggccagccgataaaagtcgtggtcgaatttgttaagaaaaagaaattaaattaaatattctggacaggaagtataacccagactcacttcttaatgatgttcatgtgtctccgtattcccgacccaattagttcgggtcgggacttaattttttgaaaaacgggctggttcctgaacctaatccaaaatttgtgctgcatgaatttacttaattttagcgaccaaaatagctttggttcctgaaacttaattagaatttaataaaattatttttggaaacaatcagcagcttgtgtagtttggtatcattaatagaatttttttaaattagaaccattaatggcaattaaattagttttttgtttatttagatggaagaaattgaaaaaaccataagacttgaaccaaaaatgcagacattattaaataaattcagatataaaagttaaaaaattaacaaattttgtcagttcttaattcatttaatttctttaataaattcacttaattaaacattgaatattacgtggttggtcgatcgacgaaaaatgcaaatttgacgatcgacgaattttgctaaatttttgactaaatcaactcataactttacttagacgcaaccaaattgcacaatcttggtatcatacgatagcccttgaattgcgttattagcttgctagatttcaaaaaattttattaagtttttcaaaagttcaagccaaaaaatggaaacaaaatttgcacttttcgtcgatcgaaatagcaccgaaacattaactaacataaataatttaaaaaagaaaatgcaacaaattcttattttcactttgattacggtgatcatatttgaaattgttgaatcggcaaaaaacgagatcatgaagattaccgtaagactaactcaaaaaagcaaaatggactgtctcaaccgcaacaatatggaggaaatcttgatcaagaacaacatggtcaaggacgtcctgtgaatcacccacgccctcctctccctgtttgagatgtactggtgaaaccatggtctcatcctgaagttgatcatcctaacctttttccgccgccttttgagctagaaagaagcaaactgttcttgcatgcagctcacattttacgatcgggaaattttcatgttttgggttttcatctagtaatttgattcccgattaatttctggctttttgatatgtattgcttgattccaactttactttttttcactcaacattaaaattttgggaaatttattatcaatttttaaattttcaattgaatggttcgtgccaactctggtccaaaccagggatggcacggaattccgatttccggcttccgatttccgacatttttggggtcggaattccgatttccggcttccgacatttttggggtcggaattccgatttccgaaaaaattttggtcgccggaattccgatttccgaaatttttgatgaagtcggaaatttttaaaatttttttttcaaaaaattaataattttggtataatttctgttaataaattgaactgaaatttttaaaaatttcccggcgacgcctatcggcaccgccggactccaaaaatacttattttcttgaaaaaattttgtcattttttggacaaattctgttaacaaatcgcattaaaaattacaaaattttcccggcggcgcctcggcaccgccggactctcctccatgttcgcaaaaaatttttgaaaaaagcgcgccgtaaaaaacgtgtaaattagtcactccttttcccaaaaatgttctaaaataatccaaaatgacataaaaaaagattttgataaaataattgaataatttttcaagcgaatatactaaaaacatttgtgaaataccttttacttggttaagaattaaaaatttagcctattaaaatatttagaaaattttttgttatat

SEQ ID NO: 3226 - DNA, 1105 bp, Heterodera glycines
ccgaaaattttttgatccccggaattccgatttccgaaaaattttggggcctcggaatgccatccctggtccaaacagtctttattcttcgttgttattttcgcgttcagcaagtgataattcgctatcaattgtgaggcttttgtctatattccttgccgaattttcaatcgcttcagtgaccattcggtccaatcggtgaacatcgtaatccaacacgaattcgatttgctgtctccgcttgcacaactttgggtgttcgccttggcataattactttttacaaatgcatttaatctcctgttaatttatttttgaatgattaattaccgattaatccgttgtccattccgtaaagaacgcttgtccaatcgaccgcaatttgacctctgtttgggaattgtccatcattttgcctccgtttttccgctgcttacctcgtcaattccccgtgcaattccaccgacgcccttaacattttcgcctcccgaattattttcccctcggcgatggcaattcccacggcgatttcgtcgcaatacgcaaattggcgattgttcgcttccatccgcgcccttcccaaattggtcactgtggcgaagaattttgccaacggaacgtcgagggacaaatgcgcgtgaaagtcaatgccatgcttaaagtgagagggaaaagcatttacagcaggacggattgacctgtggaaattaaaaaaaaattgattaaaaaatactttcattgaaaattcatttttcattcttcccaatttaaaaattgagcttatgtctttgctaatcgaccaacttttcgatcgcttttggccataaatgtctcccaagggacaattgtgaccggacattgcatctccttgagcacaatgtgcgcagcttcggggtcacaattgaaattgcattcggccgtcgaataactttggacattgcccattcctaaaaacggaacaaatgaattttagatcatttaattgtgattagtcccaccgtaaacatttccaccgagaatgaccattcggtggggcaaactggcgaaagtcgggatcagtttcagtgcgagtgcgacatttgtcagtggaccgatgactctagag

SEQ ID NO: 3227 - DNA, 4075 bp, Heterodera glycines
  unsure (1)..(4075): unsure at all n locations
tttttacatataacacgacaactatccttatatttttaatgtcttaaatttgttattttaaccaacgatttagcgataattactagggatggggatgtttagtgataaaaaatcccaaaataattaactaatagtgaccaaaaaatgccaaaatagttgcaaaatagtggcgaaaaagttccaaatttaggggtgtaattttttaaatagctatttttaatttgaaaataatttaaaattaaggaaaaagttttgttcactgattgcagttacaaaatattttcttagcaaatattgaacaagaaaaaaaaaatttgggggaagccccccccctcccggaccccctcccccctcctctgacgatcgctcccggctctcccacaggcacgggtttgtgcgcgaaaaacaggcggcgcgcgaaagcaggcggcaacatcaaagacccgcaccgcccccacaggctcacgcctgacgacggtgcgggtgggtaaactactcatttttccttaaaatttgctttttcattcaatggagcacgagaatgaaattgttattcccccattttgagaaatgataggtccttttttgaattcttaattgaaattgaatcagttttttgtgtgatgggcctgattgggaaggttttttttgataaatgtatcaattttaaattgaagaatctttattattgttttgatttaaattacttatctctatttttgtttaccacaataaaagttaatgcaaaatgtaacaaaaaaacaaatacaaaataattagcatgtgagattttgcataaaattgtgaactaaaatttaaaacaaaataaatatttctgtccgttcgagacataaatattcaatttctttaagaatttttaaaacataaaatcatcgccttgttatggaggccaacaacaagaaaaagattggaaagaagataaagaaactgaagagaagccaaattttcatactttcttaagccaaaaaagtgcaaaataggtgctaaaaattggaaactctaatgtctttatgcaaaaaaaaaatcccaaaagtgacaaaaaaattttatcaatttctcccgcacaaccgcaactttgtcaagaaaataaataataaattttggagacacatttttgcgaaaatttttaatttcttagagggtatattttctgaatttctggtcaatttttaaggttgtctttttctgaaatttttaggatcgattttaggggtgtatttttcgttcttattacaatttttatggaatttcttgaaaagaccaaaataggtggttaaaaaacaagcagtagcatcggcagatggcaacacgagatttttgtcgaattttcccgtatatcgtcactcaaagaaagtaacagaaaagaaggcagagagggaggagaggaaataaattaaataaataaatatgtgtcaaaatcaacgaaaatgggtaaaaaagtcagcgggcgatgaatcggaaattgccattctcagctaaaagtcgctgcagctcaactggggaaagggtgtagtgcagtgccaagtcgtccagtgaatgctcccncgtcacaaatgcgtggcaattctgacgaaagggaaaggatgaaaagaatgttttaaaacaaaagaaaaagaaaccgaaaataatgccaaatttagagggttttgcccaaaagccaccaaaattctcaaatatttaggctctctaccttaaaattttttgttgtctctcgttcagaaaaaccatgccatcccaaatattggaatttgttggcagaaattttgaaattcaaaggtaaattcaaaaaatgagttcggtggatctgttacactgtttaaactttaaaaagggcacccattttatacactttttaggtcatttcaaatgatttttgtaagtttaagactcaaatttaggaaatttaaaattcgaatttctaactttcttctgaacttagtttttttgacgaattttttttttattaagtaccttgaaacatgtttcgggggttttaagggtcgctgaccatgaatatgacatccgtttttactgaaaacaaaattttataaaaatttaaagttagaaaaatatttttccaaatttcaaaatggactaaaacacagtaaaggggtgggtaaactgtaacccaacttaaaaacattcgtaagctgcaatttttcttaaatatttaaaatttcatcgattcaacctcgaatttttgaatttctacctcaaaaaacgaatcggggtaaaaaaacgatcggggtaataaaaacgaattggggtaataaaaacgaattgggtcaaaaacgaatcggggtaaaaatgaattggccaaaaaacgattcttccctttaccagggcaaatatatatgacaaattcaaatttatttttaatgttttcttcagcaatatctatcgaaaattgtaaattttaataattcaaaatgatttcagaaattgctattgaactattcattaatcccaaaaaatgctcttgtaaattttgattaagtataattttagtgcttatatgtggaaaattttgtttaaaaaataaaaatcaataaagttaaattttatgggagattttatgaggaggcgcacgcggccaaattgtatatgcgtaggaagaggaatgggcagtgactctccagcagcgcgcaactacgcctatacatatgtaagtgcataattgtttataaaatcccacaaattaatttatttttaatagattatcaaccaacgacttaaactacccaaaattgaggtaatccctttaccaccagctgatcaaatccaccctgccgacctcaacgcaatgaatgtcctcctccaaaatctttacatcgaggtgaaaactgaattggggaaatgcagaatgctgtggaaagggatgagggtatgaaaaaacttaattaaaattgattaatccatatttttagctcaaaaatagactcataattaaaaaaacaatgtcgggaacagaagttacggcgtaagtcctttgaaaaattaaactaaaaatgattttttttctaaaatcagaaaaaatcatttaatttttagtgtaattggaaatattcgccgccctaagggatgataatttaagaacattttatgttctggaatggaagcttgttcaattgcaaaattcttaaataataaaatgtttattacttaaaggtgactattgtgcctgatggggcacgcttgggttgcactctgcataggattcggaagaaaatgagcaacgagcagttgcttgctatggtcagattaaaattcggtatgtaatattttattaacaatccactcaaaagaagggtgtgaaggggaaatgtacgacggacgattcgttttttggccaattcgtttttaccctattcgtttttgacccgattcgtttttattaccccgattcgttttttgggccgaaacgcgaaaattgaggtctaatcgttaaaattttatttggattcagaaatacactttttaggtcatttcaaatgatttttgtaagtttaagacacacatttaggaaattttaaaattcgaatttctaactttcttctgaacctagtttttttgacgaatttttttaattaagtaccttgaaacatgtttccgggggttttaagggtcgctgaccatgaatatgacatccgtttttactgaaaacaaaattttaaaaaaatttaaagttagaaaaatatttttccaaatttcaaaattgactaaaacacagtaaaggggtgggtaaactgtaaaccaacttaaaaacattcctaagctgcaatttttcttaaatatttaaaatttcatcgattcaacctcgaatttttgaatttctacctcaaaaaacgaatcggggtaaaaaaacgatcggggtaataaaaacgaattggggtaataaaaacgaattgggtcaaaaacgaatcggggtaaaaatgaattgccaaaaaacgattctttcccttacaggggaaaaatatttgacaaaatccaaattatttttattggtttcttccgcaatttctatcgaaaattggaaaatttaaaaattccaaat

SEQ ID NO: 3228 - DNA, 4831 bp, Heterodera glycines
  unsure (1)..(4831): unsure at all n locations
ggcaaatatatatgacaaattcaaattttattttttatgttttcttcagcaatatctatcgaaaaattgtaaattntaataattcaaaatgatttcagaaattgctattgaactattcattaatcncaaaaaatgctcttgtaaattntgattaagtataattttagtgcttatatgtggaaaattttgtttaaaaaataaaaatcaataaagttaaattttatgggagattttatgaggaggcgcacgcggccaaattgtatatggcgtagcaagaggaatgggcagtgactctccagcagcgcgcaactacgcctatacatatgtaagtgcataattgtttataaaatcccacaaattaatttatttttaatagattatcaaccaacgacttaagctacccaaaattgaggtaatccctttaccaccagctgatcaaatccaccctgccgacctcaacgcaatgaatgtcctcctccaaaatctttacatcgaggtgaaaactgaattggggaaatgcagaatactgtggaaagggatgagggtatgaaaaaacttaattaaaattgattaatccatatttttagctcaaaaatagactcataattaaaaaaacaatgtcgggaacagaacaacgaacagttacttacaatggtcagagtaaaattcggtatgtaacatttgattatgatagaattattattttttcaatcccccaaaagaagggttatttatgtaaaaagaaattttattataaaataatcgagcatttcttttgaaaattttctttgacagcatctatcgaattgtaaattttcttaattaagaatgttttcagaaaatttgctattgaactgttcctccattccaaatatgtgtgaaattttatatttaaaatatttaagtttaaaaactttgatggaagatttatttaaacatgataagttaaaatatttatcattcgatagaaggaggcgcacgaggagaaatagtttatgtcatagtaagaggaacgggacatgagtcggccttagcacgcaactacgcttatacatacgtaagtgcatgaatttatataaatcattaaaattaaattattttttaaaattaataaaatccttattttaactcagaaaacacttgtaaaaagaacactgctgggagagaagtaaagcgtaatgttccactgtcagaagttctttctcttggcattgttcgacaagccccactcccaaatttgcggcatcctcagttgtgtttgaaatttctgaaaaatggcgcttcatccggcttttttgtagactttctagcgtattacggaacatttagtcggtcatcaataaaaaactctgaagtcaaaaaagcacatattttaagcgaattttgagcctttttcttcttcaggtgggtttaaggttgggaaatgggcaaaaggtcgtattcggattctgaggccccgaaaactctaaataaaataggaatttaggcattataaaagtcatcgtagacaccgcaaatcaagcggaaaatgcgtttttcgtgcttatctgtgcgtatcaagtgcgctgaaattttaggcatttgccaaaaaacgaatccctagtgatattaaatgaaaaatttgtgagcgaaattaagaaaattttgaaaaccaccaaaatataaatatattgtaattggattattggaagtatcaattcaaggttaaaagttcaaatctttgtattactttatcgcgtttcgtttttcaatacattctgattcattgaagcattttcaaccgacacgacacattcaattaaatgatgaaaataataaagaattaacaaaatttatttttcaacatttttttgttaaaaatttaaaaataaaattattttctgcatttattattgatagaataattgctggaaatgatgttactttgcaccgttatgatgccaagaacgcgaccattattttgatgttgttagctccagtaaattggacaccaatagaaaattggaccctaatcgatataaaataaaaataaaattttggcatagactaaaagataagcattatcttaaatgtctgttttttcattttttaaaagacgaatttggtatacaaaattcctgtggtttccattgtcaaattttctggtgtctatttattttaactttttatagaatttaattagagtgtcaataaatttttccttaaccagattatatttcttttaatttgtataaattatttttttttaaatttattttacaacatttacgaatgaaaagggaaatttaaattattttattttatttttaatcaattattaatcattaaaaatacgttgcaattggtatggcatttctcgtaataaaagattttttcatatattccatttataatataagacataaaagctgaaaatcaaaactaatttgtttaatgaatttttttgattcaaaaaatgatgaaaattaattttgtgattattgtcttcttttttttaatcatactaattgatgcagttaacgaagctttatttgatgatttgtgggataatctaaagccaccgacctcaaaaaactttaaaaaacaaaaatttggagaaaatattgctataaatgaagaaattgttgacaaaaatgaaaattatgagcaacaaaatgccaataaaaaaatgataaagtatgaaaattgcaatgagaaagaaatggaagacacaaagccaaaaatattacaaaaaacattggaggaacaaaatgataatttaatgtcaaaaataaaagtgccaaaaattgaatttgacaaattgagcgaagactcatttgaaaataaatttaacaagctgaccacttctaatgattcggattacaataatatggtaatgtataataaaaaaatgaacaaaacaggaaaatcttaaaatagaatgggttcttaaatacttcaattatttataatttttaaatatttattctggaggcagaaagaagaaacgaaatggaaaccttgaatagatttaacatgatgaagaaggaattacgaaaagaaaatttttataaaaatttgacaaattttctttttgaatgcgaaattgcaaaaaagttgggaacaaatcgtaccaaaatttgtaaattaaagcgaaaattaaagcaagaaagaaagagagctgaggaaagtgaagaaataaaaatggaattgatcagaaaatttgatcaaatgagaaaagaaaaaatttatgggtttaactacgccgagaagaaaagatcaaaaatagaaattgcaattggcaatgaattgggaattagtcgtaacaaaatttacaaatggaagagggaatttagtaagagatcaatggcctaattgaattttactcattattgtcaatttaaggtatcaaaaagaaattttcaacgaaagaaaaaattgaaaaaattaaacaatttgaaaaagtgagagaggaatttttaaaaaaatttaatttaaaaacgaattggaaatttaaagaaaaaatagcggaaaaaataggtgctagattgagcacaatttgtgattggaagagaaaattggactttagacctcgtaagattccttatacttttatttaattataactaatgaaattcaatttaaaaatttaatttttgttaaggaaaaatcagaaattacacgaatgctgagaaattggaatatgtgaaaacaagtgaagagatgagaaaaagaaactcaatgatgagtgaggcaaaaattgccgaaaaattaggcattccaattacgaacttaagacgatggacgaaagaattgggcaccaaattaaacagttaaccttcgaaaattttaaatgctattgcaattttaagaaattatatcctatgatgacagttgagtcaacttaattatgcagagaaaagcctagtgtagtatctctttgtttcttttttctttgtaatttctcggggccaggacgttttcgcgtggggacgttttcgcgtgagtgcctgtttaccagggatggcacggaattccgagttccgacttccgaaatttttgatgaaaagttggatttttcggaatttttttgagttttttgttcaaaaaaattagcaatttttgtacaatttatgttaataaattgcatagaaattttcaattttttttccgacggcacctatcggcaccgccggactcaaaaaaaaaacttaattttcttgaaaatttgctcaaaatcgctaaattttccattttttggacaaaatttgttaacaatttacattaaaaattacaaaatttttcccggcggcgcatatcggcaccgccggacccttccttccccacagtttctcaaattctctttggataaagcgcgccgcaaaaaaagggtgtaactttcccaaaaaaaaaatccaaaataatgtaaaatacttaaaatattttgatctttttaaaaaatatagaaataaactaaaaacagtttgaaattaccttttacatggttaaaaatttagcctattaaatatttaaaaaaaaatttgttatattttattttttttttgaaaaattccgacttccgagttccgacttccgaaaatttttggggcctcggaattccgacttccgaaaaatttttgctccccggaattccgacttccgaaaatttttagtgcctcggaactccatccctgctgtttacgactgaaattggtcggatatgttccaaacatccatttttcgaatcccgaacccgaattcgaaaattttctttactttttttgtttttttatttactgaggctggtactttctttaataatttgtcagcgatgaacgaaaaaaaataaaat

SEQ ID NO: 3229 - DNA, 1026 bp, Heterodera glycines
gccaaatcgcccccgcgggacgcccaataaacatatgctataagataatgtttgtgatgtgaggatgatgatgatgatcattatcatcatcatcacttgttgaaggccacaaatttcacccaatttgttgtttgttgcccggggggacggtggcggcaaaatgcaattggaaaatggcgaaaaatggaaggaaatgaatggggaaaaattttggggaaaaaattattgtaaaccgaccaaaatacggtagaaattttttgatttcaatagtcaaatgaattctcggcacggcactttctcagaactcacgcgctttgacttgtcaaataatttatattttgccaaactttctcttgcaaaaatgccaaattggtttttgttaaaaaattcgtgactttcgagagtctcgaccagagaaaagcctcgcttttttggcactttcagtgtctctcctctctctctctgattttccttttttagaccttagtctttcttgagtttctttcggtgccattctcgactttttcttgagcccccattctcgaccattactcaactcatttgtgtgtgtgtttttgtacaggaactgtacgaccacgtggtcaaatgctggacggacccgggtgttcaggcctgtttccagcgcagcaacgaataccaactcatcgactgtgccaaatagtaattaaaaaaaataaaataaatttttaaaattttaaaatttttaaatcgcataaatcgaattttgaaaaattgttttttgtcgatatatgaacaaattcagtttcctggacaaggtggacgtggtgaggaagcccgactacgacccatctgaacaggtgtgtccgaggaaaaggaatttttgaaaattaaattaacttttttaaatttttaaattttgcattttggcattttttgcaggacattctccgctgccgggggatgactacgggcattttccgaaaccaaatttgagggggacaaagtgcgctttcagggagtttttttgggtcttgttttttgccc

SEQ ID NO: 3230 - DNA, 8489 bp, Heterodera glycines
gtcggaggaaaaagaaattttgaaaattaaattaccttttttaaatttttaaattttgcatttggcatttttgcaggacattctccgctgccgtgggatggttacgggcattttcgagaccaaatttgaggtgacaaagtgcgctttcagtgagttttttggttcttgttttgccccttgccctaccgtatccgggttccctttcctacctcatacagtagtacatccgcccattttatttacatacaatactgtactattacagctctctccttcattcatcattccgccgctctttcctatcgtagtcttttttcttttgtctgtctgtcccactttcttttcctttcctatagtattcttctctaccatttccctccctacccctacagtaatcattatcccccaccctacagtatgttcgacgtcggtggtcagcgtgacgagcgtcgcaaatggatccaatgcttcaacgatgtgactgccatcatctttgtgtgcgcttcttcttcatacaatctggtcagtgcaccacactctttttgccatgatttctttggcatttttctaaaatattaaacaattattaaatttaatttttctgttagccaacgattaattcccatatgattttgcaaatccactttggcatgcgatttttttggcatttttccatttggcactcctatcttttttgaatttggcgcttccattggcattcctttttggcattcctttttcattattttggcattctattttctccccccccccttttaaggtgctttgggaggacaacacacagaatcggttgcgcgagtcgttggcactgttcaagaacatttggaacaaccgctggctgaagagcatttcggtgattcttttcctcaacaagcaggacatgctggcggagaagatcaaggagggccggcaccggctggagacgtacttccccgactttgccaactaccaattgccgcaggacgagcgcgtgccgccggacgaggacatcggcgtgtacagggccaagtgctacatccgcggcgagttcctggtcagtccttttggtgctaattgggctagttataggggagggtaattagcggtgatagaacaaagttttttttgatcaatcctagtgctaattgtttaattaggggaggatacttagcggtgacagaactaagtttttgtttgtataatggctttcaaacccctttgatgaccagattgatcaacttgggtaattaaggattaatttcttttgaaatgcgacggttttcaaactaatttaaatgacatattttgctaattagttcctaacccattcccttccccaccaatcactcatttccccccccctttttttcacattccttctcccccccccccccgggggatgcgattggaatttgcaatgaatgagagagtgagtgagtggtgccgaaaagcgccgccgccgtcgtcggaggggccgggcgatgggggaggggtgctttgtgtttggcttggaagaagcatagcaaaatgtgtgagtgagagtgagtgctctcacacttttattgctttaactgcttgggtgagtgcctaaaatgctttttgtgtctcggctctccccctccccgtccaaggcttttcccctctcttccccccattcatcttgttttctctctaccctctccatttttctctttatccctctatatctcctctccctcccctctgccctttctctctatcttgctttttgtgtctcggctctcccccttctccaacaaggcttttccctcacttttcccgtgcattctctctctctctctcccccctctctctctctgtctctctctctctctcttgtcccctccaattttccctgtatctctccatccccccctcctcctctccaattattgtctctcttatcgctccgtcgcaaatccccccccccccccgggggggctgccaccgctcctccgtcctctctcccttctcccctctctccgtttctaaaaatagcttttctccgtctctcaaattgcgtttgtgccccctatttttggctccccccccccctcactttatggtgcacttttctcttcttttattacacttttcctctgctgctgctatggcgacaaaagaaaatggaaaaaagggaaaaatttgggggatttttttatttgcaaaaattggccaataaaaatttgcgtcgtttcgcggggggccaaccgagcgataagagaagaagaaaatggagaaatggtgatgatgatgatgatgatgatgagataaaattggcaaaacattggccaaaaatagaacagaaaaaagcgagaggagacgaaacgaagaaaaatggcaaaacacggacgggaaaatttacagaaaaatgccgcatttggaagtgccaatttgggaaatcagcaaacagagattactgattttaacatttgattggatgtgatatcgaagtgtcgagattgaactgtttcgggagtgaatttattggaatttattaaacgcattataattttgatttaattgtatagttaattaatgtgtttggctttttgacatttttggcacactgccagagggcaccaataccgtacttctgtttttttggagtgtgatcagaaaattcattttggcctctgctgtcgcttccgtctcttctgataaatctctctgattggtcatcactttttggcagattctcgttttaatttcttttagtttccccacttaaaaatttcacttccaattttatgtccttctcaaaaagaaggtaaaaaaattatttaattatatttttataaaatccaaaaattaattattttgttaataaaatattacatttaacgaccctacaaaataaaattgatcactctctccccccccccaaagtaatcaacttgaaatatttcttacaaattcccaaaaataaacgccccatcccttaattacccttaattatttttttaaattcgataaaataaattaaaaattttgaattacttttcttctttttacaatttccaatctctgtccctttaattacctctaattaattaattaattaattttccccctcccccaacttagaaaatctcttcagccggcgtgaccagcaaggacaacagccacacgcacacctgctacccgcacttcacttgcgcggtggacacggagaacatccgccgggtgttcaacgactgtcgcgacatcattcagcgcattcacctgaaacagtacgagttactgtagcattagcaacgcccacccgcctaccgtatgcggcaccaatgggaccgaccgtatgcgccgcgacggattaatgccaaattcaaaatcataatcatcattatcacgtcacatcattcaccgtaccgtatcactccatccgccgtcgcttcgtgcgcccgaatgcatcaatacaaatttaccgtagacccccttccccccacacaaccaatgtgcgtactgtaccattcttatagtactactaataacagcaacagcagtcagaagtctttatggtcattgattaatgggatactgtaaatcttttgatcagcaagctatcaaaaaggcatttcgggcagataaatggaaatgatcaagcctgatcagttgatgaaaggataaggctatgcttaccgaaccaattaaagcaaaggctaattccggtttttgatcattttattactatctctttttccgatcagggtttttgcctacaattttaattgatttagcatttattgcctaattagtcccgatcactagcatgctcagttcatttggttgtctgtgatcggcttgatcagttcttctgatcagtttctcccccaaattaaacatttctgctgttgttgttgtttttgtgcactaattactattatcattaatatatggcatagtgatccatttgttatgttgttggcagctaaacttttgtcctgtgtttttatcgttggttacagtattcccggccataccgtaaccggacttgtccattctaccgtctgtttgttgtacgatcgatcagtcgccctcccaaaattcgctagcaaaaaatgtctataaatgtatttaaatattaatttgttggctttatcattttttactcctttctctccgatcactcacaaaatgccattttttcttggctttttgccctgcagggaatttattaattgtcaaaatggcaaaaaaaaaaaattgcggcacaaaatttcgttttttttcaaaatttcttcaaaaatttcccaatttttcatggatttgtcgaaaattttcacaaattttcctgcagtttctgcaaatttacgttggattatttcatttttgttcaatttttgctgcacactttgacacgggtgctctcctttaatcccttactctctcttcgctctctctcaccaattaattgactaattaattaattgcttttcccaaatttctcattttgcaatttttcttttcttgtgcttgtgcgcgcaatttctcacctaacacaagcaattttatttttattgttgcttttcgaaccttggcaaatgcttttcccttttatgcagcgacaaattttgtttttatcgccgaattcaaaaatttttgcaagtgatcagacaaacttaatccgccgtgtcagcagctgatccgatccaatgtcgcttatcagttgctcttctgatcactgtaaatccctttggcaccagagtgatcagggatgatcagtgtagttctgtgttgctgatcacttaatactctgatcaatttccaccgacatttccgctagtgatcagaggtcatttattatcattaaattctctgatcagttttttcaatgataagtcaatgaatgcttttgccggttcgattagtgctaccacataatactccacaaagcttttccccacccttttattcatcattttgatcccttgtctctgttcaatttgattattttttatttttgttttattttaaataaattgacaatttttgtaacaattgttttttattttttgcgttctcacaatttctcgccccacaatttatacatattttttaacagcatatgagttcaaataaaagcatatgtatgaatgattaaggtgtaaaaatgttttaaataaaaataatttttatcttaaaaaattattcgctgatcgattgggtttgatcagtgcgatcggaggtacacattggtaacaagctaatcctctctgtcctcccaaattgatcaccgcttatcgatcagctgattttctaagtgcaaatcccctgctgatcagtctgctggtaatcattccgatatttgtacaaagcgctagattcggtgatcattatcgactcgacttaaacggaattaatccctcggtgatcgacagtgatcagcacttctcaactgcaaatacacactgattaggcgcttcgctgtatctatgctgtgtttcgattgagaataccgatcaaaaaaaaagattctgacaatgcatgggtctttaagggaaaaagtgatcagagagacagcgaatggcgccaaacgaatcaatcgatatgccggccatgcccgttccattatcagattaggtctctgcttcctatctctctctctctctctctctctctctctctctctctctctctctctctctctctctctccgtgtctcttactctctattcccttaatttcctttcattatctcttttgctccttctctctgtctctcggttctctcacttttttaccaactctctctctccgccgttttgtcccgctaacactttgttctttaaatggtaaaatgagaggaagcaatcgataaatacccgcaggcacgctcttaacagcagcttcatgtgaagctgccggcattggaatttctcggcatggccccacccaattgtcccgcggcacatccgctccaccgcggctggcagcaatggcattctctcaatattctgtcactctctccctctctctttctttctttctttctttctctctctttctctctctctctctcggcacaaaagggcatgtgaggtgagaggaagaagcatcattacgcgaacggcacacactctttctgcggcttttcgacacgacctcagagcaacgatgagaaaaagcatttttttttgctgggacactttcgcctcgggcacttttcaaaccgaaaaacgggcatctttccaaaaatggcattggcacggcaaattttgtttgtatgcatttgcataaattttgtttggttcgttccgctccctcctcgcatattttgttgctttttttgcaaaaaattcccatgccaaaaatgtgaaaactattcggcattggcattttgtttccctccgaaaagcattggcattttgccaccacatggttgaccaactttgcaatttgtgctatggtgttcctggaacttggaaatttaaatttcaaccggccaaaaacgcgtcaatggattttgctcaattttctgtttttgtctgatcagtgccaatgccaaaaaactcaccgaaaatggcactctgattggcgataacatcctctgatcatttcttctggttacagttcatctcgtggccatacagttttgtttgtttccaccatcgtgacagagaattgcttgtaaatgttcttcgattggctaccgtttcccattccgtgccacaatcatcgtcaccacagtaggcaccgtcaataccgtaaccggccagtgatcatccgcagcattagcagtaaaagcagcagaatctttttgttggtcgcagcattattcagcgcttttgtcgtcgtttgtaatggacaactgcagcaggtgaattttaggggaaaacaaaaaggaatgatcaactgatgtgatcagtggtcagcctgatcagtcatgggcataaacacagtttgtgcttggtgattagggatgccatttttaggcacaaaaaatcgtgaaatcggcattaaataggcacaaaaataggcaaataaaaggcgcattggcaattaagcataaaaagtcataaataggcaaaaatgatttggattatatgagagcaaagatttttcgagaatggaaatcgaaaaaaaaacaggcgaaaaagcaccgaaatttatccagtcgagagccaatccgagaattgtgcccacgagagtgttcgagaatgtaaaaaaaaatccgggaatttttcaccctgagaattgattggtggtggtggtggtgaacagctgattgttggcgtgccgaatttacaacaaacaaaattttaagtttggcgattcgtccgaaaatcgtcccggcgttggccccgcgccgacacattgcaccgaggcgtggcagttcccctgtgacgatggcatccattgcattgcgcgttacgacgaatgcgacggcatcgaacagtgcccggacgcgtaaattttaaattttaaatgtttttggaattttaggaatattgtttacaaaatataatagcgtataataacgaaagaatacagaaatttttagttaataggagaacagattaaggataagacagacaaagccaattaattagtgatactcgagaccgcaaactaacgaagactcgagaccaaaattctcgagcatcttttttagatcggatgaaaagcattgtcaagcaaatgagcgagcttcaatgtcacaagaacgcggaaggtagatcaaaaaaaatatttggattttttggaattaaataaattaatttagtattttataactttttttaaaatttccatttacagacattacactcaacaacagcagcatggacgagaagataatcagcagcacaagcagcaacaggcacagaagcaacaacaacagcaacagacaaaaagtgccgtgccaaaagtgagtcaaaatgccaaaagaaaaaattggaaaaatagcgcccaaattagatacgctttttgattttctgccgaagaatggcaggctttattcccccaaatttgcgagtcaatccgagcctatgtctctgggaaagtgtcctgaaaagtgccacagtctcaaatgaacagctgggactcttcaaaagcattgcttgatgtattcacgggcacaaaatttgaatattttagatttttggaataccgtactcactattaatgcattggttacggtattaccgttcttttcaagaccgacatttttttaaagacaaacgccgcgggcggggacaagcgcgtgccgctggaactgttgctggcgggtgctgctgccttcgtgctcgtctcggcgctcgtgcacgcggtgatgaaggcgacgcggcggcgccggttggcgcggcggcgcggccgcccgctggcgccaaccgacgcggcgccggcttccgcaagggtgaaagtctggtggacgaggaggacgacctgctgatcgcgcaaatgtacggctgatcagacgacgaggagaaacgatcaatttttattaaaaatgcattcacatttaaaaa

SEQ ID NO: 3231 - DNA, 1286 bp, Heterodera glycines
ggggggggcctcctacgattcccaaaggaaaagcattccccgcctaccccctccccacccccgcttcccaaaggaaaagcattcccgtccctgccctctccccctgccccaaggggaaagtattccccgcctgccgcccctcctactcccaagggaaaagcattgacagcccacgcccgggggcaccgttttgttgtgccctttgccctcccccccctccggcgtcccttaatcaccgccccaagacaaaccaatttagcaaggaaaagcgggaaagaaagtgttccttccgctctgatccgtccctttctcacttcgtcgatcatccattaacaaaacacccaaccggctgcaccaattgtttatccgccgccttttcaatggcttttcaatttgaaaaaatggaattttaattgggtaattatctttttttatatttaattttagctttttcgtttttcttgtgccattttccgcctccttttccatttccgttcattccttctcaaagcgagcgatgttctcgcccagcggctcgtcggagctgaacgagcatcaccaggacctgaaggtgtacatcacaacagtgaccggaaactcagaagtaaacatatttaaagccgccatcatccagcaatcagtcccatccgtaaatccaaaaatgccaaaaaagttgggcaaaaatgttttacttgaataattgggctgatcatgaagattcagaattgaggggttttttggattagaaaatctaatcaattaaaccaaatgcttcaatgataaacgaattaaatgcataagtcagtgatcaatattaaaaagaagagtttatcagaaccaaaaatgatctcacaatactgttctcgagatttggggcctcgagaaactttggtagattgaagattgaggggagcttttcaaatttttaaattaaaaaagcaaatttcggtgaattccaattttggtaagggcgcttccatttccaatgattaagcggcactgttttgtttctgttttaagatgcgcaaacaagtgcagcgcattctgatgacactggacgcgctcggcgtgccgttccacgcggtggatatcactgtacgcggcaatgagcaggagcgcgacttcatgcgcgagaaggcggcgggcaacccgcgcaacaacggcacggaagtgccgttgccaccgcaactgttcttcaaaacggactatttgggggtggacaaacaaaccggggaaaaagtgccaaaaagggggggcaaaagatggggaagaaaaaaaaggaaaaa

SEQ ID NO: 3232 - DNA, 1459 bp, Heterodera glycines
tttgttaacagactcaattacatttttataatatcattttaattaagtccaaagattgcctcaatattttttccgtggatataatttcaaattgtccgacttttattttgcatgatcctccgatggctaattcttccttctccagggaatcctccgaattttatttgtcacaaaaaagaccaaaaatgaatgtcagtctttcggtggttgcccatttagaggcggagccaacgtggtaatattgcgaatattatttgcttagaaatgccatttcaactcatttgactatgcttttcagcattctttccttcaaagatgagtttatcgtttgtctgatggatggctggctgcacagaatgagttggtctggcgttgttcttccgaatctttcatttaacgttcgttccgtttgtgcgacatccaatcacttgtccaaaagtaagtcgaaaaacaaaaaaccgcaattattgcaacattttagcttttagaaagtgaccgcctcttcggctccaattccctttttgttttggacattgcgccgtttcttggcggtatttgcgttgtgctcaatgacgggcgtggtgcccttttcagcagtccctccccaaatttccaacccgactcaatcagcgcactgtgggcggcggagataaaggatgcgtgttgttgtgctaccaatttcaaatatcgtctcatttattttggcactataaggtgagattctttcaccgaaactgaattaaacggtgttccagtggcgacgttgtgttgtattcaagagatgacattaataaaactcttgtcaaactttctgtgattcgtcttactttgaaaaacggcactgagtttcttggacgactcagcactgttcgacaaattcgaagtatccatccccatggaagtgctttcgcagttatttgggacgctgtcgatggttgggatttgagatattcggctgacaatctgaagcgcaattcgtaattttaactttttagaaattagcatgtctcaaaatggaacagagtcgaacggcgttgaggacagtcggtctctgactctgaacccgtccaatgagactccgcctgctttggcccttttcagtccgttcggtgcccaatggtggtgctcactcgaagacaattccgggaatttgaggttggtaatccgtacatttgtacccctttcttttttccttaagttcattccattatacaactttggactgggcatttgaaggtttccaactttggatgggcacaactgatggcctccagttgattaacattctccaatcggcggaggtttcactctttccgttctccgtagtgttttttcattgtgcctttgcttcatcagaatgcccattctcgtcatgttgtgatgttcgggtctgatcggctttacctttcgcccgtcatttctgctgatcagatgactgcttgcaacgcgccgcatttta

SEQ ID NO: 3233 - DNA, 3941 bp, Heterodera glycines
ccccccccccccccctctctcagttagtttcgtcggttggtgcctccccccctccaaaaaattttttctgaatccaagtactatacaacagttacaaaaggtcgacatcacaaaagctcattttaggaacaatctctgctgttgaacggcggactcgcaatttacgaaaattatataatttgttcggcctcaaacagcgaatttccggacggtgaaaaggagcgtatttacgtattccatgccgaaaaacaattggatttgtacgaagcaaattccatccaaacaaatcgaattttgcaaatggccctcaagtaaatggaatactaaacagaagttgaatccgtacaccttactcccgaaaatttgagtcgctctcatttgctcactttcgacgtgaattcgctgatcgccatttattctctgtcgctttccctcgaaaatgatcaaagcgcagattcgctctctttggaatgccttgccgaaattcgtattgctgaattcctgccccatccgaactgtctcgtctcaatggacctcacgaggctcaatttctattcgggttaagtttccacaatgctgttagaacatcgttttgtatagtaataacaaagtctaatatttatttatattttaattccattgtgtttctcatcctcctttaaacaaatgaattcttttatttgatataattgcttttttagatgctgttcccttttgtgatgatttggactcacttttggtgaatatttctgggcatttgctgttgctgagcccaatgcaatcccaacaacccaacgaagacggacattccgggaaaacgcagggggaaaacagtgaaaacagcgcggaatttcaagtgaatttgtcatttctcccctaattgaaaactgctaaaaaggggttaacaaaaaaggttttctactcaatttttcaaagaattttgctagagagaaaaaaatattttcacggcatttgccatactatcaaattaaaaacttttttcaaaatttattaagaccaatcgggtgtatttattttttgtcaaacatttaatactgcttgtgtgttcacccacccttcactaattcatttttcattctctcccctcttttaataaatctttaaacacaaaaattaatcactcttaaattgtttgctttgttcaagcttcatcccccaacattaatcgcttcttttgtggagcatttttgggccgcgttgccttccgatcagcacaaaaacactaaaaatgatggaagaattgcctttctcgaagacgctttatggattaatgctggttgtaaaaatagcaaggcaatccttcattattattattatttatttatttttgcatttttgacaattaattttccgtgtttttaggtttggcttcctttgtccacagatcaaaacttgtgcacatcgacagacccagatcaaatccggaggctcagtcgtcaaagctctcgctcgttcatttcccgtcgcattatgttgccaattgaccttggcatttatccgctttgtattactaatggttttgccatcactcggtttgatttaactttcaggtgttaacgatgattatttggcgtgtggtgcgagttgcgtttcttctctaccgaaatcctcgtccgccaaattgtccgacaacatttccctcgtcactgatgacggttcttcctcgctgagttccttcgttggagtcgtcaaaaatgttgactttttgtcgcgactttccgtccacactttggtcagagtcagtgaggtgtcttttctctttctctctgttgctttcatttaccatttgtatttcccaggtgtttatccacaaacttctcaagcaacttttgaaacgcaacctcggcgcctttgcatttgatttggccaccgcgtgtcggtccctgccttacttcgggcacattctcgagctgttgctgcacgacttgttggacgaagaagcgacttcgtcagaacccattccgggtaatggaatgttttggtcggttgtttcgacatttctcttcagaccctcttctcccaaccgccgtcgcatttcttcgcgagttccctgctgaatacctccgcaccattgtcttttgtgctcgcaaaacagaacccgctttctggagtctgttgttctccgtgagtcaccatcctcgccaattgttccaaatgtgtctcaaagaaggccaattggacacggccaccagttgtttgatgattttgcacagcatggaaaattttaaggagagctctaaggttttactttagctcgtgttcaaaatgtcagcatttttagttgtcattccgtttgttagaagaggcgttgacaaagagtaaatggaccgtagcccaagtaataaattaaattaattcctttttttaataaaattcgaggacatcatctgtttcatgcacaagatttcccatgcggttgatcaggaaattggcgtcagcagtgaggactctttgttggaaggagggggccaaaaagatcactgtatttattgtcggacattttcagtgcatttgattttcagttttcagattctcgatcaaaagttgagaaactcatcgacgaggctttccgggagaaaatccaagtatttctggacaattgtaagttcacgtttgccggaacatgcaaattccgattcttttagcacattatgattgggagttagagcagtcgagtggagtcgcaagtgaatatatgtgagtgatgtcttacgatttgttttcggaaactctcatttcctgtctttgttttagcactgatctgatcacttttctgaacaccactttcgtttcctttgccaaccttccgcccgttcttgccaggcatgtccgtatgcaggtcggaaactcaccaggcccttaaccagccgaaggcgggaaggggcaggaggagcttacctcaaaatgaaaaaaaattgaggaaaaatatacatttttttgaaaattaatatcatttttcttaatattcgcaaaaatttgttttctccgacaacatcgacaaaaagtcttcgggttcctccaccgatattcttttctgattaatgtggcctataaacgcacttaaaccctatttcatatgttttttagacgtgtaaattccttgccgatcgcatgagttcgatgttactttcgtcggagcatcgttcggtcagtatcggtgcacttgaacagttttcgcttgatgtgatgcaatgcgaacttttcactgcccaacgccccgtgcccggtttcgaagataatgctctcgccattactttcgcacatttgcgtcaattgttggatttggtgatggggcccgactggacaactttctttgccgaaagggatgaaggaaattcgcatcgcaagggcggaagcagcggcaccaaatacgcccgagtaaaggcgtcgagtgccgcggcacttatggaaaagtaaactttcgaattgttttgtgtccatatttaaaaaaaaatttagagtaattgaatttgaaaagaaaaacagcggcttttttgctaatggtcgagctgcgagttgcgataaacagaaactgtgtgagacgattttacggaaattacgatcatttaccgattaatttttaatggtttaaaagtttgttacctaaaaatttttaaaaaacaaatgaaaaatcggaatccctcgggatggattagtatcagggggcgtatctagaacattttttcgggggggggggcggcctgagaccttttttttcttttgctcttcaactaaagaaggaggtccggcggtgccgataggcgccgcgggaaaaattttttaaatttgagtgctatttgctacaaaaattttcgtttggggggcaattcgaaacaattttccattatttgctgtaaaatttttaaaaattttcatttcggggggggggggggggaaattcccccaaccccccccccccc

SEQ ID NO: 3234 - DNA, 2422 bp, Heterodera glycines
ttttacgcgtcccatggcattttacgcgtcccatcatttacgcgcgcatttttatctctttttcccgtcgggacaccaattccgaaggattacccttttttcgaaccgtcaatcaaaactttatatcttccgaatcgtataattgttcttgattgtatactttgattatcgaaatgtgcaaaagcaaccctaagcaaacttatactttggtttagtaacgaaatttttagttgaaaatttactaaatacacaacaaaaaaaataggtttcctcttagttagggatggcacggaattccgatttccgaaaatttgtggcttcggggcctcggaatgccatccccgccatggacacaaaaaaatgtcatgggacgcgtaaaaccgacttagaacccccccgattttctcgatgggttttggggtcacgaatatatggcatttattttggcgaattgcgaatccggaaaaggttagaataattgtacgtatgccttttcacctttttcgttcctatttcacgtgccgtttgtctgattaatggatttttctcagagtattttattaacagtaattgcaattgtcgtttggcctttgaatgtttccctgattgaaacaattataaacaattctcaaactggttgcctttcattcgctccggttacttttgttttgttttttcaatttttgttacccgaccattcactttcagccgcgcattttcccctcctccgtctaatttccccctccctcctcactcgtcccattaacatttttacttccttaaaagcgtttcttggcaaaagaagggaatagcagcagaaaggaaaagcaaaatggtggccattcattgtttggtgctgctgtttttgttttgttttgtttcattgtgcggaagcgaagacaaagggagggaaagtgaagaaacggacgaatgaaatgaatgaataaaaatgcgttccgtccctttctttgctgctaataatcgtcgcttttatttgtttctttgcccgaagcgaaaagggcgaaatttttaatggcaaatgttttaaaattcgctgtttttaatttaatttttccttggcttttccttcgtcagatgaaaagtgtcctccgtccccttttgccccgtgcctttcccttcgccctttgcttttcccttctcagtttggctttttccattattttgccttcgggtgagtgcccaatcgaaagggaaaagcggcgcattccttccttttaccgttccctttgaggcgctcacctgcagagtttgagcgcgacagaaagtgcccaattggccacggcgtgcggccgttccaccgaaagttttcccttgcgcgagggccgagctcacccgtgggccgtttccttcatgaccaaggtcgagtgaccatagtcacccaattggaccactaaactgaagttccatcttttagggccgcaatagactcgggggcacaattagtgagttaaacattgaatttgccgggggttggccctcgcacacaaaatgccccaaaaatgccggcactttgggcattttccaaagtcactgattgatttgccattcctttctccaaattatcccatttccattttcttcgctgttttctgaccttagtttcgccttggcacattttgaccgctgcccacgcctttctccgcttcgatacgattgctttcgacaaatgtaagttagtgagtcggcccctttcagttttatgccatcttttcgcagtgtttacggttatcgcaacttcgagacgattcggcacggatggaccgttgtttatggggacgattgcatttggcagcagcagcacgactatttgtgtgctcggcccaacctgacgcagaatcgggtaacacaaatcaggaagagggaccggtggaggcaaattgatcatttgcgatttgatgagtgatttgggggaggggaggggggggggggtcatcttagtaattacatggaagagagcggactgagacagagaaaaaggaaattggcacatattttccgtgttggattgtttcataaaacccaccatttagctatttttcgataaaacatggcataaatttgcttaaaatcaaaaagctggactattgaatgatatttagaatgtaaaatttgattggtccttttaaacaaaagttataccatgttttgtcaaaaaatagctaaaaaggtgggttgacaaaagagctatagcacacatattttctcgtgtctcattagttttttttcatttaaaaggaggacttaggtatatgcactagagttggttacacgggtcgggtattcgggcaaaaaccgagtctgggattccgggtccaggcccaagtttttcaacgaaggcgtctgcgacaagaaaaagaatactcaggaaaacaaatatatcaccgaatgatttgtaattatt

SEQ ID NO: 3235 - DNA, 1792 bp, Heterodera glycines
tttcatttttcggttgcgtcagtggccacgattgggccattgtgagctcgaagtgcccattgccttctccgaccgcgtccttcccatttgtttgcccgcttcgcccgcccttcagcaaatttcggacggcgaagtgctgacagtgacgagttggggacggcgcgatggtcagcagagggaaacggtggcggagggggggggggggaattccgaaaaagagaaaaattcaaaaagagaacagtagcaaaagtgtgcagaaaggggcccacccctcgtggagggataaaatttatacgaattgaaagtcgtttcgtataaaaaggaagctcgttgttttttttaaatgagctattcagttcttttccatcatttttatgaaaaaacctaaaaccgatgactgttcgttcatcttcgtccttatgatcgcttgttaactttagccttccataagggtgaccctctgatccgtgagattccgttgcggcatgacgcgggatgcaaagtgtggcaaaagatgggtggtgagcatggcattgagtggtcaaattttgttgtagggaaggccttggtcggacacaatgccaacgaatgtggaggattacctttgtgcgaaggcattaaatccgaaggattatcatgcggccaggacatgccatgtgaggggagaaaatccgatttaagtgaccgaaatgctcagggggacagcgggtcgggcatggaatggaaacggaggcgcaccgttggcattggcacggcaccgccgcggcaaaacgccacccgacaaagggcaaaaattgagccgcaacttcccccagctgctgctttgtcttccgccccattttcgcgttccgcgtctgatcagctgaccaacgtccatttggtgggcaacggatcaaaagccaacggaagtctaacacaacgaattgttacgatgccaataacagaaaaaagagtgccgttgaggatgaaacgccgaaaatcgaaaagtaaattcggacggatggaaaagcaattatcaaaaagttaaaaaattatcctttttgttagacttttcccattgaaaatgcaatgaattattgaagtctttacagtacattctcgaaatgtgctccgaacgccgctgataattcccgaattggaactgatgaaaaagtggcgaaacagtcgaagaaatgacgaaaagccaagcagagaattaccaagccaaggggaagatgaagcagtaaaattattgctgctgaatgatattgggcaaagtgcggaagagcgacgggaagaagtgatcggaagaacggaccgatcggaagtgatcacggaactgatcggggtcacctcgtatgggtctcgtcagtgcggttctgacgaggtattagttcaggagagagaaagtcgttgatgattcccctcatttgtcagttggcccgattcactcggattgcgcattatgtgaagaaagtgtgtgctttggtcggagtttgctatcaattggccggcaatgaatgataaggacggaacggcggatggcatttgcataaaggacaaaaacaaaacaaatgccaatggccaagtgaaaaagtgattttgccattgcctctggtggcacttcgtttcctttctcattttcatattacgtgtaacaatcgctcatatttttgtttaaatgattgttttatgtttttatgccataccttcggacaaaaaaaaactcataaacaatgggaattttggcatttaaaaaaatgatttttaattgtctaaatttggcaaacattaaaaacatctcattggcagc

SEQ ID NO: 3236 - DNA, 1106 bp, Heterodera glycines
ctactacgaagtgtacggaaggaaggacggaaaggggcgacactgaacgaatgtttaggaatgaccacgaagagtttgtggtggacccggcaaatgcgccgcttaaaaacgtcgtggaaatgggcgggggaatggcagcgatgggcgacgggggcgaaacgatggcaatggtggctaaatttgacgacatggtgggagggggggggaggggcgaaaatcaaatggcactttggcagagagtgtcgaagaaagaacagctgaggagggaatcggtggcacagaaacggtaccatttgtgctatacggtgaaactgaggacgcaaaaacaccaaattgaactcgtcgggaagaaggcaagcggacgaacgttgctttcccaatttggtcattgtctcctcattttgcataggtttccctcccattcgctattctcgtcggcccaaaggcggacgtagaggccaaactgttcatggaacggtcttttgcggatttcgtgcgaaggccggacggagagttgccgaaagtggtgaacggatttgaaatggtcaacgcattggagatgaaatttcaggtgaacaaaatgcaaatcgaggagaaagagagagagagagagacagagagagagacacagagagacagagtgccatgggaagaaaaaatgccatgtgaagagagagagagagagagagacatgggcaaaaagggagggaagaaatgatgccgtggggagagggagaaagggaaaagagaagtggtgataagagttgttggcatcccaaacgaactgtcagtttaggcattggtggcgatctctcaaaagtcagactccgtcgctttgcagcagccgcgccccttttccgcggtctctcgtcagcatttgctcaaccgattgaaaccaaacagaaacggactcatttctgtggacagttttcttaaggcgaaatcctaatccttaaatttcgttacaaaagacagcctaatttattattaagaaaatgtttagatgcctgcagcggaggaattttgcagggcaaaaagcaaaacgaatagcaaagagaacggcggagaaggaggggcccaatcgccgccgggaagtgtggcgagtg

SEQ ID NO: 3237 - DNA, 5170 bp, Heterodera glycines
tgccgagcagtgatagcactaaaaacaaaaagcttaatgtataaaattctgctttcgatacactatacatcccgtagctcagttggttagagcaaggcacgattgctggggtcgtgggttcgagtctatagatgcttctatgtatcgataatattgtttttttatgcacaaatgattagaaaaccacctaaaattcagtgatcacgagctgatcgtctgttacaaaaccaaaaaagtgaagcacgtggtcaacaatgaaattgccgaagtttgccaaaaacatcttggaaatgttgggcaacagcaggcgcacggatttcgcatccgcttttgtgccaagcgtaacgcgacggagcagctgatcagtgtggaatccattctggatttctcattctcggacaaaatgtaattattgacataaaaagtgattgtttttccaggacaaaggtccttttttgaaaaggatttccaaggactgtccttggcgattcgagccatattttttgaggatttttgccatttattttttttgtaacctatttttttaaaaattttcacgataatagagcaaaccttaaaagctaccctaaggtacaaaaatttttatcgttacagtatattttcgtcttataaaaataaataaattaaactgtatcatcattgtcaattaattatgattctcattaataaattttgcgttttttatagatacaaaagagagcacagttactcatacaaaccgggtggacacatcgcaatgaaggagaagatgccgttttttttcattgagttcggcaatgcgaagcagcacagtatgcttcgtggcacgggagacagtagcgaactgtcagcagaattggtaatttatttatttattataattaattaatcagctaattgataaattgcgttttgtgaggggaaagaacttttggcacaattaataatttatgaaggtttcgcctacccactcctaagaattgaacctaaaaatttaagcttcaatattcgggagggggaatcgggaatcaataaaaaaatgcaataatatgaaaaaatgcccccccccttccctattaaccaaaacccggaaaaattggaaaattttctcagaaattcatcccctaaaatttatttttttttttttgcttttttaacacttatttgagtttttgtgcctttttgagcgtctaacaattggcacaattttgccatcaattgcctcggaaccatcatcatcatcaccaaacaatgatggaggagcacagcaccgcacaaaactgctccattttgttccgccagctaatgaagaattgaaaattttcttccaaacccgattgcccttctcgcgattgatcactcgcaaaacggatttgctgccttatgaaaacaatcccaatatcgtaagcgataaaattaattactgcatttaacgaaatgaaatttaaaaagtttaatggcacacccattacgcttttatttagccgactaattaatgtaaaccccgacgagtgtcttaattttatggtttttcttaatttggaaaggagatctttaaacatcgagtttttttttttggaaaaaacgcagcaaaaataattaggcttactaatgaagggctaaaaatacgaaaaattatttaattaatgaaaaactaatgatccattaaacttaaatttttaataaaaatccgtgccttacttattattagggatgcgatttttaagcacaaaaaaccgcgaaataggcacctaaaaaggcattaaaaatcgcaaaataggcattaaataggcacaaaaatcatcaaataggcactaaaataagcaaaaaaaaaatttttattaatgctttttaggtagcaaaactctaaaaattaatcaaaaaccctattttgcttatatttcaattgttttaaagttgttttcgataaaaataattttttaacacaaaaatttttatgaagaaaaaataattaatttttggggacgaatttttgtgaaaattttttttcaattcttaggggggtgtattttctgaatttttttcagggcgtttcttaagggtgtattttctgaatttttttttcatttttattaaggatttttccgaaaatcctgaaaaattcgtcaaaaatggcgaaataggcacaaaagcgtttttcgtgcttatccaagcgtattagtgcgcaaaaattttaggtatttgcctaaaaatcggatccctacttattatcatttaattattttttgcttttgcgtagctctacccggacaaatgcgaacagttgggcgatgactgtgagccgactcgggaacttttactgaaaattcaagatgtgctgcagtgctgttcgccagccaacccgtggaataaatgcctttgtgatgggtcgaacagtgtggataaagtactgaaattcaaggaccccatatgggaagtctatatcgtgctcgtgccaaaacgaaattgcggactgggatcccgcaaaatcccgcgcgggatcccgtcccgcgccggtctctagtcctccatatggacaaaaaaaaaacactattttgaaaccattatggaaattttcacgacaatcaatccgtaattatgctgtagttgtagagctaaaagttataaaaccttttttttgtaggctaatagaaaacacttagggctatctaatgatatcaagaactaaaaatttagatgctttaagcaaatttatctgaaaaaatattttcgtttgatcgttttttgactaacgcccattatggtggtttttgactaacgccatagcacattccgaggcctcaaaaattttcgaaatcggaattccgacccaaacgatgtcggaaatcgtaattccgtgccatctctggtgcaaatcggtgaggaaaccgggtcaacattttcaggtttaccccgtctgatgtcccctgcgatccaccaaaatttataaaatagcgcagaaaaacaattgggagcttggttaacaaatttcaaaaagtaaaaaacaatattaaaatccggggccgaccaatcccgaaggttttggaaaaacgatcgggagcaatcccgaatcaggatctcaatgaaatcccgttcccaacactttcccgaaaatattggaaaatttatccctgttttgtctcaatatttttgtatttcatgtcattatttcgctattttgcatcaagatttttcgaaccctactaattgcaatactcttaaataaacatactcgataagcgctattgcacccagaattgcttcttcagtaactaaaaatggaattttgcaattaataaattgcaaacactcaaatttaaattctttttttctattttccaaaagaaataaattaaaaataaatgaattcgcagcttttgccctccctatctttgaaaaagcaatcggaaaatcattcaaatttttaacggcatcttgtcaaaagcaatcttttatgcatgtttgttttcataaaacgattgagagtaaataattcaaaaatacagtagccgattgttttttttttttttggcttactgttccaattttttacaaaacatttcaatcactttttggtgtgctgaggcgaattgcaatgggaaatttggaccatttcttcaaatgtgcattagcctgtcgtttcctccgattttttgtcgacttttcagcaggcgttgtctgttgtacacattgggcacaatcttaattaaatcacctaattgcattttaaaaatagacattaaaaaggcaaaaatggctgtaaatatatggtggtgctgttagttttccaacagtgattgattgatttcgacagtaaatttttgtttttaaaaaaaattataaattaatagcttggctaaaattcaatccaaattaatattcttatagagaacaactaaatctattgaatgattccaataaaaattaatttggttgaagttgagaaatttcccacgcaatttcagcagcttatctagtaaagtttttgtttgtttttttgagtacaatagtccatcaagagatgtctgtatagaaagtgaaagggataaacctttggacataatattcaatcattttttttatacaataattttacaaaacaaaaaaaattttcctttaccctccataatatcgtcgtatcttcgctgcgccatctctctgtcgtaaaaaatgtcgtctgcattcagcggatcacccaaatggccccatcggctgctgctgttgtttggcgtagtgtccggcgaggaatcttttttcccgggcggtgcggcgaattcagtctgaaaaattgacaaaaattattgtatgtacgtacatccctctaattgtccctataaattccaaaaaatttggggattttcaaataattgtaaagacaggactaggaaaaaatttggaattcttaaagcagcgcaaatttggccatttttttctacaaaaaggttttataacttttagctctacaactacagcataattacggattgattgtcgtgaaaatttccataatggtttcaaaatagtgtttttttttgtccatatggaggactagagaccggcgcgggacgggaccccgcgcgggattttgcgggatcccagtccgcaatttcgttttggcacgagcacgatatagacttcccatatggggtccttgaatttcagtactttatccacactgttcgatccatcacaaaggcatttattccacgggttttcaggcgaacagcactgcagcacatcttgaattttcagtaaaagttctcgagtcggctcacagtcatcgcccaactgttcgcatttgtccgggtagagctacgcaaaagcaaaaaataattaaatgataataagtagggatccgatttttatgcaaatgcctaaaatttttgcgcactaatacgcttggataagcacgaaaaacgcttttgtgcctatttcgccatttttgacgaatttttcaggattttcggaaaaatccttaataaaaatgaaaaaaaaattcagaacatacacccttacgaaacgccctgaaaaaattcagaaaatacacccccctaagaattgaaaaaaaattttccgcaacaactcggccccaaaaaataattatgatttcttcataaaaagtttggggttaaacaattattatctattcgaaaatatctttaaaacaatt

SEQ ID NO: 3238 - DNA, 2460 bp, Heterodera glycines
ttgcgggattaatcccgcggggatcccgtcccgcaaagaattttgagtccaatcccgcagcgggatccgcaaatttgaaatttccggtctctattttctattagcctacaaaatttcaaaaagtttcattaaatttcaagaaagttaggattaaaaaccttcaaaaaattttacaatccctgatttgcacaaaaaaccatttgtttttttcacaggaaagacacgtgcataaaattctttattgacaccaacaaaacggcggaccaaggcattgaagtggtttgggacggtggaacttattcctctattgggagaactggtgcaaaatggcaacgacttacgctgaacacgaacattgtttgtcccaataatggataatgacaatttcattaaatacatcgcatttttattaaacccaaatgcacaacaacagtgggccatttgttttttgtttgcttgatacaaaagtctagcctaatccctggcgagatattcaaaaaatatatatacctaggtagttaagataatactaaaatggtgcttgaactcaattttatataaaaatagagccctaattatcaccatgatttcaagcccgtttgtgctgaatttgaaaaaaaacaacttggcaaccctggcttattattggatggtgcttgtgcgtttcttaaatccaccaatgggttcgaaagcaaaaaatgggtaatatatatatataaattaatagcttgactccaattctacttaattaatatttcatggtagcattaaatagatttagttgttttctttcaaaatataattttccaaaattttttcccataagtttaaaaaaaagttataaaacattgaacattctaggttttttgcaatggtcatgcatatataattattagcatttacaatttttaagtctttaaaatgcaattgagccaaaattaatttatatatttgatagccctaggaattctcaatttgtctttaaattttcataaaattgcattgattttcaaaaaagttatggacaagaaatgctgacttaagactttttgaaatattatgacaataacttttttttatacttaagtaaaaaaaaattaggaaaatcatattctgatagagaacaattaaagctattttgaatgataccatgaaatattaatttggttgaatttgtgccaagatatgaatttatatacatattacccatttttttgtattcaaaccgattggcggaatttaagaaatacgccaacacgttattggatgcacgattaaattaattggtttatttgcagacaagctccattgcccacgaaattttgcatacactcgctctttaccacgaaatgcatcgtgacgacgcattttacttcctcaaactcaatccatttgatagaaacacggtaggtatatgaaacacatacacgcataattgtggcattaatttatttatttttactttaatttttcattttttatagttttgggtgaacaattatgtaccgctgaagaagaccaacaattttggctttacatacgactttgcatctctgttgcaatatccagctagtataaaaaatgggtaatttaacaacttttttattttcaactattctgatgctttgcccaaattattaacaaaaacaataaaaatgaaaaattcacacctattaatcgattctaaaataattttgcatttacacccctaaatgttaaagcttttgacaactattttcccatttttagagattctattttgggtttttttagaacctagaaatagttattttggcaatttttagcaactataaattgcatccctaatcttcagcatagaaaaattcaatgggtcgcgctaaattcgggatttttatttttatttaacatactaaacctaataaaatttagggtcgggatcagtttggcgccgaccgtttcggcgccgccaactttcaaatgccaaacttttttatttgtcaattaacgttagcaaatctggcatcatttgaatgcagtgttattaattaatagttcatgtaaaaatagaaatacacatcatataagggtaaaaaagtaatgacatgtggcgcacgccaaaaaagccaagaaaaagtaaatttttgaggattgatttttcagctactttaacatgatcacaatgagccgcttttatcagcgaacaattggacatggtggaatcctttcattcaaagactcggcaataatcaaccacatttactgtcgaggtgcggttactgtaaaacaggaatttttatttttgttatttgttataggttactgtaaagaaaagaaaaacgagtgccaaaacggaggctatccaaacccaaaacaatgcaatgaatgcttttgtccaggaggttatggcggtgcacattgtgacgatgtggaacagagttagtgcaaaaatataaactaaaattaaattcaggaatattt

SEQ ID NO: 3239 - DNA, 7570 bp, Heterodera glycines
  unsure (1)..(7570): unsure at all n locations
aaaaaagcataacagacaaaattttaaaatgacttttatcactctcaaaaaattattatttttatattgttttgaaacaattgttttttccgtttaaaatgtttttgagaaatgcccaattccttcacaatttttttctgttttgtgttggccatataaatttttaaattcataaattcgttcaatgaaatttcgcgtttttcttcataaaaatgattttttaaatttttttatttaaattcatttcttttttccatttatattttgcgatttatgctgaataaattaccaatttcctctcaatttttatgtcattttttcagttggtattttcctttttctctcattttttctttaatttgtttcaaatttttgaatgatttcatttttctgttgatcatttgattttgttcaatttctatcgctttttcttctcttttatttttgtcccatccctcgccaaatttattttgtcaaaatttggttcggattttgccggatttaatttcataaaataacaaaataataaatattaaaagccaggaattgattttttacaatttatacacgtcataaatcaccactatttaattatagaaaccgggcgttcaaaagtggcatctatcaaaaaaccgtaggaacagtttgatgtttttgttttcaaaaaggaaaataaataacatgcaaaattaaaaaaaatgctgtcagtttacaaaaaagttatggccaaaaaacctcaaaaattgagtttttcttggcttttttggcgccgcctgccatatcttttttacttttgaatgattcctttcaattttggcatttaaatgaagaacacatagagttttcaaatgatgccagattgaataaagttaattgacaaagaaaaagttatggcatttcaaaattggccgcgccgaagtgccccgaccatttcgtttatggttattatcaatccgctcattccgcattgcccagctaatatcaatgaaatcagagtagttttcgagtccgaaaatttaccatcggaaataagacaaaaaaaaattggtctttttcgagtcgatgcttgagatagagactttttcaaaatatttcttgtacacccaaaaagaattaaacaagcaatttaaggttttgtttagcaaagtctcggcctcgggtctcgagaataaaaccgaaaaacccgagaccaaaaaaaaaattcagggagtgattactgttcataatatgtacaattttaaacatttatttaaaatagcatttttaaattataatattatataaagtcaataccaatccataattctaagcagtatgataattacgtaatttgcatttaatgcgcttcattacaacatctcaattgccactctctccgatgccaattttgcctctctccccaggtttgatgccgatttgtgtcggcattgcgtcatctcatttcatgccagttttgtctcccccttcccgattttcatgctaattttgtctctctcccatgtttcatgccaattttctttctctctgcctctctctttctctctctctctctcctctctctctctctctccgatgccaattttgcctctctccccacgtttgatgccgatttgggtcgatgccgatttgcgtcatctcatttcatgccagttttttctccccttcccgattttcatgctaattttggaaacgaatttgacaattggaaacaaaacgccaagcaatgacaaaatgcaaaaggatttgatgattgatagcaaagcgcttcaaagcaaagtcaaaacgaaaaagaatttgacaagtggaaacaaattgccaaacatttgactaatgatggcaaagtgccaagatcaggtaaaatatcaaacaacaacaaaaccgaaacaaatttgacgaatgatggcaaaacgccaaacgatgacaaaatgcaggatttgacaagtgatggcaaaatgccaaaatcagtaaaatgaccagcagaaaggaaaagaaaaataatttgaagaatgaaaataatttgccaaataatgacaaaatgcaaaatgacggcacagaattacttgaggaattcaaaggtatttttgatagaatttttttttttgtaatttaaattttcagcaatactgaagagtgacacatatatgacaaaaggagccaagtaaatttaataaatattcaaaataaatgtcaaataatttaaatttattagggtagggctccgatcatttggggtgagaaaagtcggagttcgtcggtgacatttaggcgagatcgggtggaccaaaagggtctgggtttttcaatttttgccataaattaaaaacaaatgcagccagaaaatttaggaattcttaatgaaattatatatgttttagacttttggacaaaaatcaaaaatttgacaaatatattttaaataaaattttgaattttgccattttaatttttttggcaaacggaatggaaccccaacaagaattaattaaatagtgtaatgcaatactaacaataagcacaatattatcgaaacaatactcggcgaaacaaaattatattttgattcaaaaactttcggccaaagataattaaaagcgaaaaattgaacaaactttttttcttttctctccgtcgttttcgaattccctaattgccttaatctcgggggcaggggtcctatccaaatattaaacaaagctcacttttgaatttaagcgttttggaaacgaaaatgttccaaatgccacccaatacatggcaaatgatttcaaagcatttctggacgaaatgccagaaacagagggcaaaagtgcaatcattgcacttttggcatcaaacccttcgtcacccattttgccaagcgatttgattgagcggctgctgatcaccaagccaacaacaaattcaaaaaatttggaaacaccaattgttcatagacgtcatgctcgtaacggtttcaaaatcagcgcgagtgacatggaaaaaattattaaaacaataattgaaatccgcgtaattctcacactgctgacactttatttctggtattgtgaaaacaattttattttggtaataattatattgatcttcatttggtttgtggtagatttgagagacgacttagagcagggagggagtgatctgaaaattttcaaaaaaatcagaacattttgcaaaattgctccatcaaatcaggacatttgtaataaatcaggacagatcacatccctgacttagaggagggcattattgagaatttgttatgctaaattaatttgtgtgaacgaattactgtcacttgcgatccgattattttggacttttttttgcgcaaaattcatttctttttcaactaaaaattggaaattttctcaaaaattcgattaaaatttaatcggatccttatctatcacaatttcactttcggtttcatcttttttatttaaatttcttttttttttgtggtaactttaattgctgtcactgtttcattgttgctttaatttctatatcaaaactctgtggttatcatttatttagataaaattgtttttattatttctttatttttttgataaattgtagtaacttgttccaatttcttttcaaaaacaattttgattttaaaaatacatatacaaatatgaagacaaattatttttggcacgtttaaaaaagaataaattaaaaaatgccaaaatactaagataatgtaaaccatttaaataaagtaaacacaatcaatctgaatctggacatttgcggcgccgacacttgcggcgcgacatttgcggcgccgacacttgcggcgcccagtcaaaaggacatttgcggcggcgcaaaattcaacgaccccaaaaatatttcaacaatttattaaagttaacagaattgttattttaatagtttattttttctttatttgactaaagcttatcttattcatttttattaataattaatttcttaggtggcataacagcttcagaaaacgtttcacttcgccccacccagcattttcaaagtataaatgggtactgtaataaaataatttcaataaggttcattatcgccatcaaaaatgaggaagaacaccaacaaaaccgtctgagaccttacgaaattgacccaactcgtggaattgctgaaaggccacgcttaaaaaaatatttgagaaatgatgaagcgatccgacgattagtcatcgattttgaccataaggaaaacaaaaaccaagctgatataattaatcacattcatgcgttgcaatatcgcctaaggatgaaaggctttgaagaatgggactgagagagtcattatcaatgtttttaatggaaataaattgttgaaatatttttggggtcgttgaattttgcgccgccgcaaatgtccttttgactgggcgccgcaagtgtcggcgccgcaagtgtcgcgccgcaagtgtcggcgccgcaagtgtcacgccgcaaatgtctgcgccgcaagtgtcgctttgactgagcgccgcaactgtctgcgccgcaagtgtcagcgccgcaaatgtcagcgccgcaaatgtcgcatcaccatttcaacacccagaaattatgtgaaaatttgggttccctttatagaaaaaaagtctatttataatcaggctccccctgattcaatttcaaaaaaaaagaatcaatttttgtcggccaaaaattatcatttcgaaaaaatttatttaagagcaaaacaaataggtaaaaaatatcacttttgatttgggccaatgatttcactgattccatcttcaatttttggtcatttgttttttaattatttttttaaatgaagctcagttaagttttggctggaattttattaaattaaagtaaattgtaacagattttaacctaaattaaattaagatcatttttgtaattttttcttctaaaaacaacaaaaaacatcaaaatgatagttaatgtaacacatctggtaggcttttttataatcatttttttaattccatttgataaaaatatttttattaaaatgtttcaattaagttttttttgcattttcgataaaattattaagaaaaattctttttgaatattttcatcgtatttaaaatttaggaaaatgatgttattttgattaatcaattagtttccgctgtgattttattattttgtatgtgcatatgagcggaaattggtcaattttattgaagtgtaaacaaaaaataaattcagagaatattttaattgaaaaatatgcacagaaaaatatttttctccatttcacagttggcataatccacctcgttttgcattgggcgtgcgtaaaattgggctgaaaatttgttggaaaattccttataaaaggggcatccgccggaccattcgtcatttgaaaacccattaacacaattaaatttataattaaattttttttttataattatgctgaaaatgatttaaattgtttagaaatttgattaaaatttattttaaaatttctggcgtattttccaacaatttgggctcataattaattcattttttagattagtgttctttctaattaaacagaaaagtttcaatgctatcaactttttctattgcaacaattatcttaataaatgttgtccatttcaatgcttttattataaatgaggcaccaacaaatttagcaaacgaacacaaaaagccaattaacgaaacaccatttcttaccgaacttaaaggtgattttgatgaaaattgttaattaaaatacaaatttaatttaggaattatcaaaagtgacaaattcaagacgaaaggcaataagtaaatttaaagcgataattataattaaattaaaaaaaagagttatttcataatttgaccttttcaatctcaaaaaataattaattaaaatacataatttgtaatataaaatttttccactaatttttaaggccattagttgaatgggcgttagaaattggttgcaaaattattattaaaaatttgaacgaaaatgccaaaatatgtgaacaaaatgaagagaaatgtccagcgcaaataacaaatttttacaaaataatgaccaaaatttgcatcaaaaatggtgacaaaaacttaattcttgatgaacatcgagaacaactgacacagctcaaggacattcttggcacacaaactttggcacaaatgaaaaaatatgagcaaaactttcaacaaaatggtccaaatgccaaacaatactcggcattgctccagtttggcgatgatttgaaagcatttctgaatgaaatgcctgaaatggagggcaaaagtgctatcatagcacttttgtcatcaaatccttcctcacacattttgccaagcgatttgattcaactgatgctgatcacgaacaaaatcaatccaaaaaatttgatcaccacaaatcgacgaggtcgccgagacatgcgcgattcattcgctatagcattcattatttggttcattatttatttatggtggtttgggtactcctttttggctggtttggtcaccggttttttgctcgctgtttggcttggtaggaaattttgatttttttagtgatgtaattttagagcttttgttatgctaaatttttggaaaataatttctgtattattttttttttaaatttatttatgtaattttcttttttcatccgcagcaacttttttttttgctattttctgtttttccttaactttcttttaggtatttgcacaaattattttctttttttttacacattgataaattgtagtttgaatttttaaagattcattaaccaactaataatttacatagttttatgcttacaattaactgaacaaaaaaaaacatgattaacttcaaacaaaaaaaaaataaaaaataataattaacgccaaaataacggagaatcaaatgccaaaatttgaaaatcagtgctctcatttctcaataaatgcgcaattattgcactggcagattctctcggttcgtgatgtagtcgaaaatctgcggttgcgtctgcactttgcgaacgaatttgacaattgccgggtatttgtccaaaatatttggctcaaattggcgcactgtcgtcatgtattctaaatttaatttaaaaaaaaaattgaatttgaatttaatttttttttttacccgaaatcacaaaatccacccaagtgattccgttggaagtgaaaaagccgctgcccgactgcttcaacaagctgacatagaccgggaaatgcttctccacatttggcagaaaaacagaattgcgcaacgattgcttaaaaaccaatttaaaaattagaattttaatttaaataattttaatttcaattttaaaaaattggtcgtttttagaaggctggattcgaatccgaagaaaatcgaaaaattaaagttttcgaatttcaaaattttagggtaagaaccgattanatttcttggaataattaatttttcgttacaagacctttncaaaaatttttatatttattcacttaggcttttaaatcacaagcaatttttcattanattttatgannaattatttctcactctgtcgccctgat

SEQ ID NO: 3240 - DNA, 2114 bp, Heterodera glycines
atcaaccttattttgttttttattaaaaagaaatgttatttgaaaactggaaaaaaaattatcatatttgactgaccaaatgttaatcattattaaaatttagaattttgccaatttttgaggcatttggaaatttttttttaaatcataaaaaaattttaaaaattcattttctacatctaatgacttaaaagtcattattttgggggtgctaaataatgatttttttggctctaaaaattttgaaatgaattaaaattttttaaaattaaatttacctccaaaattggcactttgccgtaaactgtgttgtcctttctaaaaaaataaattaaaattacacaaaaaaaaacaattcaaaactcacaatgccaaccattgttttcgcgaaattcgcacatcgtcaaatggcactttggaatagtgaaatatcagtcggatcggctcacagatgccacgcgcatcgaagtagatcagtttgaagttgggcaattttccaccaacaccaattggcatcggcaatgccatacctgctgacgattggttgaccaactttggtggtacctatgaaattaaatattttaattacccatcatgacattaaaattaaaatcatttctagaatgacaaaatatggtttccttaatttttctggcataatatttccgaaacataacgaattttatgaaattttcaaggcaaattagtgatattttttgaaataaatttattattttcctataatttttacacaaaatttccctgtaatttaatggcacacatttaattctcctatttttactttaggcattttgtttattttttttttttaatattacaatcacaggctgttgtggaggcggtgatgctgggggagcagatggtgaagctggtggctgcggtggcgccggcggagcagattttggtggtggcattggagggccttgcggaatagtttttacttgagattttgcttcggagtttgctaaaagaaataaaaatcaattttattttttaaataattttttacatgttcctcctgcttgtccctcttttccatcttcttttggctttgctgcagctgctgatgcaactgttgttgttgaagttgggggtgccgcagtgctggtggctttggcatcggatttttgcttttttgcatctattaattattttaaattatatcttttcttggtgcattaagctgtatgttttaaaaatcttacttaaaaaataaatttcatttttttctatttagcatttttgggaatgggaaattctaaaaatatttcaaatttccttaaaaattgttattcggtatcggtttgattttttgctgtaaaattgtatcttttcctaattaaaattattaaaaattcacttttcataattaccttctttgttcttttttggcgccgttttggccgaagcttttcgctcctttcgaactccttcaccttcatcaaccatgatcattttgtcaatctgttcaatcggatttgcttcctaaatttttcaaattattgaaaatatttttatttaatatgtcataccctttttgtcaaagtgattttgctaatttgggtgccaatttgaacatttgggtcgaacaaattggctccattctctcgcaaaatgccatctccaactttgctgctgtcgtttaatgaggaatccttaatttttttttttataattttcatacgtaattttatagttttaaaatctaattatgtgccactattgagtgtcaaaaaatttatgataattaggcaaattgctttattattaaacataggctcatttttttcaaaatttctcattaaatcggtctaaaaccaaaaaaatttatggtattagtttaattgctttactcttaaaaataggctaattttttccaaattttctcattaaaccgatctgaaccaagtatggcacccaagattgacaaattgttagaagatcaaacattttgtttgtttatttgatctaaccgcagggaagtaaagctcttgaatagtgccgactccaaatttgctgcggttgtttgctgtgtaggccttaattaattgtggtcaattttaaatttaatgtcaaaattaatttatagggct

SEQ ID NO: 3241 - DNA, 241 bp, Heterodera glycines
  unsure (1)..(241): unsure at all n locations
ctttttcttcctattctcattacttcccccctttttctttttacttcggcatttcacatttatccccttcttttcttctttccattcctttcccatcctttcattcctttgccatggctcttccatttttctctgccgtccttcccccccccagcccncccctcccgacctcgaacaactatagctgggctttttttacttagaaataaaaaaaaaattttatcgtgggacaactgaataa

SEQ ID NO: 3242 - DNA, 4241 bp, Heterodera glycines
gaagagaacgaaggttcttctctcgaaacgtccaccattagagcacttcaggtgatcggaagaagaaaaatggaatttactgatcaaaacccaatttgcctgatcatcgaaggcttttgaacaaattttcggttaatttggccattttaattggtttaaaaccggtttttttttgtttccattttatacctcgggactaaaagttatgggcattataaattaattagtaattaattacagattgattgggaatgactgattttgggggactatttgcggaccaacaaaaactttttcaaaatttttcctcaatttttaagttaattttctgggcagattttatagattatataactttttaaattaattttattttacctaatttatttatgattacactgaatttagctgctgatttggacaattaaatttacttaaaattctttaggacgccaaaatggagacatttatgatcgcggtaaggaaaattttcattatctttactaaaagataagtttaatttttggaccaatgaaaatgaaatattttttttataatttttccatttattttttacttaaatttaaacagatgctcgaacaacgcgacaaaatgcaggaacaattggtaaggcaattatttattactttttattggccaagggacgacggatgggccaaggccaagctgatttttcaaaatttaaaatttaattaatcattttttgattaggtgcgaatgcaaaagtgcgtcgaagaaacggaagagaaatgccgggaaacggagagagagcgagatgtactgagacggcaaattcaccagcagaccaaagacatgccattggtcggcgagcggggggggggctaagcttggcaccaattagttgggaaagtatggcaaaatttgacctggggaattagaaaggctcgcaaatgtttgaactgtttaaggagattccaaagactgggcccgggtgaaaaagtttgataattttttaaattaattttaataggtagctttaattatacattaaatttttttgctgattgttaaattttagaaaaaaggaattccgaactaggccggatttgttaaattattttggtagatgaaattaatttgaattaatttgccaaactgccattggacaccattttctgaaatgcatctcttttttaaaaattcaaaagaaattttcgctataagatgcaaacaaatgaggcattatattataaataaaccattttttggcaatttaggaagtgcaaaatttgacccacgaattggtccaatgccgggagcaattgtacgagaaggaggaggaaattgtggagatgaaggcggaacggaacaacaccagactgttgctgtcagtgaatttgttaaacacacttttaatattgttccccgctttagggaacacttggaatgtcttggtaagttgggcatatgccgaaaaattcaaggaggacgggttaatggcattttttgattttctatcggttttcgtttggcatttgactttgttttctaagacggaaccggtgccagttcgcgcctttacttagaaaggaccaacttcgtttctcgatgggtgttcgaattcgccaccctttcccgggttttcggggctctttttaaagcttgggttttttactaccaatgaaaaatggtagaaaagtcgtacataggacccgagactcctcttttagacttaaattggccctgggcttattaatccctttctgttctttggttttttcttaattggtaatgatacttttacaatattccccccccccccctccggcacagtgtccaaacatgaaaagtctctgcgaatgactgttgtgaagcgccacgcgcagtccaaccgcgacaacagcgtttcctccgaggtcgaagtgctcaaggcgctcaagtcgctgtttgagcatcacaaagcgttggacgaaaaagtgaactccgtaaaatgaataaaataattaattttcaatttaaatgtcatttttttaaatttaaaaattaactgcacattttccataggtcagagaacggctgagagtgtccattgaacgagtgcacaatttggagatgacactcagcgcaacgatggaggacaacgcggcactgaaagcgcagctggaactcagccaagaacagcagcagtcggcagcactgcaacaccaggcagaacaatgcccggggaggggataattaattgattagcccatgttattggacaccttttatgggaatgattagcccactttatggggtcccaattttattggccttgaaattacattaataaattcggctttattttaaatatgggcaaaaggggaagccgaatatagagccaataattgggctatttgaatgttgccatttatttttcagcgtgtgccaaacggcgatttgaaaaattctgtcgatttctgcgccaacggaggcgctcaatccgccgctgttgttgagctgcaaaaacaattggacaggctcagccaggagtatagcaccagcatcaaacagaccaacgaactcagctcgaggcaaaaattgttttaaaataataaattattacaattttatggccggggtaaaaaaagcgagtggaaaacaaaaattcaactcccgttttaatagtgattttaatgactaaattcaccaaaaaaagagatttaggttcgacaatgccgataagcaccgcaaaattggaattttaattgatttttttaaaggcatttaatttttttgaaaattccattttctttccctatttttactagctaaacaacaaacattaccaaattaatcctatatacccaattaatcctataagtcatccaaattatttttaggaattccgaattgcaaacggagctttcaaatgccgaaaaggaggcgcggcaagccaaagagaagatgcatagcattgagcagcaaatccaagaggtgggacataaatggaggaagaaagtatgaatatgcattccctggatcatcaaactcatgtcccaaccggtctttggcaaaaaaaaaactcgagaaaagccaaagccactaaataatgttgtgttgcagttacaagcccagcgggacgagcaggacacgcgcgtgtccgtgctggaaggacggatgatgggcgcgcagcgggagacggcgtgcatccgcgacctgaatgacaagctgatattccaggcaaaacggggaattttgaatttatttaaattacaatcaaaatgaattaaatccgagcatttatcttctctttaagattgccaacaaagacgcggccattcgcatcagtgaggagaaagtgcagcagctgaaggaacgcctcgaacttgcggaggcgcaattggcccaaagtttgaagaaggccgagtcactgccgtcggttgaggcaaatgtgtttttttgaattggcacaatggcttcatcctgccaaagcctctgagattgcttttaaatttgggagatttaccgctttttattctctgttttaggccgaactgttccaacggatggaggcattgtcagcagcggaaaaggtggacaaaacgccaacaaatgagaattaataattattaattttaaagaagcaattgtcagcggaggaacgcattcaccgaatggaaacgcttttggaggagaaaaatgccgaattggagcggacattgcaacgcgaacggattaatgagggacacaatgtgaagaaggggggggggggggaagacgatttgccaaaaattagtgggggaagacgatttgccaaaaattagtcataactagggctactatttatagctctaaaaactagagtgccacgggaccgggaatttttgccaaaaccgggaccgggacttgccgggacctgagaagccgggaccgggacctcgattttttttcgggaccgggaccgggaccgcaagaaaaaccgggaaccgggaccaaccgggaaattttaaaaattcaaaaaaattttaaaaatttaaaaaattcaaattttaatttatatcaagtgaaaataatacaaaattatttggttttttatttaataaattaaattaatgaaaattttcaaacaaattttcttcaattatttcaaacaattattcatcgaatattaatagaaattcagatttgattttcacatcactttttttcggacgttttttcaaaaaacttttgggaaagaaaggggtccggcgttgccaataggcgccgtcgggggg

SEQ ID NO: 3243 - DNA, 2321 bp, Heterodera glycines
  unsure (1)..(2321): unsure at all n locations
acaaagacgcggccattcgcatcagtgaggagaaagtgcagcagctgaaggacgccctcgancttgcggaggcgcaattggcccaaagtttgaagaaggctgagtcactgccgtcggttgaggcaaatgtgtttttttgaattggcacaatggcttcatcctgccaaagcctctgagattgcttttaaatttgggagatttaccgctttttattctctgttttaggccgaactgttccaacggatggaggcattgtcagcagcggaaaaggtggacaaaacgccaacaaatgagaattaataattattaattttaaagaagcaattgtcagcggaggaacgcattcaccgaatggaaacgcttttggaggagaaaaatgccgaattggagcggacattgcaacgcgaacggattaatgagggacacaatgtgaagaaggggggggggggaagacgatttgccaaattttgcaataaatatcatccctagtcatagctcgtgccagattttaaaataaatgcaaagtctaaccctaccgattggtgggtgcctccctgggaaattattacaaaaaaaattatttattttttaataaattctaataatataattaatgtaaacctaaatttgctcagaatcgcctctccgccaccgtcgacaaattgttgagcgaatcgaatgaacgcctccaaatccatctgaaggagcgaatgcaggcgcaaattgacaagaacaaactgatgcagcagcttgaccaggccaagaaaatgtttgaccaggtggccatttgacacgaaaatccggccaattaattatatttaatgactaattaattattaattaatgccccttgacagacggaacggttcaaagagcggctgctgcgtgagaatgacgaccttcacaaggagatggacatgctgcgcaattccctctacacgcagcggacagcccaattttattcccggtaattttaatttatttatacattaattttatgattactatattacaatttgcctttgcttagtctcaacaatggcgcggttggcgccggcatttgcgcttttcccccaccgtccgctgtgtccgtcggtgccgctgtcggggtgccgcatcatccgctttatcagcaggcgccaatgccgccgtcctatcccacgcaaagtgtttgcgccatggacagcgaggacagcggagcgcccgcgtttaagcgacgcatgcagaagggacgcgtcacggcgctgcaggacgatccgggcaaagtgcaaacgctgggcgagcaggagtgggaccgcattcagcaggcgaacgtgttggccaacatccaacaggtggggactccaacagcaacaaggaacaacaatcagcagttggaaaattagccctcaaatggacccacaaattttattgaattttcaaaaaaaaaattccccgcagggcttttccatgttcgatttgcgacgtttcactattcagtcagtcacccataaataggattttttcaaaatttaattcaaaatccttttaatatttatgaaattggggtacatttcattcctccacaccttcatcattcggcactcccctttctccgttattttaatttatttaaaacatttttaggctttttccacctcttcttcaatgctcaatgtgaacgcggcaccgccgcctgcgctggaccaatcgacgactgatccccacacattggcctatttcattcaggaccgactggacgcaataaacaacgaaattcggctgatccaagtgaatgcgctgatttcaactaaatttactttaatcaattttcgatttgctattaaatttaattttgcatatattttttccattgtgaaggagcaaaagcagcaggcggaacgcgtcgctgcggaacaaagccaagaatggccaccgaacggcgccatttacgagtacggcaacaacaacaacaacgcgaacaacggcggatactcaccacggcaacaacatgatcaacagcagcaatattcgctaatttcaaaatacaacaatgtactgtatttcttgaacatactgtaccgagttgaatcactaaaacaaacaaaaactcagtcccggatttaatctgcaaaaacaggacaaaaatcctatagttttctaaggctttttacggacaagttgttcatgctattccaccggtattttcagggnataaatttattggagtgccacaaaaattttgacagcaaaaaaaaaagagaaaaacgtcttccttatttttgctataatttagctaatatctctttcagatntcccaggagcccaccacttcatatgcc

SEQ ID NO: 3244 - DNA, 2438 bp, Heterodera glycines
  unsure (1)..(2438): unsure at all n locations
caaaaaatatatcaaaaattaattntgtaaaatattcaaatgtgattctaagcctattttggtcatttttatggcattttgtgcctatttcactttttacgaagaatttttttccaaaaaataaccattaaaaaaattttatttacatattttagtacatatttgggggtttttgtacatatttcatacatattttagcattttttatacatattttatttacatatttcgcaaattttgttacataaaattagcagccctaatgtttacatatgctaaggcaatgaaaagggatacagagaaagagaaaaagtgattaaatagagaaataatactataaaaacaaaattttttaataatgtgattattgtagagccgagtttgaaatcaaaaaatggcgaaggggtgtcatatgtgacggcatcattcgtgacacggcgattcaattttgggctccaagtacaattaagttggttttttcgtcttagtggtctgtgagttagtctacaaaaagggggtctcaggttcgaatccaattttaagttttgcaaagttttggcgttcttattcctaaataaataataaacttatttgcactgggagcccaaaattgaatcgccgtggtgaaaaggtagttaattgaaacgagcatatgattaatcataagaaaatcgtgcgccacttatgacgcgtcgcagatacgatatcatatcggcgatatgataccatgacatgcctaattgaaacgcgccaatgacattaggacacgtcatatcatacgtacttcgaagaataaaattgttgatttttactaatttggacatttcttgagttggatactttgtagcttagcgaagaaatacgttgatacaaaaaattttgaatttgaaagagttaaacattcatactccatcatctggcatcactatggtcaagcccaatgttagacaaaattgctgcaacgccgaatagcgtaattggcgtaagtttttgcgcactaaattcaaatttacactagtaatgccttttttgtattttttattttgatcagccataactcgcttcattcccaactacctaaactgaacaaatttgtatttaaaaaaagattttgaaaaggaaaatctttttctaagcgaatgctaagcaatttgacatctcagaaaaaagttatgagagtcaaatttttatcaggttataactcaactccaaaactgctgttttctaccaaaatgcgaaaaactaatcattttttattgattctaaatgtccaaagtagagttgagcggtaatcggtaattgtaaaaaaaccggtaccggtactgaccggtaatgcaaaaaccggtaccggtgccggtaccaactttttccaccggtaccggtaccggtaaaaaccggtaattttccaacgtaaaaatttttggacaacaaaatttttattcagttttcgcgcgagtgcctgttttttagcattagaattgttcagaagtatatgtatttgagggtgaccaagtttttttttcaaattcaggataaagaacactaaaattcagatgtagacctcaaaattcagattattgcaaaacaagggatcagcggccaatttccaattttgcgaaggggtctccggccatgtaaattaatgtaaatcaatgaccttttttgctttcaacaccgcttttttcgcggcacgtaaaaaatttctccttcttcaccattccctactcttttctcacccagacccccattcttaccagtgcaaatttttaccggcggtaccggtactagacaaaccgggtaccgggtttttcaaaaatgaaattaccgttaccggtttgtctagtaccggtaccgccggtaaaaatttgcactggtaagaatgggggtctggtcgagaaaagagtaggaaattggtgaagaaggagaaatttttgagaaaaaattaaattttatttcatttagtcatgggattacacacatgcacatgtggtgtagtggttaaactttctacctttcataatttttcgcctgggttcaattccccacttggatagaatattcctcacattttctttaccattattttaattaaaattttaattttaaaaaatattccaacttttttctttcatgttaagcatcctaaaaacccaaaacttaatcaattggtcattttttttacaaattctgttaacaaatcgcattaaaaattacaaaatttttcccggcggcgcctatcggcaccgccggccctccttgtcccccaaaagtcttggaaaaaacgtgccgcgtaaaaagcggtgttgaaagcaaaaaaaggtcattgatttacattaatttacatggccggagaccccttcgcaaaattggaaaattggctgctgaccccttgttttgcaataatctgaattttgaggtctacatctgaattttagtgt

SEQ ID NO: 3245 - DNA, 7142 bp, Heterodera glycines
tgaaccattgaaaagatgaaaaggcattgtgccattgtcctctagagagtctcggtatcgattctcgactcgagaaaagcttcgggttttttcgatctggtctctttttcaagactctaaattcaagaccttctagacttttttactccctaatgattgtcttttgttaagacttaaaattaaataatatttttgaaactttttgctttgctgtcacatcaaaagtttgttgttctcaaagtttttttttgtgattgtttttgtgttggttaagttcccctccaagaagttattttatttttgctctttgtttttatatgttttgagagaattaattttatgtgtttttgcacatttttaaatataatcacaaattattagaatcgaataggagagttttttgtttgaaaaattttactggcgtccggcatccaattcttttagactttttaaaatatttcactaaaaattatcaatctagggagcgctgaatttataatattcatttttaaaaatatgccaggaaaaaaattcaatttaaaacacccacattttagattaaagattggattggtaaatatgtaactaaatgaaagttcaaaaaagcaacaatttgttaggattttatgtgaacaagaaaatatttttgagaaaagtctcgtgctttcgatctcgcccagaattaatatgccactaatagaataattaattttaaatatttatgcgacaaaacttatttatatttcttgtataaccaaatttaaatatttattatccttgatacttttagcttttaccatttgcgatttttttttaggttcggtctagcaacttttgaaatatgtatatgatacctgacgaaattgtagctgatcgtgtcgaaggtgggcaccaaattcagctcgacttcggtgatgacgccaaaggcgcccaacccgcacgcgacggcacgcagttcggcactctccgggccaaaagaggcttcagtgccattggccagcacaattcgcatggaacgcacttgagtggccaagttggagttggtcagtccgctgccgtgggcacaagtctgagtggcaccggcgacggaaatgtcggcaattgcggccaaagttggcaaagcgaaattgttggcatctgtttcaagcatatgaagcataattacaatatttgcaagcactcctttcaactgacaaagtgtcggtgccaagtcagtgtaagtgatccccggctgcaccgttacggtcgatcggcttccactgatggcaatgatcgaattcattccgagcgttgacaaaagcgtgccgcaactgtccgcaattttgctgaaactgtgtcgagtgccgaacacgcgcaacttttgtgcccttcgcacaattcgttgcacttcggcggtggtgcgcggatattcgacattttgggagcaaaatttgaaattgccgccccaattgtgaagcctaaaaattgaaaaaataaaatgttaaaaaaaaattaattatgggcaccgtattgcatcgctttgtccgctgctttcctttgactctgccgatgaagatgcttcttcagatgatgatgatgcttcagatgatgatgatagatgatgatggataagctttcatcgctttttttaacaaacaaaaatattccgccgccgtaagttttgtccgccaccacaaataaaaccaaccaaaaattgcacaaaaaatgcatttttattttaatactttcaatgcttctcaaatgtcaaaatgtggtgagggaattgcctttcttctgattgagttccaattaatgcttaattaagctgatgaaagtgtccgctaattctctgcgcttttatttccattttttttgtcctccgtttttcttttccatgtgattttcaagtttaaattgccgttgaaatgacgcatttccgttttgtttgaacattcgtaaaatgaaattgcaatttcaaaatgtttgcacagcttaaaatgattagctcatcaaatgtgatgaacgttgaatccgattaaataaataaaataaaataaattaattaatagcttttattacataattatttgttttatttccagcaggggagcaatatgtctttttttaaagatttgtattttatttggctcagcgcgaaatctgaaaaaatcaattacaaaagcatccattattttaaatatccttaatttttgaaaaattggctcaaaaatttaattgaatctctcaattagtggaattaataataattttgaaagaaaaaattgcttttttacatttaaatttttgctttatcatttttaaagtacaactttgaattttttcaacaaacttaactcaaaattaaaattaaagttttcttataattttttagaaatttataaatttattgaatcgccggacaaaaaaaaactgatcaatcccttttaaacagagaaaatgggcgaattaaatgttgaagaaaataattgttgatggagactgtttttcaaattcaaattttttctgctagcacaacaagtggttgttcggtgcgaagcatttccgaagagagcaatttgggcggatatttctgagtcataaaaatggagattaatttggaaaatggaaatctcaccggtgtgtttgggccgggagagaagcgaagacggcgaacaatcagtgccagcgcaacttgcatttggaactcggcaaaacgcatgccaatgcaattgcgagggccaagcccaaaagttaaaaatgccaacgaatcaatttccgcttttcgctccggcaaaaatctgtcaaggatttcagcatttaattaatgcaaatttgatcacctcgtggggtcaaatttgaaggggtctgggaaaaaggcttcgtcgtgctgaatgacgtaaattggcaaagttatcaaatcgcccctttcgaatggcacgccgtttatgacacagtcggagttgcacacgcggttcatcctttacgtgaggatgatcaataagttcatcaaattttttaattaaggtgtaccaacttgggcgccaccggaaacattcggagcgtttcttggacaaaggcgcggaggtaattcattcgtttcaaatgctcgtaagtgatcatttcctaaatttaatttcgaaacgaaacactgatttaaataatattcatttttctcttattcaaattctgcgcacattctctcccagcacgtcgatcacttcctctctgagtttttcttgaatttctgactcaatcgccaacatataagcggcaaatgaaagagtggcgccagtggtttcgaaacttaatccaatattgaaccaattattgtgtttctcctatttctttcatttaattacagtaattaattacgctattacccggcaattaaaatgatgaaactttgcgcgaaaagttcgatcctggtcagatgctttccctgttgtttctgctgctgctcattgcttctcaattcgctgtgaattatttcggcgtcgtctgctgaaattgtaaattcctcgtcgtccaccgcattcatcaaaagttggaaaatgtcggcgtatttctgacaatttactaattaaatatgtattaattggttaattagccctacttcttttgcctcggggtcggcacggcgcttttcgtaaaggtcgctcatcatttccatgaaaaactcttcatccatggcaaaagcgaatgatttgccagtgatattttcgtataaaagtgagacgcatgggaaaaacacttaaaattttttttaaccaatgcgacaattaaccaaattttaaaattgctttgaaagcgaagcgaaaaaaatagccaaagaaaaagcaactcattgtcacctttttttattgttaagagacttttgtatttgttttgaaaagatacataaacagcacttttttgattagtgctgacacttttagaaatccgccaaaacagtcagaaaatgaaaaataaaataaatttaaaataatagaaataaattaaaaatttatcgctttaaaaccccaaaatgagagggatttcaataagatatagcaagaaatttttttttgttttgaacgcggatttaaaaacgcattagcaccttctctcaagtttcaaaaataatttcagcattgtttgtttatccccccgccccctttttaatttgttttaattatgctaattatgtcccccattacccccgagaatcattcgcaatttttgtcccttccgcgtaaagtcaaaaattgttcgcgcctgcttcacaaaaatgttttcctcgtcaaaagtgtccaaatccaatgaaaacccacaacgcccaataacatccaacagaaaacggccgaagagactgcaaaaaataaaattaattaaataaaaggcaaaagaaattcccaaaatttattaaaaaacttcttttttgtattactaacaaaaatcgcaactttatttactattttcttggctttttctacgtattttgtaatatttttaaatatttcgacattttttgtgaattttattattttggatattttttgaaaatttgtaaccttaggcagtttttcgtacatattttgccactttaacaattatgaaacataaaaattggatcactattaaatagcaatgaatcagaaaaagtgtaaaattctttttgatttttttaaaatacaaatcgctttttatttgttagcgatttttttaaattttcgtttaaaaattttcaaaataaaaaattggacaaaaaccgggacactttcaatgatttaataaactttaatgagtttgttttgccattccttttagacttccgctgtgccattcactcactctttcaacggcacttccttccccttcagtgcgttttccgtttctaacactttacaaagtttttcggtgctttcgcataaaatcggaattaactgaaattgaacaactgaattatgcacttaattaggctttcatccttcgctaatcacttttgttatttaaatttctccattttttactgagtgacccacttttttcagttttcccgtcgtaaatgccggcgttatgcgatttcgcacgcgtctccaatcgtcgtcgcgcagcacagtgagaatattgcgcatcagtgattttggcgcgtgttcgcgttcgggaatggcattctgtgtcatttttttaatttgatgaaatttttgagagatccaaaattttatttggcttaaatcgatttttaaattttcatccataaaattacataacggttctgaaagtgcgagaattctttgatgaaaatttgtcgtaacattttcgggtctttggtgcaaaattcgcgtcgctcaaataaaaacgagctgaaaataaaagaataatgaaaataattccaaataaaaaataaataatatttatttaatttattacccatatgaattcccatattttttgaacatttcttcgtcaacctaaaaatttattactcaatatttaattttatttttaatttcgtttttatgacctcaattacgccagtgcgaaattgtttcaatgtgttgccaaataaaatgtttgtatttggtcccggcactccgacattatgccaatgttgtttttggcggtattgaaagctataatttaaaatatgcaaaagcaattaaatatttttaagaataatcttaattttttactaaatccacgaagcgacgataaaagagaaaagggcaacaaaaacggagaatgggaagattttgtaaacaattgctgagctaattaggacaagcaaaaatcggtcaccgatgccaaattccattaggaaatgcctaaaattttaattgatttatttaaataaaaaatataaaaatcattctattatgtagaatagaaagaggaattcaatttttaatttgaacgtttgtttacctcaagaatttcctaattaggaaaaattatttggcttatcgtttttcgtaaatgtttgattttccgattcattgcgcaattaggaggagaaagaaaacaagtttcgagaaaaagataaataaataatcattttggaatgcacaaagtactgaccaactcacaaaattaaacagtaaatattataaacacattctgagcatttaaaaaaagacaaaaacacgcggaaagagccgagaaaacgccggaaatgtttatgtaaaaaataattgtacttaaaaaggggagaagaaaaaaatgttattgtttatatttgccatatttggtggaaatgccattttatgtcagtgtgccaatttgatggctatcactggccaagagttgacatacacgagaaagcagcagcaacccgagaaaacggaatgttaccgaaggaacagaacagagacctggaaattcaactgtgtagattccgctgcgggattggattttatttttgcgggatgggatcccgcgagatttatcctgctaagttccgcgccgatctctagaacataactggcaaaacacattgaaagagctgatttgaaaattaaggataaataaaaaccacgggacggcgaaacggcgcggtttttcgtaaatgtaacgggacataaaaagaatcaaagaattttattttatacaataattccgaagccattctcatggcatcaaaatgtaaaacagtttttaaggctaaggggtaaaagtcatttaaacaatttttgattaaaaagtcagccgacttttgcggattgagctgttaaaaaatctttaccagagaccgacacggaattataacgattcgatatttatttaattggctttcggcccaaatgcttaaaaatatataatattttttcaaagaattgaatttgttgcgcaattcctcaaaagatgaaattttttataaaatttccttcgttaatccaaggcgaacatatgaaaatatttacgagtgatttccctcaaggaatactcggaaatcgagttaagactaggagaaaggagaacgaactctgcatcatcatacttcagtcgtgaattaattttttaaacatttatataaaaaaactagctaattgattgaaaaaagttcagctgttgggaagaatattcaagatggaaacatacgccaacaaagtgaacaggtggtgccattctgtgttcatttgaaactacaatattcttacaaattgcatcatgatcattagtgatat

SEQ ID NO: 3246 - DNA, 2902 bp, Heterodera glycines
tttgcggattgagctgttaaaaaatctttaccacaatccgacacggaattataacgattcgatatttatttaattggctttcggcccaaatgcttaaaaatatataatattatttcaaagaattgaatttgttgcgcaattcctcaaaagatgaaattttttataaaatttccttcgttaatccaaggcgaacatatgaaaatatttacgagtgatttccctcaaggaatactcggaaatcgagttaagactaggagaaaggagaacgaagtctgcatcatcatacttcagtcgtgaattaattttttaaacatttatataaaaaatgattgaaaaaagttcagctgttgggaagaatattcaagatggaaacatacgccaacaaagtgaacaggtggtgccattctgtgttcatttgaaactacaatattcttacaaattgcatcatgatcattagtgatattggataccaaaaacttttaacgagtcgaagaatcgggatcgagtgatcaagagatctgagacgagacttaaaatcgtgactgtcgaccatcgctaatgatcagggcttagatttatatggataaaaaagcagaatatagtagaattcacaaaattcgttacaaattaaattaatttaataaacaaagtttgaataattaaattaattaaaatcacaaaattggttcaaattaaatcacgtaattactttgaattattgaacagattacaattctgtcaaatgaacattgcaaggaaaagcttcggaccgtcaaaaagaatggacaaattccgcagatcccttttttgtgtgcaaattcgacaaaaaatgcctttttgaatgtgagcaaattaattaaaattcagttaaaaaggtttaaatatatatatgcatatactcatggaaatccaattcaattgcaaaaaaacggacgcttttatttgctgggactgtcgaccggcggcacaaaatgagatgagttgccaattctatataacatatatttaataaataaaattcgattgatttttttaattgaatgcgtggcaaatataattaaaatccattctcagttttcccttatcattttataaatttgcattttcatataaaatttatgcccattcgagaaaagaaaaattgaaatttatacaatgaatgggaaaaaaatcagtcgctttaattatttttatttctttgtacttttaaattttacaataatttttgcgaaattgccgaaggcattgtttggtattttattttaattcattttaaatgtttaaaaatgttttccgtaaggcataaagctgaaaagtcttgaggatggatatatccgtttgctttttgaccatcaattggatgacaatgcgcgacaaaaactcagtgcccaattgacggctgttcaaatttgcatggaaattgaaaggtacgaaaattacttattaaaaattgaaatattattaattataattccattattaatcccggggttttccaatgtttgttcatttttttaatttggcaattattttcctgctggcaattttcattggtacttttttttgtgatcattcagactttaaattttgcacgcaaatcaggtgtaaataggacttctgaattagtaaattgataaaataattaatttatttacatattgaattattttgggtttaatttttggaataaaaatgccgttaaaagaaaatgacaaaaatatttttttcattcagaaatttaaaagaatttgattttgagtcgaagaaagtggccaatttggagagaaaaaggaagacaaatttaggcaatttggaaatgagcaaacattatgaggagttacgtacaaaaattgaacaaaaaattgacaatttgggaatggttgagctgtgcgaattgtgggacttcgcgcaaattgtgcaaaccgtaaaatgccaatttgagggacaacggacggcacagggaaacgtcaaagtgttgaagtcgatcactgtggagcgaaagtaagcaaaaagagaagcggcgaaaaagctttgtagtttttattttgattttgctaattgtttcattttaacattttaagctacgattgcgcggaattgcgccaaattggcaaaggaaatgagccaaattggatttctgactttaagaaggaaattgcactgaaccatttcgcatacattggctccaaattggcatttgatcaccacataaagtgcgacttttccgcatggtttggcgacgcaaaaatcgcaggcgaaagcgaattgtcgcatcgcttccgcacgagcagcacccaggccaattttgaacagattcaatttaccaaaacgatgctgcaaaagcatttgctgaatgtggccgatttggacaaactgttgcaaatagcgcatccgatcactttggctgctggtgagagaaaaaagcggcaaagacccaaccttcgggcaattcgggacggatttttgaaaaatggccaggcccgtagaccccttattatttattttgaattttaatttgatttttagatgtgttcacagaaagttcattcgcttttttggtcactggaatgtttggtgatgaaccgaacaatgcaatttggctcgaatatttttcatttctcggcagaattttggcattttttcggcactttaaaaatgatgaagccaaacgagcggagctaaacaaattttggggaaagacagccgcaatttttgggcgggaaaatgcaatgatcgatgagtcatacggcgaaatgaatttaattttaatcaaagaatttaaattaattttaaccgaattggtgcgcacttttggcactttagatgagacagtgccgtacacaaatttgataatgtcttatgaagaagacttttctcgccttatcttagacaatagccaatt

SEQ ID NO: 3247 - DNA, 1285 bp, Heterodera glycines
caaaaaattccacgacgacgactcgtataaccaataaaggccatgacgacgtctcgtataaccaaaaaaggccactacgacgactcgtatacccaaaaaaaggccatgactcaatgtagtgtataaaatgtgaattttggtgaaaaatgaattttagactttttttcgaattttgttcgaattcggggtctggagtcggattggaacaaaacagatgccaaaatcgatttccccgactctgaaaacccctaaaaacaagtttttatcaaaaaaaattttttttgaaatctggacacagataaccgtaaagtaccgaaaacttttcgcaaccctttatggttttttgaaatttttaaaatttaattgataaaattggcattatgtatataatattgttttgcttgtttttgcatgtcgctgacctcatctcactgttttgtgtttgaacttgcgaaaataatagaagtgttttgcgtttgttagagttagtttcgctggaaaaggacaaaattataaatctgctgactttcataaaagcattaagtaatttgaaaaagctaaagttaaaaaatgcaaaaaataaattgtagatttaataaaattggaaaacagtaaaagccaagtcgttcaacaattacatcttgagttctgcctgctgaatctccacacttttgctaattgattcctttcgaatgatgatgaccaaatctgctaccaccgatggtgggggtggcaccgccgctgcctcctctgtccaccgactccaatcgccacaaaaagtaccgcatccgccaccaaagaagaggccagcgccagaaacagtgccgcaaccggcggtcgccgaagtgccggctcttccgggagcaccgccgcctgccaaattccgaaaacggcagagcagtttctatgcacatgtgaatgtacgcgacccgctcaacctgggcaatgttagacccggtgagagaggcggcgccataggttcgggcaattgaggcattgaccgaatctcgaattttttgatcagtattagagagaggttaagctgaaatttccgaatttgttggctgagagacggacattgggttatcgaactcggatttggattagtaaaacatttacttccgaaatttactagagctcggaattttgaaaaaagcctacctgtattctgtacctgtatttcctgtagaaaagtacaggaaaatacaggttttttcgtgtttagctgtacctgtacctgtactaaattctaaaaatggcctgtacctgtacctggatccaggaa

SEQ ID NO: 3248 - DNA, 5876 bp, Heterodera glycines
atgacattttctggtttttaatgagtttgtgactaattttagcttgttttaatcaatttaggaacaaaactgagaattttgaaaaatttgaattttcgactttttgttcgaattcgggtccgggattcaaaattgagcgaaatggataccagaatcttgatcaacgacaacccggaaacccctagaaacgtgtcttgaatgactttaaattttaaaaatttccaccaaaaaataggggcaaccatcttaactattaccaaaatctctaccgaagtgaatgtgcaaaaattaagtaacataataatattctattttcgccggtagagaattttgtgctctttctgataggcttactaatttttcaaagaaaacttttcgcaccctttatggttttttgaaatttttaaaatttaattgataaaattggcattatgtatataatattgttttgcttgtttttgcatgtcgctgacctcatctcactgttttgtgtttgaacttgcgaaaataatagaagtgttttgtgtttgttgtttgttagagttagtttcgctggaaaaggacaaaattataaatctgctgactttcataaaagcattaagtaatttgaaaaagctaaagttaaaaagtggcaaaaaataaattgtaggtttaataaaattggaaaacagtaaaagccaagtcgttcaacaattacatcttgagttctgcctgctgattctccacacttttgctaattgattcctttcgaatgatgatgaccaaatctgctaccaccgatggtgggggtggcaccgccgctgcctcctctgtccaccgactccaatcgccacaaaaagtacctcatccgccaccaaagaagaggccagcgccagaaacagtgccgcaaccggcggtcgccgaagtgccggctcttccgggagcaccgccgcctgccaaattccgaaaacggcagagcagtttctatgcacatgtgaatgtacgcgacccgctcaacctgggcaatgttagacccggtgagagaggcggcgccataggttcgggcaattgaggcattgcccgaatctcgaattttttgatcagtattagagagaggttaagctgaaatttccgaatttgttggctgagagacggacattgggttatcgaactcggatttggattagtaaaacatttacttccgaaatttactagagctcggaattttgaaaaaagcctacctgtattctgtacctgtatttcctgtagaaaagtacaggaaaatacaggttttttcgtgtttagctgtacctgtacctgtactaaattctaaaaatggcctgtacctgtacctggatccaggaaaaatacaggcctggatccaggtacaggccgatctctaaaatttactaaccaaaatttcaagaaaattttttgtttaacaattgacagaaaatccaagatttttttttttaattttaaggggtggaggtgcagaaaaacagaggcttttctgattttttccttatgtttttcgttttagacaacccggacgacccgaactttgccaagcccatccaactgatcccgaccaatgtgaacgatccgttgaatttgcagaatttgtcgtccgccccggcagatgccgaagacgaggcattgccaacagcagcggacgcccaacagaggcgaaagaggtgagcaaaaggcacaaatttctgaggcactttgaccaaggttttttttttttgtaaatcttttacatttttttcacaaaattaatcgtcctttttcgagtcttttttgttcggaaaacaattaattacgaacgctatgtttgtttattagtcctctggaacactttcgactccttttttggctgattgagtgtgttcgccaaataagtactccgggactgaattggtcggctcattatttccacgtatttggaaaaacctaaaagttctctctgcaaaaaaaggcaagaaagacaatgcaatcattaagacctcttatcattgcaaaaacaaacaaacgaacaaaaaaacgcacaaccgaggacaagtgaaaaagacatttcagtaccaaaattagtgtttctgtcttttctattttatgggtacacaccaattaaaaaccaaaaacaacaaaaaaggtcaagcaaattcataatcgatgcacaaaatgaattaacatgttaaataatcagaggctctgctccaatttacgcgttcattcattcagtgaccatcctctgtttcttaggccacaactttttcttacttggtaaatgccaacatttctggtatcaaacgaacactgaaagtttatagaatttataaatataagaaaaatataaaaattgcaatgggaaaaacccgaaattcagcaattttctagagtatcttcaagaatattttttttctgttgatagcccagaatttagttatagagtaaattctgatgatttcaagctttacttgataccaaaaatacaagcattgaccgagtaagaaaaaaagttttggtttagaaaaacacgtaaaaaagtacggccaaactctttaaacaatctcctgaaattttaacccaaaaatctgttgcccacaggaagcgcattcgcatacaacagcccaaggacgaggcggacgagcccaccacgtcggacgacctcagcccgcctccgccactgtccgcgcctcaagagatgaagaaacactcaacgacccattgcagcctcaggacgcggagggcgatcactgatgagaaggcgggaagaaccactggtgatcaatcacaatctttgttgttctgcatattttcatttcatgttttgttattttttgtataaatattgcacgttttgtatttttttaggctccgattggattaaaaaacaagaatatgtttatcaaattaaatcatgacgaataatagggtctattcttcggcggcggcccaagtttttggaaaatgcatgcacaagggttcttaaaatttactaaattttaccgatttagcattttacatatttattgttttttaaatccttaatttggtgcccaaacttcatgtcgccctttatatatgtacttgaaaatcttcgtattttgtgcaagtctaatagaacattttcgaaaatcgttcgacgcgatcagacacatttttatttactttacgttttgaaagcgacaaaaaaacaaaaacataaaacaacgtaataagttaaaatttaaaaggcgataaattgtgtgtgtatatatatatatttatatgtttgtgtaagatgagttaaatgttagaaatccatcacttctccgaacaaaatatgcgatgggacgcggtgttttctggaagacgttcatttcttttcggtgtccttaaattaagaaattgcaaaaaattaagtaatgcttcttcggcggctaatttgggaaacaaattgacccatgggaaaatattacaattcgtatgttttggggacggaaccaattctggaccaaatcagggaatagtgctgctttttgcttcgtgcttaccaggggaaccaaaagtgtcgcccgtcttttgcagcaattccaaccaaattaggaaataattcgctttaaactcatttacctttcgcgtgttgcggcgagtgaagattgttggcatgcgaagtctcgagatgtactccttcttttgcggtgacttttgctcttccggttcgacaatttcagcgtaatcatcttcttcgacctcaacataatttttattagataaaaacaatttgacttttattccccaaaaaggaatgacattatgaaaatttgggttgactgaattcccattaaacccaaaattagctgtttgtgttttgattaccgcttcgattgcggggagagagggctgagaactcgtcccagcggttgacgcatcgcaaacgaattgcccagacggaagaagacggttgggagaagagccggccaaaccaaaagtgatttcttcgccttttttcgctgaataaagtcacagatttattggttaataatggattgtttactgataattgtcacctgctgattgtgcgggaggcggcggtgggcgacactttggtggcgatggaatgcgattttgctgcttaccactttcagtcggctgacgaatacgactttcagtgcccgaattgtcaattgaaacttaaaaattacaacaatgaattcttttataatcaatatgaactgttttaaaagcattttgtaagtctctcctttatgttattgctaaaaagcgatttcgaacctttcaaaggactttttgataaagacagatttattggttaatcaaatgaaagtaattgactgatcattgtcacctgaattacttttcgtatttgcgaggttttggcggttgacctgtcggtcgcgtttgctcagctttttccgtcggatggactgtacgagagggtacaacagagccaggagcgtcaaccgccactaaaatttttaataatgaatcctttttcaatcaatgcgcattgctttaaaacccatttagatcgtttatcaatcttagtgttaaaagcgatttcgaacctttcaaataatggtcagtttcggacgaccgatcagcgactttcagcagttccctctgagcattcacgtcggggccatcgggtggctgatcatacgttggctccgaatgaccggaagaggtggcgctcgtctcaaccgaattcggtggaactgaataggcaaattatatatcagaaaacacgtttagtttaatcaccaggcgggattgccaatgcgagattttcttcgttgagatacgtaaacgagtctgtaaaaaagaatcggttatgaatcatgttataaaatgcattataaaattaaattctttttcaagataagatattagacaaatactttctatttgctgaaaaagccgattaaaattcggaatcgtttcgcaaattccacgcaagaatacggcattctcttgctttatcacttcataggcgtcctgcacctcggttaacgcctaaacaaaagccaataaaacaattgtttaaacactcagccattttgcacatattaaactccccgtaaggacctacaataagcctaatttcagcccatttgttaagccgagggatcagaaaaaatcgaagcgtctgagaagaagcgaaaacgccagacaaattatgttccattcgaaaacatttaacaatttcatttaacaactcgggtggcaatctttttcgggacataacaatttaagggttaagggaattgggggcaatgattagggttaacaattggggacaatggacgggagaaaaagttgccggacgcgctgagccgctgttagcttgccttaaccgaaaggaattttggtcagttgagtatttttgacaaaacaatcgctgaatggtggacccaaccctaactttggtattgttacaaaatcatatttaaatgccatcaatactcaccttatacatttaaaggtaggccaatagaattagaaagttaataaaaaagaatgctaaagcaaacaaacaaatgcattagtaacaaacattcgattaaggaaagctaggtaattagtaaatactaattagtgcttgctctttcaatgagtccaatattttttaatgattgcgtcgcaattattgaaactaataccaaaaatgtgatatgttcacttctcaaatgcataaatattaagggataatgaaaggaaaactccatttttttcgattcattgttgagtgaattgagttgtgcgttcattttgggtcaactttcaacaaaattagtcaaatcaaaaatctacgccgcagttggcagaaaacgcaacgccaaaaaactcatttcaaaaattcatattcatgccaaaatacgggtccgggg

SEQ ID NO: 3249 - DNA, 3334 bp, Heterodera glycines
atttatgcaaagtgattggatgcaccagtgttctattcccccccgggttgctcagccaatcccagccgctgttacgtcaacttttttgtgtaaattcccggagggactgaggaagaattcttacccctaccaatcctctttattgtctacttgtggtgcccattgcattgttttcatttaccatatgtccgtgggatattcatttgagcaatttctcactacacttagcaattgtacaagtcctgatatgtacgcattagttgtatttaacaaaatattaaataaataaaaatgttttataacttgattgtttattcaattacgaaaaaaaaacttattcgattgaaaaattaaaatagtaggaaccagggtgttgagttgtttcaataatcattaaataaccaacatctcctttgtgatgcggattcatcaatcggtaaagttccatcccatcggcgcggaccagttgaccaaggccatgtgacgccatttctgttgccgggaattggagaagccgcgggaagtgttgacgcagcaaataaccgcctgcagtccgcttcttcatggtcagcgggtttgcgcttcccaagacataaatcagaattgcgccgaacagctctccaattttaattggctaaatattaaataataataatatttcttataattgtttgttttcttaccatggaataagtcacgattctcgtcgtagcggtggggccagatcgtccaaaagatagatacgccaaaaagtcggtgaaatatttggcgtcttccagttcatcttcgaacccgaactggatgaacccgaactggatgaacaattcgccacacggtaacttccttattgcgcagagcctctcgaaatttcgagcaagattgatctaaaaattcagatttattattattttaaatattaccaactatatttaagaagtaaagatgccgcttggcccgaaaaatttcgaacattcggttgataaccactattccagacggtggacgagtagtacctattcaactttcaaattaaaaaatatttaaaaaaaaatacctggctttttcgcaattcccccaaaaaggtacatgattggaattgaagcgacaatttccaaaagaagctccgctggtaaacgcttgttcatcgatgccattgtagtgaaaaaaaagaaatgaatgaataaatgcatgcataggttggctttaggatgcatgataccagaaggcgatgccgttccctcgggaatcagtgaaaatttgaattggctttgaaaattatcgattgtttgcaaacatctgttaccatatggcatttcccagagggaaatgcaaattgattcgccgaaaagttatcgattaatgggcggagacaccagctttaaaagcgagactgtacagagaatttttcatttgttccttacccttaattatattcttaataaaaattttccatttccaattttgctgttaaccagggcggtagctcgacctacagagtaccgtttatcctggcagcaattttgttaatttgttttttagatcttgaggtaatgcttttgacttgtctaattcccagagctgtttaggtgccctgtcgtcttgtgcttcatggatggcagtgcgcggctcatcaggccaagattggtttatttaagtgttaaatttcactcaatttcatcacttttccttccccattttgtatttgttacgagctcggctcatataaatatgcccttcctattgttgatttatcattttaataaagcattagattaaaaatggaaaaccgctttccccaacgcccctctaatttttcaattgactacatcttgtccattcctgcaaaaaagcctcgccgtggtgttcaagcgggagctggaccgtcatcggctaagcctgcaaaggaatacgttaaaaaattggaaagcagtgtcgagcatgtgccgcgcttccaatacgtcaaagccaaatcgaagttcagcattgaggacgtcccgacgaatcccgaaggattgattgccggcatattccaatgttgtattgatgaggccgtcatggaaagccaacagcgcggagtaaagcccacgcatctcggctgtgtgatcagcagcccgctgttgaccggcggcgacatacccatccccattcgccaaatcaccgacaacaccgtccacaccattatgaaccaattcaccaaagtcgcgcaaagcaaacaacagcaaaatatcacattgtggggcgagccgttcacagtgactgtgaccaccgtggaccgcattggccttcctaacaaaagaagcctgaaaggcggtgcgcggcgggcactggcacctgtgcatcatcgggtcaaggaaaactgcttgatcaaagtccgtcctgcaggaaaataagtatttattgtggccattttacagattaacaacccggatgagagaaattactgtcttttctacgctttgcaagccaccatggtggccaaaactcgcggatggccccgatggcttttttacaattatgtacacagccgatacggtcagcaaggatgtctgcggcgcgatgatttgcagttggtgcagcaaattggagctcgtcctgggttgaacgcatacgatgccgagatttttgttccgcgggtggtggattattggaacaacaacaacaaccaacagcaacaacaacaacaccgattttctgtgtttatttttggctcttctggtcagtacaagccgctctacaagtacataaaggaccattacgacaccccaattgttctttactttaacaacgaccattttgacggcgtacagaaaatccatggcttatttggtcaaaactattgcctcgagtgcgaaaagccatatgagcggccgtcgagacacctaaatgcatgcaaagcgcgctgtatgctctgctcccgcgtcgggcctcgctttccatgcgctcctttggatggatttttccgggagtgtccagggtgcaaaaaggtgtttcgcaacaacgactgtcaccaacatcatttgacatcaaacttttgcactcgatcaaaacgatgcaaagaatgcggtgtgatttgggacactcgagccaacaatttaaatggaccaagggtacaaaattacagcaaaataaattttacttattgttaaattcaggtccattaatgtgataaacgttatttccacacgtgtaacaattttccgcaacatggatcttcggttcattcattcactctattcaccccaaggaatataccctttcctcatagttctctttgatttggagacaatgcaccaccaagcgatgcccccaatcatccgtataaaagagagcacca

SEQ ID NO: 3250 - DNA, 7313 bp, Heterodera glycines
  unsure (1)..(7313): unsure at all n locations
aaaaaaaacttattcgatgaaaaattaaaatagtagganccagggtgttgagtgntttcaataatcatcaaataaccacattctcctttgtgatgcggattcatcaatcggtaaagttccatcccatcggcgcggaccagttgancaaggccatgtgacgccattctgtttaccggnnaatggagaagccgcggaaaatgctgccgcatcaaatacncgcctgcagtccgcttcttcatggtcagcgggtttgcgcttcncaagacataaatcagaattgcgccgaacagctctccaattttaattggctaaatattaataatatttcttatatttgtttgttttcttaccatggaataagtcacgactctcgtcgtagcggtggggccagatcgtccaaaagatagatacgccaaaaagtcggcgaaatatttggcgtcttccagttcatcttcgaacccgaactggatgaacaattcgccacacggtaacttccttagtgcgcagagcctctcgaaatttcgagcaagattgatctaaaaattcagatttattataattttaaatattaccaactatatttaagaagtaaagatgccgcttggcccgaaaaatttcgaacattcggttgataaccactattccagacggtggacgagtagtacctattcaactttcaaattaaaaaatatttaaaaaaaatacctggcttttttgcaattcccccaaaaaggtacatgattggaattgaagcgacaatttccaaaagaagctccgctggtaaacgcttgttcatcgatgccattgtagtgaaaaaaagaaatgaatgaataaatgcatgcataggttggctttaggatgcatgataccagaaggcgataccgttccctcgggaatcagtgaaaatttgaattggctttgaaaattatcgattgtttgcaaacatctgttaccatgtggcatttcccagagggaaatgcgcattgattcgccgaaaagttatcgattaatgggcggagacagcaactttaaaagcgagactgtacagagaatttttcatttgttccttgcccttaattatattcttaataaaaattttccatttccaattttgctgttaaccagggcggtagctcgacctacagagtaccgtttatcctggcagcaattttgttaatttgttttttagatcttgaggtaatgcttttttgacttgtctaattcccagagttgtttaggtgccctgtcgtcttgtgcttcatgggtggcagtgcgcggctcatcaggccaagatgggtttatttaagtgttaaatttcactcaatttcatcacttttccttccccattttgtatttgttacgagctcggctcatataaatatgcccttcctattgtcgatttatcattttaataaagcattagattaaaaatggaaaaccgctttccccaacgtccctctaatttttcaattgactacatcctgtccattcctgcaaaaaagccacgccgtggtgttcaagcgggagctggaccatcatcggctaagtctgcaaaggaatacgttaaaaaattggaaagcagtgtcgagcatgtgccgcgcttccaatacgtcaaagccaaatcgaagttcagcatcgaggacgtcccgacgaatcccgaaggattgcttgccggcatattccaatgttgtattgatgaggccgtcatggaaagccaacagcgcggagtaaagccaacgcatctcggctgtgtgatcagcagcgggttgctgaccggcggcgacatacccatccccattcgccaaatcaccgacaacaccgtcgacaccattctgaatcaattcaccaaagttgcgcaaagcaaacaacagcaaaatatcacattgtggggcgaaccgttcacagtgactgtgaccaccgttgaccgcattggccttcctaacaaaagaagcctgaaaggcggtgcgcggcggacactggcacctgtgcaccatcgggtcaaggaaaactgcttgatcaaagttttccgtacaggaaaataagtatttattgtggccattttacagattaacaacccggacgagagaaattactgtcttttctacgctttgcaagccaccatggtggcaaaaactcgcggatggccccgatggcttttttacaattatgtacacagccgatacggtcaacaaggatgtctgcggcgcgatgctttgcagttggtgcagcaaattggagctcgtcctgggttgaacgcatacgatgctgagatttttgttccgcgggtggtggattattggaacaacaaccaacagcaacaacaacaacaacaccgatttgctgtgtttatttttggctcttctggtcagtacaagccgctctacaagtacataaacgaccattacgacaccccaattgttctttactttaacaacgaccattttgacggcgtacagaaaatccatggcttatttggtcaaaactattgcctcgagtgcgaaaagccatatgagcggccgtcgagacacctaaatgcatgcaaagcgcgctgtatgctctgctcccgcgttgggcctcgctttccatgcgctcctttgaatggatttttccgggagtgtccagggtgcaaaaaggtgtttcgcaacaacgactgtcaccaacatcacatgacatcaaacttttgcactcgatcaaaacgatgcaaagaatgcggtgtgatttgggacacttgcgccaacaatttaaatggaccaagggtacaaaattacagcaaaataaattttcattattgttaaattcaggtccataaatgtgatgaacgttattgccagacgtgtaacaattttcacaacatggaacgcggttgcttcattcaaccaattgagcccaaggaatatgacccttaccgcatagtgtcctttgatttggagacaatgcagcaccaagcgatggaccccgatcagccggagaaaagagagcaccaaccgaacttcatcgccgcgagagtttcatgtccctgctgtattgacaacgatcgttggagaagagggacagggggttgtcaaatctgtggcctgcaccggaccgtcgctttctgccagcgccgctttgtgaacaccaacgttgatcaccaagtggttgccgacaacccgctggaagcgtttgtgaattggctggtgtttcaactcccaaaaaaatacgacacctacgcctattcgcactttggtggccgtttcgacatggtccttgtcttccgggagcttttccggattggcttcaatcccgaaatgctgagacgggtacaattgtcttctgaatttttttcaaaaattctcaattttacaggggaacaaaatgtatgaaatgaaagtgaggaagcagaagcggcaaaatccaaacgtggtcttccgggactcattcaatttaatgccctgctcattggcagctctgatcccatcctacggccttgacgtcgaggacaaaccattcttcccccatttggccaaccgaccggagaattatggtagagcgattcatccaactcctgaggactatttggccaatgggatgatgccaggcaaaaggcggcaattcgacatgtggtatgagcagcaccgcgaggaggcatttgttttggatgaggcattagcaaggcacaaattttttatattttttcaatttttattttattttgttcagctattgcaccaacgacgttgaaattctgatggccgcactcgtcgcattccgtcgggaattcttcgaaataacgcgacgacaggagtatgtggaagggattgacgaccgcgagaaccatgatggaatagatgctctgcgtgaatgcatgacaattgcgggtgcctgcatgcgccatttccgtacaaaccatctgccagctgagcatctggcaattgtacccgagcgcgggtatgacaacgcgcagaatcaaagtctcctggcacttcgcttcttctactggtactcggaggagtacgatgtagaagtgcaaaccgcacactctgccggcggagaaaagcggattggtccctattccttggacggatggattgaggcggagggtcgagcaattgaagtcaatggtaggctttaatttgttcaaatttgaaaatcatgactttaaggttgtacatggcacggctgtaaaaaatgttaccccaacgacaacatggtacttcccagtggaaaaacggcagggcaaatacgggaacgtgatggtaaacgaatggaatacctaagcgcacgggtcaatcgcatagacgtcttttgggagtgtaaaattgacgagatgttggcgagaagcaaagcgatgcgtaaatgttttgctaattacgtggacgacggacctctggtgatacgcgacgctttcatgggagggcggacggggccattgaagctgtatcacaaggcggccaggggcgaaaaaatttcttattacgattttacttctctgtacccctatgtgaagtgagttttttattattaaataaaacataaatatgtaaaactttagcttcaccacccgttatccgattggacacccaaaagtccatgttttcaaccaacaagtggtgtggaccagctcggcggacaacccttaccctctagcattgctgaaagtttgggttgttccgccccgccgcatcgacgttccggtgttaccggtgaaagtggacgatcgcttgtgcttccctctttgtcttaaatgtgccaaaaagtacccgaccggcggtgtggacgacgactaccactgccaacacaatgatcaacagcgaggttgggtcagcacctgcacgtccatcgagctgaacgctgcgctggacgagggctatcgcgtcatccgtctgttccgtgtgctggaatatgaggacagtgacgaccaacttttccgcccgtacatcgcagagttcatggctcaaaagatccaggccagcggatttgacaacgaaatcaaagggaatgccgccatggaggaacagtttgtgcgagagtgtgcggaaatatttggcatcaacgtggacccaaccaagatggcgataaacaagggaaaacgttccatcgcaaagttgtgcttgaataacttatgtaagccatttgtttttcaatggattttaaattttaaatttagggggggcgcttttcattgcgaaactttggactttgtcagactctgattacggacagtcctgttgtgcttaccgaatatctggacaacaaatccgttgaagtcgcgtcaattgatcagctggatgagaagcacatcctcatcagctatcagcacaagaaggactgggtggatgagcatgcctgctcaaacattggtgagaatttttttaaaatattaccgtaatcaaaaaaactacagtaatatctttgtggacaacttccacggcgcgacttgtcttgttgaaggcaatgcaaaaagtggtcaggtcggaacggtgcgagctactgtacacaggtaattgaaaaaatatatattgtttagtaatttatttttaaattttagacaccgatagtctcgtccttgtccacccggaggggcgttgccctctcaaaactggcccacacctgggccagttcacggatgagtaccccgatcacgacatcgttgagtactgcagcggcggatcaaaacaggtaaatttacacgtttttcaaactgtcattttcacacaaattaagtatggtctgtgtctgcggcgtaagggggcagggcccgatgttgaaccggaatacgtgctcaaagtccgtgggatgacgctcaactatgacgtcatcaacaatcagggactacgctatgaacggttcaaagaagaagtcatcaattatgcgacaagaggggactatgagccgattatagtgacatatcccaattttttgcgtccgaacatcagggagggtggtagggtggtgtccatgcccatgcagaagtgttaccgtccatttgtgggcaaaggaattgtcggcccaaactatcgtgttttaaattttggtcacactttgtaacattttctcttatcagtatacgataaataattaacaaatgtaagatgtcatttttgggttggaaagtgcataattatcagaaaggaaatgaaatttcggttgcataattaattacggggagatgatgaattaaggggaaaaattgcgaaattaatccgcacaagacaaaattatgaatttcatcaataggacgaaaaattttgactacattcgttgcgtccactattttcaatcatctcttcatcaatgataaggtcaagcgtttgattcgatgagttggaggattgttgataactcgcgtcaatttctgtgaaaagacgaccaaaccactgttcattgttgttattgttgttgttgttgttgttgtctgtgttgtcgttgtcatcaatcagatcaagaagctccattgggtagtgacggtcctccccttcgcccgaaaatcgttcaattatgcacggtaaatagggaaagtgaagtcttatgcggtgccgtgcatagaaatgagcagccacattgatgttaaatgggttgcgcagctgtccatacgcgggaaggaatgcggcccctttagtcgaaatggagccgacaaaaaaagttttagtcattccattccgatcgttgtatgtggtgcgcactttgcgaccaataagatgtttcaggataagactccgatcctctggatgatttagccgatcacgcagagttttgggccgacagttgagcagtttagagcaaaattcagtgataagcaccatttcagaaagacaacaattgtgctagatgttaccctattttatactcaaaaatctgggccacgcccatcaaaatttgactccgcccattttaagcaaattgaaattacccgtccgaagccaaattcatttcctcaaaatgaagaaatccgttaccatctctgtccccgagcaaaaagaaattaatcaacaaaacactgaaatggagcccacaaaatctgacactaccaaaaagcgcaaggcagacgaccgggagctgtggaaattggcaaaaggaaaattcatgctcgcgacatacttatgcccaggtaaaatgaaatttcttatttttaatagcaaatttttttgaagatgattggaaccggctgttccacaaccaacagaaagtcacgcgcttgggagatgaccgtttttcattcagctttgaactctgcgaagattgcgtgtgggccaattgtcgcgcaactgacctcattgcccctatgaagaaaaagccaaacaatgcttgagactaaattttttgattgatcaatc

SEQ ID NO: 3251 - DNA, 3770 bp, Heterodera glycines
gctattctgcgtctctgattttttggcgccaaaacgaccctgtcgccaaaacggcggcgccaaaacgactctgtcgccaaaacggcgtcgccaaaacggcggcgccaaaacggcggcgccaaaacgaccgattcccctattttttaagcccaaattcgttgctataacttttttaatttaaaattttggaaaaaaatcaagtagttgatgaaaaatcatagataaaaatcaatgtgagttcatcgtgataagcgcattttttaagcctagaaaaaatagctgcgattaacatttttttcgtcgggacaccaattcttgaccattgccgtatttttaatggcgttcaaatcaatcaccacctttagtttcatacaatttgtagacaataacttttttaggtatgtaacttggtttcaaacgaaagcttgttgtgaatagaattacttctataattagttctgggctaaaagcctaaaagtaaacaaaaatgtatacctaattgatcaacatcaacataccaagtttcagattccaacatttcatttaattctatgagtacaacactgaattataatgcggagatcgctgaacaatttccaggatggccacacgcttataaacggtttaaattttaatgtttttttttttgctttattccaagcctcttatccacttcagtttagatagtcaatcttcttcctttttagaatcaccggaatgtatctgttcgaaggtgtttctaatgaattcccttatgtcgccgcgtgtcctgtcagtccgagtgtttacctaatccctgcttccatcggatttgtggcgtcgcttcaattgttgagcaaatctcaacgttcaaagtcacaatttcttaaacacggcccaccttctcttttaccgccaacgcctgaagaatatgcaagtttataatcgacttttactagtacttatgacccaaatcagaacaaaactacaggataaaatttctacttttttgtttgaatttgagtgatagtgatctgaaaatccctgatatacctaagtctaatcattggttaatgtcacagataaccaagagtattgaccaaacgcatttcttagggttcgagaaaccgcaagtctccagtgagtgtgatcgtcagcaaagatccgactgatttcatcgtcaaggttacggatgagtaatatcgtattgcctaataaattgttttaagcaaatgttttacgagtcgtttaatgatccttgtcatttcatccttatggacagggacggggttggttctgtctgattgattcctctagtcgcttttttcagatcgtcacttattgcctcgtttccgacgttcgtgagccggtcaggtgctacgtgtatggctattccatggcgacggtggcacaggaattgctgaacggcaccaagtggattccgaacgttgtgtacgaaggacgtgttcagtgtaaattcgcatgggatttcgacgcgcagaccgggcgagttacgaacttgcgaagtcattatgagttcaacaagatcatccgatttgcccagccgggtgacaatccgtaagaactaagaaccaacgaaatccagataagggtggggctaggggcttggaaaaagtgaaagaatctgatccttgtctgattcccagtaaacattgatgtggtttctttccattccgtcgtttcagacgtgcgtacaaagcactcgtcgatttggcagtgagggtcagttgaattgccacgagatttgaattggataagtaatgtttgtacgtaattcaggacgcgaagtactttgcgactacgtttggccatcccgcatgtgtcaaatttcaaacaaaacctccgaccattcgtttcaaggcagtgagtctgtggtactttggcgatagcattctgctgtcgccggctcgtccgcgccgtctgtcccgtgtttcgccgggtttacatgtggactgcacctcaccaagtaaacggttccttcgccatgatatgcgattatgggaacattcatttcagtgttctatgatatcgaaccggacatgaacgcccgaaaacttccattgccaccaattcgagagggccaacgaatcattgccaatttgtggcacaacagtaagaacaatggaaattgaaaccacggtcaatcaccaccaaaaccatcgacagaactgaacaacttctacttggtgcacagttacgtgcttgcggagaagttcaagcagccaggggaacgcgatgaccactaccagttgcccgttcgactccaactcggcacttcgtccgcaagtgccactccgagcacgtcatctgcaagcgaaacgaccagccaggtgggcgtgcgtaggatttacgaatgttttctcgaaaaaggctattgactcccatgtgaatcctccacaataaaaagtttattcatcttcatcttctgaagttcagtttctcgtcaaagtgaacaattccatcttcaaggacttctattcgtgtgaacaacttggctttgctcttatttctgatccgagacggtgaatttttcattataaaaagggatgaatttttataggttagtaatcttccgaccggattaacattctctgtttattttttcaagactgcttcgcaatgcgacgcatctcgaacatctcgatgggtttcccgtttggatttcagccgtgccggatgaatttcgtctcgctcgcttcgccatcatggcactggcctatccaaccaagaactattctcgactcgaaagatccggacggcatccggatgtctgtcatctgctatttggctcattgtcatttttttcatgtaacagattcatggccatggcattttgattgtgtcgtccactgggattgtcttcagcaaggaccacccgcaaactcgcatccgccttctgccagccgatcgccgctatgtcagcgtcggcgatcagttcatgttcaccgccaccttctatgaccacaatgagggctttatagtttgtgggattcagcttttggatgaggaagacgaagaacagttcgttggactcgactccatcaaattgggcggcgacgacattttggttagacaaatgtttcgtaaagtcaaaaaccatttcatgatgaagaacatttgcagtttgtgcagaaattgaagacacacatgcgacaatgggcggccgagggacatgacagtccgaactttggacctgtggcggacccgaaagagttggtcaccgactacatctgcagggaggagattcagtggccagaaaacattgaagttttggtctgtttcaaccccgagtggatgcagggagcggacacgctgatgaaggtgcactcattggtcatcgacggcgaatttgagcagggggtcaaagaaagggtgagtggtgactaacacggcttaacaacgccacccttttcggttaaatcgaattttcctcctacagattgagtccatgaacaatgatgagacgagcattgcctcccccgccacgctgtctcttcggcaggaggacaacgacggagcgcatgttcctgctcgaacccacttggaggaggaggaggaggaatgcaactgtttggaggtgtggggcattctgcgcgagttgttggaggacgagcgggcgaccagcgagttggagccggagatgatccagggaatggttgagctgcgaaaagcctttcatatcgataaccgcgccaacaattaaatttagtgatattcacaaatgggacaattaattatattatatacgggtcaaaaattaaggaattgtt

SEQ ID NO: 3252 - DNA, 2818 bp, Heterodera glycines
atcacctacgtaatgcttgatttgatgaaagaaaatttattttacctaatgatttaaaaaaatgttttttgttgctgctaaagccatttataataataaaatattcacttactgtcgcaaatccaaagattataaatctattaaaaatgtataaaaaatattattaaatccattaaataaatgtcgctgcactcagttttttcaatttcttttgggctcccggacatttgcacaatggacacatgatgtccactgtccaaatgtccggttaagttttttttttgcagtattaattttgtctgaaaaataattatctaaaatgtaaattaatgcacatattttagtataaaagcaattgaaaaaatctaataacccgccgcatcaatttaaacaaaaaaaaagagagagagtgaggtgaggatagagagagagagagagagagagagagaaaaaaaaagagagatagatacactgtgttaatttaaaataaagacaccctgttttttgggagtttgaccacttcccatgaaccgatcgagctgaatttttaactgtacgtagcaattctgaaaatattaagattctgaaagtgagaaaccgaaatgatgacggaaaaaagttttacgattttttttcaaaaatggggtgttaatttaaaatagagacacttgataaaaacgaacaaagtctcaactaccaaaaataaacagataaaacaaactaaataagaaagaataaatcttttttcacatttctgtttattttgcgaacagaaatatgtcttttaggcagagttatgttgaattttctaagttttcaggagaaattaagggccaaaaggctcaaatcgcctctaacatttgcccaaccgaatcaaactaacagcaatcagcactaagataacgtacagacatcctttaagcattttttattaattttatgccataaaaaaggcattaaacacaaaatttttgcgggtgaaaaaatacgaaaatctgagtaaattcgaaaaaaaattctagggggttgggaaaaattttccatagaagatgaatatgacgaacagaaagagcacaaaattctctacaaaatggcctttgaatgattgctctatagcaagtattcgctgaggggtgccttgtaaataccgattatccaaaaaatgactcaattcaagccatttttcctcatttttgagacatccattctcccccgccgtttccctcatgtttcgtcgctgtggtcgtctgctgtgttcgctgcagttgctgaaatgggtgcagttgagggatcagtgccgccacgttcagcagccgtttgatgcccgttggttgagctgcgaaactcctttcctgtcgcggaccgcgccaacaaccaatgatagaggcatataaattattattattattattgtatccaaactttgaccgtaaattcattaatttaatctaaactattagaattttgtcatattgataaactaaatttattctatatgagtttctttgtccatcacaaatttaattgcttgatctttatgataggatgggtaaatatttcatagttttattatctttttgtcttcttgcgttggctttcacttttccttgtcacaattgtggaatccctcgtcaattttgccatagcgttggatggcctcggccaatttttggtcctccgtcaaaagagtgaaacgcatttctcgggccttcaatgattaaatgaaatggcacattcatttttattgacacacttttcggcactgctctttccctttgtccattcccttggacaaaacatccaatggaacagtcagcgattgaaacagccccagctgaacgtggcctttgtcggacgaagacaatttgcagaagagtggggcgccggaatcgtccttcaaaaagattggaaatttcgcaaattttattgagtatttgacagctaaaacgtgattttctgctgaagcgcaggcgaaactttttcactttgattaggttaagagattgttttaaagaggaaatggttctccccaaaaattgaaaattttaaagaatttttttattttattagtcattatagtcattatcatttgattagattacatagcatgcggtgtgtccgtccttgtacactcggctccgataatggtggaaagggtcgtccgtcggcggctccgccactccgttcagatgcaaacggaacactttctcctccgtcagaaagtcttccgctgaattcgctgtttttcagttcaaaaaaaatgacagacctttttcgctggtggaaaaaccgatcatttggcattctgtcccggggtcggccaaatcagcgggcaaaggaacgaattgagaggacggcccattggcagcggaagaagatggacgaatgctgagacgggaaaagcgattcggcggacaatgcttaacaagacgcaattagttaatcagtgttgattctaccaaaactaatgaaaaataataattaatttaattaaaccgacggaaaaagccttttgatattgaattgaaaaaggattctgtagcataacaaaaggcacaaatcgcgtgggaactgccaaaagaataaaacagcagagtttgcttatccgatcactcccccccccccaaaatcgtttctttctttccattccagaatccacagtatcattgattccgaaggccaattttaaatttcagaaatatcattttcatcagtgaaaagtgtgtaaatcggagctgtggtgctcgcgttccgtggcacaatgcgcaacagtgtctatccgcccgcttcatcccattcgcgtccgccggtgaccaaa

SEQ ID NO: 3253 - DNA, 4809 bp, Heterodera glycines
  unsure (1)..(4809): unsure at all n locations
caaatttgttaattaagggccagcgaataatcatttgctggattggtgccatccatttttcccaccgatatttaccctccccatccccggcagagacatttgaaacggcaaggccaactgaccgctaacaaataagtgctgaatgaagtntagaatcgacaatttcatttattcaatccttttttacacagcgataacaccaccaatcatcgcaacagcttaattgtttgtgttcattcctaatggatcaatggatgaataaagcgatcgttatccatctttttcccatccgtccgttctccgctcaaagtccgaacgccctttgctcagtgactatattttgcttcttaaaagtgatcggcttccgtttgtaaagaggcggcgaacgaagggggagcggacactgcggatagtcagccattcttggctggtatggtctggaagaaattgttagaattagtcgaataagcctgagcctcgctggtttgatgtataaattatttttccgttaaaaaatttgttaccccattaaaatgtatttttttttaaactaaacgcatttggttcacctctgaaaagaaatttgcatggcgtaatagccgcccatatcctcaaaatcggtcaacgaaacgcccaaatccttcagaagataagtgtccccagccgacagcacatcactcgtcgcttcctgacaatgagttttttagttgaatattttttcaaaaaatgcaaaagactgatcaaaacttaagctttcgttttatttaaatgcctatcttttgctttccaacaaataaatcccttaaaatttgaaattggaaatctgtagcgcaccatgaaatcgaaccactcccaattaataacgccaggacgacgatatattttcgtatacgaatgacagagaaaagacgtgaaaaggaaccaaatcggaataccaacacgacggtatctgctagttatgtcagcgacgaggccgcctttgatgaagatgaagtcgaactaaacggggaagggggcattagaaaatggaaagaaattggcgatgaaagtcgaaaaagcactggtaaaaatgataaaatttttacgaaaattggaaaaaagaattttgcaaactcaaaattttttaacgaaattggatttcattttcaatttcgtatatttttttttatggaatttggattatttagtgaaaataaatctgttaataaattgcagcatttttccggcggcgtctattcgcaccgccggaccccccccccgccccccttccgcaaattttttggaaaaagcgcgccacgcaaaaaaaaaggttaaaaaaaatgttgagcctttttttcaattttggcctctgatgggggatatttcttatttggtaaaggcaatttctgacccccccgtccatttatgacatacaattcagctccatttacctaataaacgacaaatgtctttcttgttcgttaaccacataatgaaaattccttttcattaaatttcaatcccgtcatttgttcgactcccatggacatgaaaatacgtttcgattcacttaccaactcgcacatttcgtagcagtgcggcccgacaaattcgtaggttttgcccgctgttgaggagtccatcgccactctgttcactccgtcggcaaagtcattgacctcaaaaaaggaggttttaaaccttttacttttaaaaagaaaatattgtatatgcattatttaaaaacggaatgctcacaaaaagtggcattttgtaaatgccttcgcccgcattgaaagtgtacacattgccgaacgggtcaacgcgccaacgggtgatcagattataaatgagacggtcaatgtcgccgtacatcacagagggccgaatgatggtggcacttgggaattcggcacggaccgcctgctcggccatgcctttgcttttcagaaaggcgcccttttcaaaaatgggggaaagagtgagcgattatccaaatttcacatacatttttgatgaattgtgttttgtacgatgggtccgcgttcaatgcgctcacatggatcagccgttccacgcccatttcccgacaaatgcgcgcaattctccacgcaccctccacattggcgtcataaatggaataattccttaaaaataaattgtgtcttttgtctcattttcccggccattaattttatttaaaaccgtacggtgtgtcgacatatgtgccgatcatattgatcacaacgttgctgtatttgactgccttccgaatgctttcatcgtcgtccaattggaaaggaaaaaacagaacttgaccaaggtcacaaggcactttcaattctctgagaaaatacgaatcgcagcggtacggcaaaattagctgatttgcgtgtctggccaaccgattgaccacccttcggccggtaaatccggtattgccaaaaactaagaaaaaaagagtattttcttttagtttgtaaaattttttgtgtgaaaaccagtttcggggggttttgggtttctgatcacaaaccgcacatctaatttaacaaatttctaattcttaaccagaacttgaacagaaatcgaaaattctaaatttctcatttcggtttttcagattccaaaaaatcaaatttacagagaaacgagacatttaaaggaaacacataacgagtggcaatggtaaaagtttttgtggtttcttcaaaaataaatttaaaaatttaagaagcagattttctaggctgaaaaaatgcgctgattacgaatctgagtcttggattttgcaaaatcattgcttttatctatgattttttttatcaagtacttgttttttccaaaattttaagtaattagtcgggcgtaaacgacacacacacatcaaaatgagcatttgaatgagctattgaatgtctggaaaagtcatatttttagttatttacgattttttgaaatttaattactagctcttaagggtcatatgagatgggggtggggttcgagcccgcttggctgcagtttatttttttattattgaaaaatcatagacaaaaatttgcaaaatctgagctcagattcctgatcagcgtattttttagtctagaaaatgtgtttctttaatttttaaatttatttttcgaagaaaccacaaaacttcccaattgctacgagtaatataataagaatgaggggacctgtaatgacattgcccgagaagctggaacgaccgcccgctcccttgcggaactgtgccatgttggaggaggaaatgaccggctcaggcacattcaccggcacattctccgtagtcgaatattgtagttttctggtgatcctatttctgtagcaagtcaaaagttggacggctttgctgctgataatcattttgagagatctctttaaaaaatgaaaacacttggtatcatttgaaagctcttgaggaggagaacctttttctaagcaaatgctaagcattttgatagaattagaaaaaaagataagggcattcaaaaatttgtttttttgaataactttttagctaacccactttttgctctaaaaattctccagttttgttcgtaattttttctctatcgataagcaaaatttaataatgaaattccggaatgcatcaaaagttatgcgcatcggaatgcgaatgttattttataatactgaaaatattagataatccaccaaaagaagagaaaagttagagaaaaaaagatattagttttttctctatactctctttctcactatgggtcaacagtagagaccgtcgcgggacgggatcccgcgcgggattttgcgggatcccagtccgcaatcccgcattttttggaaaatgcgggatgtgcgggattaatcccgcgggatcccgtcccgcaaaaaattttgagttccagtcccgcagcgggatccgcaaatttgaaatttccggtctctagtcaacagacaaaattgctcataacgccaaatagcgtaattggcgtaaattattgcgcgctaattcaaatttacaatgatcactgacatttttgattgtttattttgatcagccgtaactttcttcatttccaactaaactaaacaaaattggtatctaaaaaaagttttgaaaaggtgaatctttttctaagcgaatgctaagcaatttaactcgtttcaaaccatcaaatttttcgaaaatgttaaaaagatgaaagtgaggtgaaaatgtggtcaaaaatctgggtatttgtcattttctttgttgttctcaacgcctcgattgattagagatataaaaatagtacgataaaaggagagaaaaatttctttcatccattgactcgattttcttttttgaatcattaatttatgctatgcagtgatttgccacctgttagcaaagacacgtgccgaccgatggaaaataaaaatgcagcagcgcaaagaaataatgcacttaatccttctcggattaaacacataggttttgcgtatttgtccccttctccgccttcacccaattcgaatcggacatttcggaattccaaaacacctttccttttccaccttctcccaacaataattctttttgagaggttgagtcccaattccctcaatatattttctcaacatttatctctgacgtttttggttgtaaaggaaagagaagcgaaaggaacgaccaaccactgggctttatctatcccatttttgtggcatagctcaactttaaaaaaaaatattttttcagtcaattanatggaaaatgacaagacaaataacagaaggngcggcatgacgcggaccagttcatgcagcagcaatagcagt

SEQ ID NO: 3254 - DNA, 916 bp, Heterodera glycines
tgatgacagcccatctccgttctttggtgtccatcgacaaaattgtccacgcaatttcgtccgtttagtttttccttcgctgttctgccttcatttatgtttttcagcaattacacttccgttgagaagcgtgaagagccgcttgactgtatggacgccctccttttttggataaataaggcaaaaccgaataaactgaaaaagcaaaattaagacaatttcttcccttctcgtcaggtttgtctgctcgtccgggatgacattgagcacaacggactgtccggcgtggacaaattgccgacaattcccgagatggaagacctttacgaagatttgtgcgacggcacgtgtatttgcgcactcatttccttctaccgacctgacgcattgcctcttcgcggtacgtacggctaacatttatgtcaacgaatccccgtatttcgcttcgcttattcccctttagagatttgcttcaaagacccgatgagtgtccacgattgtcgcttcaatttggaacttttgtggtctctccccttcgttttacctttttacttatccgtttgccttttcagcaaattctgttcctcttctctcccgtgggaccctttccattttgaaacggaggacattctcttcctgcacgagtcacttcagcccaatatcaatgtgttcttggcggatcttttccaattcttcgagattcattcgctggttccgcccgcaggtgttctcatagtgataattattcatttacttaggactatttgttgggactgtgtggtaccaccacggaatggaaattataaatcttcgctatactgatttcgttaattaattcatgaaaatgggtttttcgaattatcggcatacaaaatctgaagcaatttatgtgtcaagtatatccataatttattat

SEQ ID NO: 3255 - DNA, 2642 bp, Heterodera glycines
tggttgatgggtggcatcggcacaaaagtgccgaagttgcgataatgtttccggcggggactttatctttcatcagccgtatcgtacaacgatttttgtgccttttttgtggttgtgtgtttaatacgttgccaagtgtggcggcacgtcacttttgttttcatttcttcttcccttcctaaaacgatggcattttcgcttattaaaatttgtgccctaaatggcttggtcgttgggattaaaacgggtaaagaatggacaagaaaaatggcgctggcctttttttaaagaggaaggagggggattaaattttgagacggaacaaacggtcaaaggcatggcaaatggggcttaaattttcatgtaaagcgccgctgcttttcttcattatcattcacattcccctgtattgtccatggtgaatttgtgtccccaaacttttaacagtatgccaaaaaataaatttgacgaaatattttttgtgtaaaaattcagacagacccaaaccttaatagaattcaaaaaattcttgtttgattactccgcaaaactagtacaaccgaaacaaaaacagtactgtacaaaaataattgttccggcatttgtcatccatttttctgttgttgtacattttgctgtcatttcaccggaaaattttgtgcccaattttccggcgctttttcaccctctgcgcctccccccccccgccacctccaatttttataatttgtacaacaacaaaaacggcacatgttccacccattcaatttgtttgttcctgttcacacacattttcattttttttgctcgtgtcgacgatccgtacacctccctctccccaaattcatccacccatcgtccgtcccctcattgtcagtccatccaacccgacaaaaccaaccgaccactctctctctctctctctctatttttggtccgctaaattagggggattttgtgtgaatggtgtgggagagatgtgacgactgatgagtgagtgagtggcggagagaagtgatggccttgtgcacatttgcgtggaatacataatttgtgtgtgtgtgcagtgcgctgttcagttgagtgcctggcgttggcagtggcggcgctggagaaaagcccatggccaatgctttttcattagcgaaatgctaataataatagtaatgtgcatttggtgtgttggacaaatgaaaaaagaggacggggtgtggctaaagatggcttcttctttcattagctgcttctgcttgttgtcagtgcttcaataaaactcaattaggcccccccactcccttctctgctggtgatgactctctgttctttgctctctctctctttttattttttcccttcccttcccttttcaattaattttgttttattctttttccctctctcttttctctctctcttcctctccctcacactttctctcctcttatcacacttctctctttttgaaattgttttttgctcttttccgcattttgtttatttttttctctgtttttcaagtcgcatttttctttgctctctgttttctcattgtttgtgtcttttattcgtttttcttctcttttttcctctcaatattatttttcctttttattcactcccttccttctctctgtttttaaaattatgtgtgaaaaaatcgaaaagcacaaaaaattattaaacgatttttgcataatattaattccttttttgtgatgggaaaatgaagtgggaaagatgaacatttcgtgctatatgtgtgacgtgtaaacgacgtaaaaaaaatcatgagaaaaaattgaacgatggggtgggcggggacggacgggcacgactgggccccgccatctgggccccgccgactgggccccgccatctgggccccgccgactgggccccggattaactgggaacccgccaagctggcacccaaggcacagtaatttttccaccattatagtataatataatcaaaatagaccgtggtttgaggacatatgccgttttcattcgataaattgctagttccacattacggaaagaagaaggtagatattactggaagatgagatataaaaatattaaaattagggagcatcattgacgacccagtggcccaaatattttatgtatcacagatcggagcccagatgggaaatccccgcttactgcaaaagctccgaaatgcgcacactaatcaatttttgtgcatataaaggcgtgacttcatactaggaacaatctttttctcgttgtaggataattaattatcaccagacgaaaaacctttaatgaatcgagaataaaatgatcttttagctttggccaaaaagtaattaataactaaatatggtgagaaaaaagcggcaacttgaaaaaaaggttccctaattttcatgaatgcaaaaatgcaaaaaaaccatcaagctgataaaaagagggcaaagggtccatattttaagcagatgacgatttggcctgccattagtcctaaatccccatctccatttatcacaccaccatcaattctgtccatgtcacacattttatcaccagattgaaaaatttaagaaatttctgacgcatttacacgtcccattttaaccctttttccccacatccccgacctacgtaatattttt

SEQ ID NO: 3256 - DNA, 1390 bp, Heterodera glycines
tgactcgacgctgctgatgatgacgaagatggcatttgcaaatggtgccgctagtggacaacaacaacagctgcagcaacatcagcagccgaacaggttcaccatggtgccgtcgccgatgccgcgcaaccatttgcgacgcgtgccgaccaggtacaatttaggacgggaattgttgttcaaagaaaagtctgagttgcacaatggagtgaaaatgccggatttcgggtgttttttttaccttcggcaaatgttacacgacttaccaaggcatacatggaaaaatgggttggacgtcaatctaaaatttttgggatttaagttaattattgaaaaataggagttttttgggccggcagcacctaggaaagattttttgttatgaaaatttaaaatttgcgaccccctcgaaactttttattttgctatcaaaacattgtataattcgcttccatttttacctaactttttcagattggttttggagcgttcggtgtccgacagtgtgttggacgacgcggcaattccggacgaccaattctccgccctgcagcactcggccgccgccgcgttcaacgcgtccattctgcgcagactgtcgtcgtcgtcgtcaacgatgtcgcccggtggagggctgctgggctcatttgatgaacagttggaggacaacattgtggacaacaagacggagcagttcatgcaccaacagcagcaaggcagcaacggaaatggcggcaacaattcgtcgtcctcctcttcgtgcccgtcctcgtgctccagcgagacaattggtgagtcttgttggcgtttttgggatcataactactctgaattgtttttttctcaaaaaatccaaattctaatgaaaaatgtaaaaaggccgtcgaaaccccgttgaatttttttatgatttattgcatttcaattttcattgtctggtttgaaaaaaaccctaacggatatatttttgggctgggatccgtaagaaatcgcccattgatttgaaatctcgatcattacagggaaatatcaacctcacattcccctttttaagacactgacggctccgcacagtccgcggcgcctgcaccgattgtgaagaagcgtgtgtccttctcggagtgtgtccatgccagatacttccgaaggtgcgttgtgtgggcacatggcattcaaatgcagaaaggggatttattgctaaaaacgaaatgccactaaattttcggtctaaaacgtcgggactctctagagaaaagcactgcggtcctaaacacaccctcccattttgatcaatggtccttcattttcgcctcggtttcagcaactcgagcattctgggacagaaaaagaagaccgagaagaagtcgcgcaagcggaccagccgtcgctg

SEQ ID NO: 3257 - DNA, 1648 bp, Heterodera glycines
gattttattttcgaattcgcttccgggttcgaaatatcgtaaatctaatttcatattcgtggtcagcgcactcgaaaatatctccacaaaaaaattttttgggtggctaaaaaagtgctttactttgtttaatggagaaatgataaggaactaataattagtttcatttttagtactaaatttcttgaccaacaaaaaattgtaacgctataaagacgaaacgaatattagacacagcgtccggaaactgagttcctgtaccaaaaaagatttgaatgtatggcgaagtggtttttgtaagatagtaaaggatgcaaaatttggaaaaatttcgttaaggttcgaaaaagttatggccaaaggaactgaaaaaactggttattcgtataatattttttccatccgaaattttgcaggctaatagaggacacttaaggctatcgaatgacaccaagattgttgaatttggttgacaatcatagccacaaatttgtgctcgtacgaaaacgcccccgacccgtctctgtctatttaaatcagggtttctatatgttattatttataagaaatgttctgatttggagggtccaaatcttacaaaataaaaatgttcttatttgtaagaaatgttctgatttcgggcgattgttcttattttgttttttatttcttaaaattctccagaagtttgtaatttatggcgtaatgtcacttgattttcaagaatttttcccggcggcgcctatcggcactgccggatctctcaactcgcacgtacaacgagttttttggaaaaagcgcgccgcaaaaaatagtgtttttagaagcaacaaatccttcgcttggccttaattggaaaattgatcttttttggtgaaaatctgttaacaaatcagaacgaaattacaaaaaaaatttccggcggcgcctatcggcaccaccagaccctcccccccccgcccatttcccaaagagttttttggaaaaatgcgccggaaaaaatgtaaaaatctggttttttgatcaccacatgcactgaaatttacgatttgcttatttcctcttcaaaattgctaaacacaccatcccaaaaaacgagatgtgtaccaataaatagagaatgccagagaaaaacattatctttttttctctaattttttgtctccttttggcgtactatctaatattttcattattaggaaaaacaacattcacttcgtgatgtttaactttttttctgcatgttcaatctataccaaattttgcatatcgatagagaaaagaattctgcatctttctatagtgaatttaattttgtctatggtcaaactcaaaagttacaagtttggaacacccatatcttttttctgattcatcaaattgcttagaatttgcttagaaaaagcttctcctcatcaagggctttcgaatgataccaagattatccaatttggttggcaaaaaccttcaaaaataattcccaaatatcgtgattttttaatattttggacaaaaataaatgaaaatattcatgttgcacaacggactcgaaccaccaccctttgcccctttactatcttacaaaaaccactgagccacacatgcaaatcttttctggtacaggagctcatttctgggatggtgtgta

SEQ ID NO: 3258 - DNA, 2789 bp, Heterodera glycines
  unsure (1)..(2789): unsure at all n locations
gtatgtatgcatttttggtgcgtaaaaaacgagtgtaagcaattccgtacatttacataatctataatcagcaaaaaaaggaatcacataaataggagtgcgactctttgttgactttttttaaaatttattatgtggtccncaaacggaaaaataccaaaaattatagattaatggtgtcagatgtcaaatttgatgtcatgttcattctacgccccaataagccctgagtacatgccagaatagaaaaaaaaattttcttgtcctcggttcaaaattgaacagaatggatgccggattcgttctcaatcagtgacaacggaaactaattttgtttggaaagtgaaaaatattgtggggcctatgctgcatcatttttttttgtgggaccaatgttcttaaatatgtatataacttgaggtttacttatatttacccgccaactgaaaatggacaacggctggtctccagaggagttcggcaactgtgattggggcggtaacaaccggacggaggagttcggcaactgcgattggggagacaacaaccggacggaggaattcggcaactgcgattggggcaacaacaacaacaaccggtcggaggaattcggcaaccgcaattgtggcaacaaccggtcggaggaattcggcaatcgcaattgtggcaacaacaaccggacggaggaattcggcaaccgcaattggggcaacaacaaccggacggaggaattcggcaaccgcaattgtggcaacaacaaccgatcggagggattcggcaaccgcaattgtggcaacaacaaccgatcggagggattcggcaaccgcaattggggcaacaacaaccggacggaggaattcggcaaccgcaattctgggaatggcactgcccagcgacgggatgccaatggcagaaacaacggcggcggaccgtttcgggtgccgtcgccacccccgcagcaggtgaaggaggaagacagcggtccaaacattttttgaaacaccaggccagtcaaaaatagggcccaattttagcccgcccccctcccccccaaaaaacggaatatacggttgtttatgattgtaagtttgcgttttccaggtgccggtgccaccaccggtcactccgcttgacttttgttgccccggcactgagccttcgccgcctgttcgatcgaatatcgtttacgtggacggaattgaggattacaaacacagtttgcctttgatgcgtattgaggaggtttgattttttttttttgggcaaaaaattggttggaaaactttttctcctccattgcacctataatttcgaaaaattaacaaaacaattctggtcgcgaaaagcacaaaaaaattctttgttttcgatcctctgaaattttcctgcttacaataggggcttggttgctccaactacacttgaaaaacttacgctgggtttttttttttgagagcggcttaaattggccaattttttaaatatccataattttgtcttttttttttgcacagattgccagtgtgttttttttgcacatcaccaatgtgagcgtgttggatgtgaagcgcgttttgccctcggtctattcgaatcattttgccattgtcgagttgggtacagttcagcaggccgaaaaaggttttttttggggggcggggtgggacgggtgcaaatagcattagcaaaaccttaatttggatgaatcatttttttaggcgcgtttttcaaaaaaaaagcggcgcacaagggggggggggggtccggcagtgccgataggcgccgccgggaaaatttgtattttaacaaatttagttaagaatgacaaaatttttcgatctgacatcagcgatgggtcgaattcaaagaatcaaattttaaaaaatggggggggggtgactaaaaaatgagcaaaaattagattttgtatgtgctacttactctatgagctctgatgaattacctataaaaattgctcatttcttttcagcaatttcaatgctcaacgggattacgctcagtacgggacacaaacttttcgtaatatttcttttttttttttgtgtattattttccgaaagttttcttgaggcctattatattaaaaaaattttaatttgttgtgatacatttataaaataaaaaaatctcaagagagtttttactttttaaaattattttttcaattttcacaaaaaaatcgcggattttgaaggctaattgtacaattagggccatggatgggctgcgaaaagaaataaaattgtcatcatttacccactcccgaccccatttctctgaaggtatgcttcagcacggtgcccttttcatttgtgccgagcaatcatgcactgttgcacttgcgggcggaaaaacgtcggaacgacccgcgcaccgtttgggaggaacagccggtgaagggcgaattgttcagtgccaatagcaacgacacgcagcgggcggacacaacatcgaattgggacaatggagaggaggtattccgaatttataaacattggcagcgcaccaaaaattgaaatttatacaaaaaatatcatggagtttcttgaaagcaaccaaaatttttatcagctaagcccaacgcatttttttttgtgttaatttcatgcaaaaaattgaaaaaaccgatcgttcttaacgaggtcaggcaattcaaaatcacaaatttttttgttttttttattaagccaaattctcaaacaaaaaagtgtcacggcggcgccgtcggcactgacagatcctccgcctctccattcccaacctagaaa

SEQ ID NO: 3259 - DNA, 2888 bp, Heterodera glycines
ttattgtaatgttctcccatgtttatgcccaccattgccttctttggatggacagaaaatgaacagaaggaggaggaggagtaaggcgggggtggcggtgatggctctgtcccattgtgcgcattccgtcggacacaaactggctttttgcgcgccgtcgtccacacgtaaagggaactgtgcagaaaaaagggggattgccgcttgaatatgagaatatataatttattgttagtagaaaaatcgtttacctgacattaaaaatggaggaaaatgagcaaaaaagggaattataaaaccaaaaaagaattttaacttttttgagtccctttctgaaatttaaatggtaactcattcccccccccccccgatcaccaatccaaattgtcgagaaaaatgccaacccgtcaacactgccggacacaaagtgctcctcgttgaccatcgccacacagtcaatgctcacacactccgccaatccgttgaacaccaaatggctgtcctccaacactttaaacagacgacacgttttgtcctaaaagtgaataatatttggttccgaacatgaaaattggcgaccaaccattgctccgcaactgaccaaccggggccattggagaatgtccaaatgcagcacactgtcctggtgtccgtagagcgtgttcacaatgcccatttcatccaagttccacacctttaaatcgtcaaagacagtttagcacaaaaaataggaaatattcccaataaatcgtgttctttttgttacaaattttgtgaattttctgtggacaataaaaatgcaatttcttttctcagagagtgcaagaaattgcactggcattgaccagcaaatgcttttcctcacttctgcacagagaccgaccgtaaaattgggctggtctctcggcttattcatgagggttagtggactgtaaggtaaattttgcaataaattcggaattggaataaagtttcactgtaaagaatgggagggacagaaaaacacatggtgaagcgaacttcatgcattgaaaagttggttcgagtttttccgccgacaaaaaaaaccttgatggatttgtcggcactggcggaaaacaattccaacgcgacgcattggcgacgaaatcgcaacgcggtcacgcgcccgcggtggccgctgaaagtgcgcaccggcgaaagtgtgtcgagacgccaaacgcgaaccaacctaaggggcgagaaaagtagttggaatatatcaaacctggaaacgggtggacccgggatatttctatccatttttttaaaacagaaatgcacatattaccaaatataggcatgaatttcccaatataaaggttccttactttgcagtaaaaatgctatttcatggatttttgtattaatggccactaaccatcaatagatccggttacgagaaattgatcgtctggcgaaatagcacaacacaatgccggtgacaaatcataggcctttgttgcgccattgtcgtcatgctcagaatcgggccgttcccgacaattaacaccaatggcatcgtttgtttttttcccgaggtttttgatttttgaactgctggaagtcggacgaagaatcccagtacgacaccgttttgttaggtcaactaaactggaattaatttaagaaaaaatgttttaaaatcaattattcccaaacaactccatcaatttcggcttgaaaaattccgtccaatttttgcgatcgtccgtttttgctgctacttacatttgacaacggctccgtccttggaacagctaaccagcacagcaccgcttgtcgaaaagcagacgcaaatgggcgccaatcggtggccacggtgtgcgaccattcgttgctgcgcctgggccccgaaacggacgtgtgcagcaacggcccggtgcagtttcgcctgtttcgctagcgcctcctggcgaagttgttgcgccaccgagtcgccaatcccctgctggtcaacatcgtcctcttcagctccttcttcatgttcatccacatcgcgagtaccctaaaacaaagaaaattagggccacattaatttaatgaacccattaaatttgattcaaaatttcctaaaaaatttcaatttcccatttaaaacgagtcgataaagatgggttcgttaatgaaaaaagtagtgaataaaagccaaatgaaaagaacaccttaaggctttccaacaaccgtttcgcctcccggtacgccaccgtctggttgtcttcttcatattcgttgtcctcatcctcgtcatgtctctcaacttgttcatctccaatactttcttcctctgatgaggaaggaatttcatcatcttccggagctattttttcaattttctgtttttttccaccaaatttttgggctatttttgaattttttcgaaaattagtttgttttttaatcctccctctttggttgccgcgatgcacatttttaaagaagcccattaaatctgtaaaatgagcaaaccgaaggcttcaaaacataccacaaaatttttggtacttatatggttcgtacgccacaaatccaagattaatgtcgactaaaacggaagagattgtaagcgagaggagcaaatgggcacggcacagtttgagggaacggcgcaaaacggaaagggaaaggagagaaatcgattagcgagtaaccgatcaattaattaggcaattaattaatcaaataagtacctaattaattaattaccttttccacttcgccgcctctccatcgaaagcaattaaaattagggagacgggtattaatagtacaccactatgcttataaggcacataaaaaggacaattccgtgcagagagggatggagtgtttctgtttaaaacattaaatttggcggtggcaacggattc

SEQ ID NO: 3260 - DNA, 735 bp, Heterodera glycines
caactccgtctggccaactccgtcttagtgcctaaggggccaactctttctcagacaaaaaaaatatataagaaatttttcaacgaattttaaaatacatccctaagaaattaaaaattttctcaaaaactcatccgctaaatctacttatttatttttatgacaagaattattcattaaaatattgtctgacctaacattttaaagtaccattaatattttagcactacgaaaatggaaaatgctgaaattaaatatcaacgaaaaaaaaaactcgaacatgaagggagcgaaaaaaaatgaaagtaggaaggagtagccactagatcacatatgcatatgaacaaatgcttaaatgaaataaataatttaattttttttctcaaaaatttctccttttccaccatttccttctcttttctcaccagaaccccattcttaccagtgcttaatttagtcccgccgggaccgggattccgatttttccaaaaaccgggaccgggacctgaaaaaaccgggatttcccgccccggtcccgtgcagctctattttaaacttttttcggagcttttcaaatgctaattctatttttagcgtgccgtaatttttttgtacgctaattcaaaaattatactgatcattagggctgggaattttaggttttaactatttttttgctcaaatgatttgaagaaaggcgctcaaaaaacgcatttctacgtttaaatttttcga

SEQ ID NO: 3261 - DNA, 6169 bp, Heterodera glycines
  unsure (1)..(6169): unsure at all n locations
tccaagtaggtacattagaaaagcatcattttatctgatttactgcggaaatcaaagtcggtatgctggaaacggagaaagagcctggcgtccactgccgaacgaagttcgttcagcttgagaaacacagtggcgttgaacttttggttaggtaattactctcttttgtgtgacagtataaaaggaatgttttactagtgtgttttttcacttccacctgcgttattcctttgtttttatagtttttatttttcccataatttgctcttataaaggaattcattttgacgtgttagtcattttctttttctatgttgaaagttttttacatttttaatgtgtgttctctttttatagcaggtcaatatgaatgtgaataattgttgtgagacaaaaaaaataactgttccgactaccgccaatctgattctgctccttgtccttctttccgtcattgcattagttgtcatcgtcacactggtgatttgttttatagaagaaaacgaattgcgtttcgccccttttagggagtgcttttctacaaaaaacataaacagaggcgccgcacgaaggctgtctcttcagacaaaaatggaactacgcaagtgcgttcggacttggctgacgaaggaatggtagagttttcgtacttttatgacggacatggtctaacagtgtcaacggatatgttatctaagcatggtggaacttcggcagtgcttgttttaatgatgaaaaaaaaattgatttcctctattagggagtggtgatctacaaacataaaaagaagcaccgcacgaaggctgtctcttcaaacaaaaatggaactccggaagtgccttcggacttggctgacgtaccggcggagtttttggactttaatgagcgccatgttggagtttcgacggtccctcccgacttggaagacttttatgaggcccatggtggagtttcgacggtccctcccgacttggaatcaggacgcaaataaatgccatgatggaattaggcagtcaatattgtattgttgtatatatcaagtggaagtggaaactctataactgtctgtgactgttcttatgcatcataattctgactgtatcgcccgaataaattgcttttcttatttgtttaaaaccattttctcaaatttcaatcttaattgaatttcacagtagggcatgtactaagcaaatcgtattttggcattggagcgaatattctttcatttttccgttttttctgttctctctccgtttcctttttggttgctattaatgataagaaaatggggttatcatcagaaataaatatgtttctcaattacatattattgcatccctaaacttgatcctacttctgtattacttttttatattcttttttcggtacttgtgaatttcagggcttggaaattgcacagcaaagacagggcatgggccagcattgtgactttcgaagtgcagcaaaatactcaacttttgcccatacatttcatatggcacagcgccccatgagacctttctgatccgctcaataaagtaccgttcctcgcccctcacagtgaactgtcaatgaattggcattttaattaacgcagtttttgctgagaatgacgaactcaccacgcagcaaacgtacagtccgacaacgacatgttcaaattctctgcggctaagctgcaacagttgcaccaaatgccatggggtgaccataatgtgctgagtgccaatcccaaattgtttctctaattccatttgtaaatttgttccgccgtcgttcttcggttgttccgttttgtcaaaaaaaccaatttctttgagctctttccacattttcagcaaatttattttacgatcaaaataatgtgcgtacagtggcaacggttcatcctttaaaaaatgaatgaataattaattattgctttgtgttaacggcacaaaaaacgcaccctcattactaattcatcgatccattgtcgaaaaactttgtcagtaatatgaacgtaatccaaattgtcgaacaaatagcgagtctccgagtgtttgaacatgacgtatgtttggtctacgaaaatgacttcatcaacgatcacctgaaaaaatttaagccaattttagggttttcagattttgagatttctactcacagtctctgtgagtttccgtttacatgctgccaaacagccgaccaaacattgtctaatcgttgcgtgcttcctcaaatgccttacttccgagaatgagaaaaccacttttttaagcttttccgtgcaatgcaccaatgagtccaacgggggttcctcctgtgtttcgtccttcggcaggagatcaatttcttgtttaatagacattctgtaaaggttgagagtttgaactcgaataaaaaactaaaccgaaaagatttggtgactgtgatgaatgcgtatgtattaaacaagtaaaatttaggcagtaattgtccgacttttagagagcaaaaattggagagaagtactgaaatagttttcgttttatacccctaaaacattcaacgcgagtgacactaccacacatttacaaatgcgtagataggtatataaataaggcacatacgcctcgataacatttattttttcgacatttataactaaactgttccctaacccaatgtgtataacacttttaacttttatacaatttcagactttgatttgcacaaaacaatgcccaaacaagtgtgggagtggtatgattacactggtccgttggtcgtatggattgtgttcttctccgttatttttgtcatctccgtcacgtgcattttgtggtgctgcatcaaaaaagacgacgaccccaccgtatttgcgaaggtcgtttttatgcaaacaaaattggcagcattatttaattttaccgtaattttttaatttatttttttcccttttcagtagtgcagaatcttttgaaggcccgaaggaacaaaaagaaaatgtggaagacaagaaatgaacaatggcattgcaatttcattttcgacggggttttgttgttaacaaattgtaaaatgttccatctggttttttaatgcatgtgagcccagatgataatttcaaaataaacgttgctatgtgcactaaaactattaatttgggaagttcttaaaactcagtattactcatcaattttggttgattgtttgttgatatttggttctcaaattgtattgatgtgttctatatgtgtacacatgtatgtatgtctggtcactccgtatcataaatctgggtaacaattgaacaaaatagtcttatcgcgatcggaattgtattttgatggtttaggtaggccgagtttaggtgtttgatggttctattcattgacttttcgactcgctctttttttaactagcacccgaactgccattaacccgtggatatatccctcctccgcaggtcgtgtagattaaagaatcatttatcggttgtatgaatatgaatgtgtaaaaactgtaacaaaccattcaacatcatcactgtagaaacaaaaataaataataacatcagaaccaacccaaaatgctttctacatcaaaaaaggtcggttttaagcagaaaatgatacccaatagatcaattaaataaatgataatactgccgatgtgccgcccctttttttggaggaaaatttcatttttctggggtgggttgggaccgctgatcaggaatataacattcattttgagtgacccccaaaagcatgtcttcacgactttttcaaaatccacgatcggcagtattgccatgtaaacataacaatgtcattagagtactcaaataccactcgggcataaaaaaagcttctttcctaatatgattttagcctttcgtagaagagaaattttccatattaaataaaagccactcgagcgatattttgtcgactttcgaaaaaccaattcggataaaataataaaagtaaagaaaaaaacaacattctttttcctgttccttacgctctctcttctcccttattaagtgtgaatgtcaatgcgccattcgcgcgacacatacgcccccggtttgcgaatggtcagaacacgattctcccggtcatgcgtgaattccaagtcgtccggcgtgtaatctgtttgaatacgaaaatagcagctaacgtaaggatgaacaaacagatttccctggcttttctttacattttctgtttcaaaaatttaaaatccggaaaattcgtaaatgcgaggaaaaattggtaaacaagcacagagcattggttatctcattagggacgaaaacaactgaccctcgtagtacatgtgcacgtttcgtgggtaatagcgcagtccgcgaatcacaatgcgctcaatccaaacgtccgggtcaaaagtgccgcggctgtccaaactcttggcgagaattgagtaggtgtggtcgctcacttttttgtaagtgaatccctggaatcattcatcatataaaaaacatttgtgtgcgttggcgctcaattcgaatccccaaaatcggctacctttcattaaaccaaatgttatttatcataatcaccactgacccagtaaaggtattcatttttttcccggtaattgtgcgtttcgccgtcgtccaagtacagtgtgccgttggcaaattcccgatccgccatggctgcgatgtacagagttatggggtcgttgcgctgcattttggatgaacggcgcggtctctccctcaacttaataaaaaaatcaatttaaattgaacccaatctcaagaaaaagcacaacgcacgggaatgatggtgccgccacgctgatagaccgggattttctccagcggtgtttccgtgtaaattgcgccgggagaaagataaatgcgatgtgtgtcccaatcgaacctaatgtgccaacattaaaggatccgcactgatttgtcagttaccatgtttgtgctttgcccggcaaatacagcgacacttgttcaacgtcgggctccaccactggacgcaccaaaaggcccggaccgaccagccactcgcgctcctcatcgtaggaagcctcgtcctccggaaattcggaccacacggggcgcatcggcggcacaccggtctttgtgtgctcgtagaacaatgtgtacctggacaaatggacacaaagaatgccactgttgtacaatgccctcaaaacccgcatattttttaacgcaccaataaggcaaaaaggagtaacgcattcgaatcgcatcgcgcatggccgctttctcacgctcaccgaacagccaaggttcgcgccgttttgtgtcaatgtgtgcatgggcctaccaaaaaagtgattttaaaaagggatggacaattaaaagagttataataggctgttggaatcgaataaatagcagtaaattttgagaaaaagtaaacaggacaaacaaacccggaagaaaggctggaaagcgccggcctggtaccaccggaccaacagttgcgcatccggatttttgaagaaaccgccaacatcagcgccaacattgggcatgcctaaagtttaaaatttatatttgagctatttaaggcaaatattattcacaggtaatatctatttacccgaaatggacaccgacaaaagcattggaatggactgcttcagatgggaccattcggccacgttgtcgcccgtccaaatggtggcaaagcgttgggagccaacgaaaaaggaacggctgagcaaaaaggggcgcaatcggtcgcccgagcgacgccgctggccatcaacagaggccatcgtctgaaaagcagcaattaatgaaccaaaaatggagccaacttgcacagaattgttacaaaacgatggttaacattcagacacctgcataaatccgtagctgttgtgcacttcgcggtgttcccaaccgccggcgtgcaacgcgtctttgtgcattgttatttcaggccctgtgaacacgctgggctcgttcatgtcattccatgtgaaaacctaaataaaaaaatgtgataaatggtcagaaccgacaattaaatccttacaattagccctcccccatcacgcaatttattcaataattgccccaatttaaaacattttttanactccgttanatttctcattggatccattttttgtttgtatgatataattattntgacacatcatctcacattttctg

SEQ ID NO: 3262 - DNA, 743 bp, Heterodera glycines
ccccccccagacttagcctatcacccaaatgttccaaaaaatttcattaaattttcaaaaaaatcgacattttttgatgaaaatctcataaaaatggctcaaaagtgcaaaattcgtcacttttttggtcaaaattcgttaacaaatcgcattaagaaatgtaaaaattttcccggcggcgcctatcggcaccgccggaccccctgtccccaaaaagtctttaaaatggtgacatgcaaaaaaaaaggtcctcgccagggcggaggtacccccccccccccaaagccgaaatcctgggaccgtccctgatcatgtcgtgaaaaattccaaatcataaacacaaagtcgaatagaaagtcggatagttctttcgaattttgactttttcgagttcttgaattggtcatattttaaacaaatattcgaaaagtttctgtttataaatttcccaacaataagatcattttctgatagaattattaactacaaaaacttaacaaaccttcgactcaatttcttgaatcatctccaaggagttggggaacttcaccgggtcccaggtgaagtactttttgccgtccgtgtgctcaatatccagccaaagcacgtcgacgggaatgtcatgttcgtcgaaagcacgattcacgctcagcagatcgtcctgatcattgtaattccaacggcattgatggtaggcgatgccgaacaactgaaagacgaaggaagaaaaacgatgcgccaat

SEQ ID NO: 3263 - DNA, 1089 bp, Heterodera glycines
  unsure (1)..(1089): unsure at all n locations
tttctttttgtatactcatggctttcctatagacaaaatatgattactcatagtttttttaattgacacatttttatcatttttttaaatgaaaatccgtacaaattgttgagcctattaatcccgaaaaccagccttttttgttgaaaatctgttaataaattacactcaaattttcaaaatttcccccggcggcgcctatcggcaccgccgggaccccncctcttcaccaaaagcccgccgaaaaaatttatatgaaacgtaaatctgaatttctaataatattcaatcatttaatccaaaaaatggttaattgtttgaattattttcactttaaaaaaaattaaaatttgaatttgaattttttaaaaatttaaaaaaatttttttaatttttaaaatttcccagttagtccaggttcccggtcccgaaaaaaaatcgaggtcagggtcccggtcccggcttctcaggtcccggcaagtcccggtcccggttttgcccaaaatttccggtcccatggcactctaatttaaacaaccttacaatttttggatgatcataaacatatgacgcatttaattccttagtaacttttttcagaaaataccaattttcattttctttatatgattagatagcataaaagctcctctattattttgttaaatttcaaaaaatttattgagttttaaaaaagtagggataaaattagtgatccaaatttttcgaaatattttggtttttgtaaattttgatagtttattatttagcaaataaaataaaataaaataataattaaatttaaatatttctatcattgatattttgtaacttcgtcccagcaccattttaaatattttcataactttttatgaatttttatttatctcataaattaaatccctattaggtaataactttttttcatttgtatggcaaaaaattcaaagattttgaaaaaaataggaaaatatctggaaaaataaatgttgaaatcgcaggaaggaaaacgaaaacaaaaaatgcaaagacagaccaatggaaaaaaggttggcattggcatcatttcctggcaaaaaattttgaaaa

SEQ ID NO: 3264 - DNA, 2842 bp, Heterodera glycines
  unsure (1)..(2842): unsure at all n locations
ttttaaattgtttcccatccgtcgttatttattcacaatttattcatttcgtccgtcggcgatcactttcttttgcccttttcattttgccaacggaataaaagcatttccattatttatttatttatatgaaaaacagaggaagaaacttcacagtttcttttctgtcccattttattaaaagtttaatcaaattttgatttgcttttcccaaacaaacttttgtggaaaaatgccaagaataaattagttgttgaattgttaatgaattttatttggtaatgataatagtgccccgccggtggtgcttctctcccccccccccctttggcaaaagatatgttccagggaattttcgaagccgcttatcacgaatagagaaattcatttcgacatatcaaatcccgatcctgaattcagacaagagtcggatattcaatttcgaatttctcacatccaaagttataatgcattttggctgatcttcgagtggagaagtcattaaggccttattgagaaatagaattttcagttattgtctcaattcagattcgggattcgaacttgtacgaaatgaatatattcgtgttcagtgctccgaaaccccgaaaacattctcaatttttttgccagagacaccatcggcacaattagcattttttgataggaaaatgtattttacgagcagcaattcatcatcaaatgacgaagtcgaagaacacttcacccattttgcacctgatcagtgtaaaaatattaaaatgaataaaaaaatgaaaaatatcccaaataatttaatttattttagcaatttttccaaatttgagtctgtccgaggaattgcgcatcattagggctcggatggcgcgaattttggagaagaaacgaacaaaaacaatgggaacatcgtcaagaggcacaagcgatgatgtgaccgaacagaacaccggtaacaaaaatatgtttcattagttaaaaaattctttggaattactaacggaagtacaaaaatatttggtcaaaattcgggcaataaaaacataaaagtttagcctcttttataaattattattttcgatacttttttttgccatgggaattattgtaaaagattttcattaagaaatggacgatgatgatgatgataattgtgatgacgtgagcagcagttttcacgaggataccaagcagcaacagcaatacgagaagagaaaaacaacaaatattggtaaagcaaatgagaaaaagaagttaaaaattaattatgaatacggtaccaaaatatacatatacggtaaatcaatattaggacataattgatgattactgtacccaaaactatacggtaaatccatcagtaaaatttgaattaattgtttagcttttgacgttcaattcaaagcaattttgaaaagaatcactgagttggagaagaagcaacacaaacaaaatgaaaaagtgacaaaaggtaaaggaatttcgaattattgaaaattaaaaatgagtttttatttagcattggttggacaaatgaaacaattgcaaaatgatcagcagaaacagttggagagaatcagcgaattggagaagcagcaaacggcgattgttgatcagctgcacaccgcccaaaagcaaattggtaattaattaattaatacttgaattaataccttaattaatcgataggaatcgaaggattaatatccctaatgagcagtataaaacctagagatcagagaaattccgattttatgtcctggaaaaccaatttgttcacatttttttcagatgatcgcatttctcaaccccaaactgatcagcaaccgatggaactttgtgccaaaattagcgaattggaaagcaacacaaatctattgtttggcaaaattttggacgagttttcagagtttggcaattttgtgggcattttgaaggacagattcggaagaggtaaacaatcagattaataactgatcaccaacaaaattaattgaaaaaattaaaaataaaataaatttttaataaatacaaaattacgagaaaatcaatgaattcaatgcatttaaaaatgaaatatcatataatttttactcattaagagttgctaaattcggtccatcccaaaattcgtgcgaaaatttgtgaggtgaaaattttataacaaaataaacgaataatataaaaattcttttcagaaattttcaaatgttcaatcaaattgttgggatgcaaatgcctgccacaaaaacctccaaatttttggctccgaatgtttgataattcattataaagaagctgaaagtggtaagattaattctgcttaatgattaattaccgaatttcttctcatttacttaattgttttttcagcttgggtttctgtgttcgctaaatattccgtcccgagcagtgaaatcggcggacttttctatttcgaagtgaaaatcattaatttgagaaagtaggcaaatttacggggtaaacctaactcatccatgcccaactcatccatgcccaactcatccatacccaactcatccatacccaactcatccatatacccaactcatccatgcccaactcatccatgcccaactcatccatacccaactcatccatacccaactcatccatacccaactcatccatagcacgatacgagtcgtcgccgtggcatttaatgccacgactgagaccgcataatcaaaaatgtccacggtcaagaccacaagcagaaaatgccatgccacgaccacataagcagaaaatgccatgccacgacgatgactcgctgcgttatggatgagntggggctatggatgagttgggtatggatgagttg

SEQ ID NO: 3265 - DNA, 2071 bp, Heterodera glycines
atccatacccaactcatccatacccaactcatccatacccaactcatccatatacccaactcatccatgcccagctcatccatatacccaactcatccatgcccaactcatccatacccaactcatccatatacccaactcatccatacccaactcatccatgcccaactcatccatatacccaactcatccatgcccaactcatccatatacccaactcatccatgcccaactcatccatatacccaactcatccatgcccaactcatccatacccaactcatccatacccaactcatccatagcacgatacgagtcgtcgccgtggcatttaatgccacgactaagaccgtacaaccaaaaaatgccacgactgagaccgcataatcaaaaatgtccacggtcaagaccggcataatcaaaaatgtccacggtcaagaccacataagcagaaaatgccatgccacgacgatgactcgcagcgttatggatgagttgggtctatggatgagttgggtatggatgagttgggtctatggatgagttgggtctatggatgagttgggtatggatgagttgggtctatggatgagttgggtatggatgagttgggtctatggatgagttgggtatggatgagttgggtatggatgagttgggggtgactccaaatttacattaaattattattaattaaatatttttaaaaaaattggagaaatatgtaattaacaaatattgtccatttatatgcgtaaaattaaaatgaatcaaaaattcttatatggaatcataagaagaaaaaatgtgagatgtttttcaataacgaaaagttgtattgtttttcattttgaatataaaaccctaaattatacttattattttttcttattaattttcaaaactctgaaaatatggacgaaaaaattccgacttttttgttttcagttgtgccaaaattggattctccaccaaagcaatggcattttgtgaaaaagcggagggactgaactgctatgtgtatcgaaacgaaggcgaattttggacgcattgcacaagcaaaaaaggaaagccgaaatactcacgagacgatgtgatcggatgcggcgtcaatttggcctcgggacggatcattttcacaaaaaatggacaaccgttgggttggcaaaaacaataaattacttaatttaattttggggactcaaatgccttttaagacaccgccgatttgtttgtttgtccatcctctccttctgctaatgatgctgttgatcatcggttgtttccatgcgtttctttggccgactcgggcgatttaattgaggcaaatttcgggcccaatttcaaatttgaccctgccaatgccgaggtgtgtatttctgtgttgagcatagcctagtaaatttttatttcaggaattttcgaataccaaacaaagaaattgctgggatttagccgtttgtcacaatgaaatcacaatttctggcccacacaatttgattgtccgtcataaaggaagcggaaacggtatgctcctactgtatttacaggaaatttaaatatttgttaaaatttaaatttttcacaaaggttggcgttctgtgtttgcaaaatattccattttgcacaatgttgcaactgagtccattgacatgttttactttgaggtgaaggtcaaaaacatgaaaaggtaagggcagcttgtgctaattaagaaaaaaccctatatagatatttcacctatatatctctaggattaaattttggggatttaaacgataatttcttttttttgattactttcttacaaaatttgatttttataaatttaaaattttgtaacatccaaatcgaagctgcataatgccgaaataaaaaagccggataaaatggtcggcattgattgttgactgttaattcggctcaacattgccaatttttacaagaattcaatttacttttttccacttttatctgtgccatcgttggatttgccgtcaaaaatcagacatcgctggatggaacaattcaaaaccgcaccggtacttacgcattcgataggaatggcact

SEQ ID NO: 3266 - DNA, 3093 bp, Heterodera glycines
cactctgaaataaaaccctatttttgaagccgaagttttctcttaaattatttcctaataatattttgtgataaaattcatgatcatatacacaattattgacagggaaaagggaacagtgagagacttaattatttttgcaacaaaaaattaaaatattttatcttttaactaaaatgtataaatattttttgcaattcgaaaaaaaatctgtgtaattatcgcatttataaattttaaagaatatatttttttgttttttaatatttgttaagaaattttaactttgccttttttgcagtttttttaaacttttacaaattcctaaaaacatgaatgaaaaatgtattcctcaaattaaattgccaacaaaaaaagctatggtgctattttggcatttgttccttttttagcatggcaccatgccttctaaattaatatctgagtaatggggaggccatggagaaatgaaactgggccataccttttaagaaaatgccaaggacgaaaatagcacaaagcatatttcaatgctaaaaaggaataagtgtttccgataatgaagaaggatttacttgtcgaaatttcgggtgcaccccaaaatcaggccgccgaaataacgccagccgaaatcacgcctggacaaaaccacaccattatgaatatttttttaaattttcaaacagaattttttcatgaaaaagctcagaaaattttaagaaaagatttgttgaaaaatttcagaaaaatttagtaatttatcataaaaatccaaaaaaaaatcgcagaaatttttaaaaaattttcttgaaattttcttataaaaaatttcaaagattttttcattaaaaaatttaagttagaaatttaaaaaatttcaagcggcgtgattttgtcccgttccctttcctccattatttgccttaagaggtgttaatctgtgagtgcatggataccattcctattctcatagtacagtacttttttccgctttttacataaaggcatcatcagcaggtgtcgttattgagttttcaatttttctttaaaaattgatcggattttccagaaaaatccatcaaaatttcttgcatatttcaacaaaatttaaatttccctgtggtgatttcggcaccgcctcattcccccatacaaaaaataaataaattatttatggaatccaatcagtgatgggagactggattaattattttataaaaataatttttgataagttttggaaaatttttttatgtcaataatgcgataacatttaaaaccaatttgaattattatatttgtgcaaaataaatatatttttttaaataatcataaaattttgcaaatttcaaaaaataatctgtgactgttaggtctgaagacgtttcttaacaaataatcaggcaatttgtccaccctcttttgccgatttcattttattcaattttggcttcaaaaagaaagaaattaattttgtaattaacaaattaagaacggaaaatgcgttttttataaataacaaaaatattccaaaatattatttttttatttaaatatttttagctttttgtttttattttgttaatttttgctttattcagcgagaaaatggcttccgcggatgagtatcttcacatcttccatttccttcatccaaaattgcttggcgttgatctcgctttacgctgcaacctttttgatgccattgttgacgcgcattttttgtcaagaattcggaccttgggcaccatggaaattcgccaagcaaccggagaaaacggagccgacgacatgcaaattctcaatggcactggggaattgctgcccattgctgacagaccagtgccccatcgtgtggttggattcgaaagcattatgatctcgtaagcacgaataaattaagaatttgacctacaaatatgtgtttttttttattttcttcagttacattagcccaactgtcgccacatttctgcaaaatttgggacatcttttcgcctcatgtgactcttatttgttgctcgaaattgttaatggacatgtgttggaatttgtcattcacgtccttttgccgctcatcaaacagaaagtttatcgcattgaattcgatcctaccggacagaatggtgacgcattccataaattacgacaatacgttcctggttttctcaacgaatgtccatctctccgtgtcgacttcgagaggtgaactgtccattttttggtttttataaattaattttatctcttttttttagctttttttgagtggtgcttcgtccgcagtcaatttcattgtgcttatgacgttaactcgtggttctgtcaagccgtttacgatcactaacgatgtcaccagggaggagttgaagttggaatatcgtaaggaccacggtctgttgcttgtccggtgcccaatttcgcgcgacaaagcaaaatggaaagcatatgaggatggggcgttggaaggagcgatgaaccgaaacactatttatgttttaaaaaattgcacaggcggctggtcagttttatgaagttttatgggacaccatcagcaaaaactttaaaacccttgtgcttaaaaatgtgtattttcttgaaaattaaaattttatgtattgaaacctggaatcttattatttagtcaattcttacagctgttttaacgtagacctacaaattcctgattttctcccaccgaaaaaatgctaaaagatcacaccgcataaaaatccgatcacttaagtcatcatctcttacaataatacttggaaaaatactatttaaccttgtaatgccttggtttcaaatacaaaacatttgatgaaaatttatataaaagcaattttcaattttatttaggtctcgtgatgggaaacccggcccaagcaatcaacaatagaagaagaagcaattttagttgatcagaaaaagaccattaaattttatcatatttttattatctttctcaatatgtcttgtcattttgcaactttgtgaattttggaggacataaaaattcaattcaaaatttaccattcaaatagaagaatattctattgtttgttcatttatgaaagtttaattgagcaa

SEQ ID NO: 3267 - DNA, 4227 bp, Heterodera glycines
ccggccctattcattatttatttatatatttttttacattttttttttgcgctccaacgccaaaatcttctagaaaatttaattccaattcatttggttagtttttttctttccaattgttttctcggattttgctccccgttttgttggccatcacgaccaaattactacattttttgcttgattccacgttttcaattctgccattcgactgtatcgtattcattttttgataccttcttaattatttgttttgcttttttattattaaatatatttttaattaattttatttttgcttttttattattaaattatattttattttttccatttttacctcgcttctttttcttttccaatggcattttgcagttgcgtcaaagtgtccaaaattgggtttctcagtttttcgtgcattattctgagcccattgtcttggtaaaggggcaaaagaggtaacagtaaataattttgcattataaataagaaatttgacaaaaagtctgaagaaatttcaaattgctttaaattccctaaattaaccgtttaatttaatcatttaaaaaaagaaaattgacaattgacaattcgtcaaattcaacttttaaaagaattaattagagttgagcgcgaccggggaacacggacaactgagtaccgaagtcccggtcccgggtttgcccaaaattcccggtcccgctcaactctagaattaattattatccaaatttgtacatataccaatttttaacgtgaagagtttggtcaacagaactccaatccttaacagcataaaaatttctcagaatccaaaaaacaaagaccgacgagaccaagaattgaaatcaggaaatttcccgggtcgggaactcatgcaacaatttaaacatgacatatttttttatattttgatggatcgtcctttattcttaacatagattctctaattcttgaaacgagccgcccagaagagagggtaggataaggcgagaataaaaacatttattttaccatacattaaatttatattcaaatttattttttttaaaaacttgtgctttgaacatcgaccacttcgccttttttgcatttgaactgctttgagcactaagccgaactttgccaaaccctttatccatgtccctgttcaaaatcagatacagatctcggctttcctggtccaagtcaaagccctttaaccggatgataaaaaaggtataaaaggaaaatttaaattttatttttaaaaaatattttttggctttcttcaatatcacttgcttaaattatattttattagaatggaaaaaaccatttttaaagacaaggacaacctaattgtattgattgccaataaataattgatttttattgcaacattctcttatatcttatatttacaattttatttaattttatttttatgttttagtaatataataacatttaataatatttaattattgttaccctttcttataaactttcttgtaattagccattttatttcttgaagaaaaagaaaacaaaaaataataattaataaatagcaaataaccaagactaatgtaattaaaatctttttggcatttatttttggcaactttcataaaactcgaaaaaaacacattctggtaaaaaactaaccatttgaaaaattaattttttatgattaatttttgaagtatcgttggaattcagaaattttttcccttacgtcctttgaaatcacaaatcacttaatcgttattactattatttataagacaagagattttaatacttatgccatgtttgagaatgctttcatttgattctcaaattggaatgaaataaatgaaaatgaaaatggttattttttacctaataatataaattttagaatgtataaatatttcgataaacaatccttgaaattttctctttttttcttcgcatgttttatattgtgttacgactgtttttgggttgatatacggaagcaaggtaattaaaaaataaaaatgaaagttctaaaatactgaaaaataatttattaagatttaaaaagcctaacggagcctaaatcatattttatcaatcacttcggatacaactttcaaaaaggtatgaataattaataaatgtagtttataaattaaatcttattgaaagcaaaatgaatttaaggtaaaatttacgaaaaatttcgaaaaaatgaaattgaaaaactaaagcaaaagaaaaagcgaaaagaaatggacagtgaggaagtgaagaagcataatgaggaaaaggagaaggtgaagaaactgatggcagaatataagcgaaaggtgaacaaacaaatggaaaagcatgtcgaggaaatggagaaggacgaaaagctaaaggaagtgctgagggaaattgaagaagcgcaagcgaaacacccgggggagaagagaaaagcggcgaaatccatcacagagataaatgagaagcattgggacgaattataccagggggacattgagttgagcgtggaacaggcacagtatttgctggatactgtaacaaaacccgaaaacagagcgttgatgagagcgaagcgaggggcagccagcaatgctagaaaatttcccaatcacaaatggcctattcttgtcccattctcttttgacggctcaatttgtaagtttcaattaagagctgaatcaacatttaaatacctccgtgtttcctcgattattggcccctccattagaacccctactcccacttccattaaagccctcagaggggttgaaaagagaaccttcgggactcgaataaaagaaaatgtactagattatagaaataaataaacgatcaattttttaagccagcgaaatgaaagcgcatatatatgaagctgtaaaattatggaacgataacacatgcttgaatattgttgaggatgacgaagtttctcctagaatccaattcacaaatattaagggcatgggatgcctttcaaaagttggaatgcaatcctcggatacataccaagaagttaaacttgaatacccaaattgttaccaagtaattagtaaatcatttacaacaataatctttaatattttcaaaagcttggaacaattgcgcatgaaattggacacgctttgggattttttcatgagcatgagagatatgatagggattcctttgttacgttttacgctgataatgttgaccccaaaaattattacgctttcgaaaaagaaacgattgagatgacagacaattatcaagttccttatgaccttggctcagtgatgcactataacgcaagtaagcacaaatttaaaaaaacatgttttatgccgagacctattttgcagaaacattctcaatcaatggtgagtatacattggtgcctcgagtgggtgcttcgtatataaacacaattggacaagaatatggtcccagcctcagtgattatattgttataaacaaacattactgtggattagagtttctcccggatggatcaaccataaacacaggcatttacaaatttgtttattgtacattgtttttgtaattaagaagcgtgtcatgttacaatgaactgtgacaatgatgggttccagaacccggacacttgtacaacatgcatttgcccacagggttatatcggagcgaaatgccaagatgttgacattggtggttatgcccctgccagcattgcaaatacttgtgaagggaatattttatttgcaacatcaaattggcaatatgtaagcatatattagggtgcaccatttttacttttcactgatttccatgtcatggtcgctaaaagctttaatttggcgaacccaaagaatcaatgaaataaacatttaatataattattaaattattacaagcaaacaaattttatgaaatattaagaaacaatcaaaacaaagaaagaaattcatgcattcactagcaacaactcctatgtgcaaatcctatatttttaaacttctcacattttattatttcaatttgtcatcacttaggggcttcctatttgtaatgtagtagtagaactctcgatccatttcgttttatttcacatttctcttagataattggacaaattggatccagtaacttggactccaaaatcgattatgcctactgtcattggcaaatctttcctgacattggcaagactattctcattgaagttttggatgttggtgtaatttgtggagatgggtgcatttgggg

SEQ ID NO: 3268 - DNA, 1766 bp, Heterodera glycines
  unsure (1)..(1766): unsure at all n locations
ctactgtcattggcaatatttcctgacattggcaagactattctcattgaagttttggatgttggtgtaatttgtggagatgggtgcatttggggaaacacagagattagaacagcagcaaacagaggcaccactggagtacggtatgttcagcagagaagacaacattttgttttattaacctgcctctgatgtttttagattatgttgccgctctgatctcggttcatccggaaagcttaaaatcacagcaaaaaatggatatgcgttgatcagtctttactcctttagtgatatacagcgctttgatatacgcttcctgcagtattaacctaaaaactgttgttgtcccgagtactgtggctacttttcatcttgtaatatgtatatattttggcatttttataaatcacgaaaacaagaaagtctgaaaaacattgaaaaataacatctaaataggaaggaccccacttaaaattttatgcattgtaaaatgccagttaaaaacctaaatatttcgcgaaattaccttatattatcgcggacatcacctgtgcgaagagcagataatgcttgaattttctcaactcctttctcaatcgtttatggatgaattattaattcaaaatctatcaattaaataatttcagaaattaattaataaatggcctctgtgtgaattctctgatgattatcgtttaattattaggggcagcagactttttttttgaaataaaatataattttgaacgattaactaaattatttttttggtatagttcgactttactaggtcctctaattgcctgaaaatttgaataatttgcaaaaatctaaaaaatttgtaactaaaaaaaattacgacttattaattttttgtcttttttaaacttaaaattattgaagttattcagaataaaaaattgttgtatcattctatcttttttagaattttggacatttagtggtgtttttgctactttggacttttcgtggcttggacaatgatcggcagaattcggttttttcgttaatttaacagtatctaattttaaattttcgttatgaggcaaatttttctgcaaaaaagaattacaagcgattgcaataggcgacgccgggaaaattctcaaaatttttgattttattaattgttttcaccaaaattgttacttttggatcccagctgagaaaaaatcgttgttactttagagaaatatacaaaataagaaagtgttagaattacaggcgtaagcacttcattcttagaaacctgtacattttaattttaagatttaggccttcaaaatcggtataactagaaataagtgcacttggcatctctgtaataatagaaccaaatttcaaagtcggctttacaattgataaatttgagcttggcactcaaatgttcgctgaagtttttcgtaaaatttccaaaatttcatttgacttgctaaaattcattttcataattgccaaacatgcagagcagtgatggacagaattccgttgtttccgttagttttactgtctttgtttcaaattttattatgaggccattttttgttaaaaaggaaaaaaagcatccctcaaattggaattttagtcattcatttacaagaaaatttattaaattttccatctaaagaaggtaattcttttcctgaacattttgggcgaatgaaatgattcgtaaatttaaatttatttttccaaaaannacaaaanntgtttcttcacccattgantttctttatgctgca

SEQ ID NO: 3269 - DNA, 4736 bp, Heterodera glycines
ttccgatttccgacttccgaaaatttttggggcctcggaatgccatccctgatagggaccgccggaccccctgttcctagttttttgaaaaattgcccgccaaaaaagtggttttgaaaagaaaaaaatagtcaaatttatgaatcgttaataatttgatttccgatcaactttttaccgtcggatccaatcgaaaaatcttagtcgacccatcagccccttttaatgcatcccgccagcccttttttggaaattctttgaatttaattgaaattttttcgattttccaaaatcccgcaatcccgcacgggatcccgcaaattttaaatgcgggatttgcgggatttattatcgagtctttatcaatttcgcgaaaacaattgcaaatcagatacatttcgaggtgttcggggtaaaactcattcgattatcggccaaaattgagaaagtcgaaatttaggggtctatttttcaattttttgtattttccttaagaatttttctcaaaaatgccaaaataggtgctaaaaattcgaaaaatgccaaaataggtgttaaaaattcgaaaaatgccaaaataggttgtaaactattttaggtgccaaaacgccaaaataggtgtttttaggtgctaaaaagtcgctctaaatcgaaaattgttaggagaaaatgctatttttgggcttctctcatcataactaagccgcaaaaaaataggtaaaaacctaaaaatcccagccctagtaattaatgaaatttcatatttatttggcataaattattattttttcacatgtgatcagcacagaagaacaaaggcccaaatcgctccaacaaattcggttccattgcacatgcaccgatcgaaagtttaacatcacaaaaggcacatttaaagcacgaaatgtgcactaaaatatggaaatttattttaaataattttaaatttattattttttactcgtatgcttctcaactatcagcttctccgttggctttatttctgtctcgcaaatttcacactttggatttggcaaaatgccactgccaaagttgatggccatttttgtgcctgatgagaagatggctgatgaatttggaataagacccgaaaaatatttaaaaaatttaaaacgaatttctagttaaataaacatcgcatttaaagcaaagagaatggagggcttttcaattttaagttttgatcgatttgaagacaattaaagatgggaaaagggcccataaagaagcaattgctgcgacatatgcttgctttggttcacttcaaaaaagttgacgaaattattttttgagactaaaaaaatttaattaatgaaaaaatataaaaaatattatttaattcgaagaacaaattttatttcattgagaaaaaattaatataataataatcaaataagaattatgaacatgaaaatttttgatgaaaatgccgaataaatggagaaattttgaaaatattgacacaaggtgaagaatggaaattaaggaaataaaatattccagaagtttcaaaccaagctgaaaatatttttagtaagcattttcggctgaaaaaagtgtattaatatgaaatccaataaatttgggccctaataaaaattttaataaaaagaaaaattgaaaatatatttttttgccttttcttacttaaaaattctaaaaagtattaatagtaaaaaaaggttcattaattaatagagagaacttggcaatggaccgggaaaaggctcgtcaaaatatttaaattttctttaattttttccaatgatgatgatacacactctttttgtctttaaaataacacctattttggcattttcgaactttagcacctattttggcccttttccagaaatttcatagcaaaagtgcaataaaaaagaacatacacccttaagaatcaatccaaaaatttcagaaaaatacacccctaagaatcgacccaaacattttcaaatacacccctaagaaataaaaaaattttgtttaaaaaatatctccaaaatttattatttattttccttgactagttgccttgtgcaagcatagttgataaaaaaaattggtcacttttggatttttgtgcataaagacactggatatttccaatctttaacacctatttacgctgattttggcatttactgcgtttttagcacttattttggccttttttggcaccaatttcagtaactttagcacctaaaaatcttttagctgtagtaattaaagaccaaaaactatttattttagagacatttactgagagaaagtcattttaaactaaaaacaattgatcacttaattaatgaccatttgatgaagcggtggtagcaaatggcgaattggcccatcattttggcctttagtttaatataaaagcctgatgaatatagccaatgccttctgcttctatttggagttgaaaaatgccaaatgaattcacaaattctaaacaatcaaaaaacggtgtaaatatcacaaatataatttatgaaacttatttttggagggggtaaattccatttccatcagaaattcacgatccaaacgcgactcagccatggccaaaatgagtacttttcttaacattttgctttttgattttttgatccagaaaactatggccttttaaatttgtccttttgaaaagtattggtaaaaattgtcgcgaattttaaattgacgaaatttcttttattaattatcaaacagatgcaattaattgttccgattttattgcttctgacattcgtcgtcagtttgccaatttgccatggaatgaacggacttccgggcgaaaagggcgagccgggctacccggggatgccggggatgaaaggcgaaaaaggccagacgggcgagccgggcgcgccgagctatccgggccttcccggatggccaggcgaaaaaggcgacccgggctatccagggcttccaggtaaaaaatccgactttttttaaattttctttttatttattacaaaaaatttagaaataaaatttatatttgttttattttcaggtcttcctgggccgattggagaaccaggtccaaattcaatgaaacgaacacaattaatttttggtttttcaatacttgcaggatattaaattaacaattatttttgaaaatgaaaataatttattttcttgaaatatctgaaaatattctcgagtcgaaggaatggcgacataaaattcgggcactgggaagtttaggcactcttataataaaagaattgaaaaaagtaaaaaatagttatagtaaaaatgaattaaattaaaataaaaaacaaataaattttaatcaagttcgcaatttagttttaaggagtttcctgcccatttaattaaccattcttttttttgttttaaatttttattttataaaataggtaactatgatgcccaaattcgggtgccgaaaagcttccccctgcgactgctacccgaattaatataaataaaattttttggatagaagaagccttaaaccaagtaggaaattatataatacaattatccagagtaaaaatttaattgataaattctttcgttctaattctccctgatttatatgaattgaagacaatacaatacatatatatgtacctagtaaaataaatgaataacagaaattataaactggaagaaaacaatttccatttttgccatttttaggagtttgtgccgaaaattgtgaccgaacaaaacgccaaggcgcggagaaccaatgggccggcattgcagggacaatcagcgaacggagcgcaaaattggaagcggaactaagccaaataaaagaacgattatcaaagcttgaaaaagcggaggaaattccaaatgagtgatgctaatgaatgataatgatggcacttatactcataatggaattgaatattcatttgatcacaaaaagacaatcgtttacataatttgattggagtctccaattattttttgttccgacttacagagttacgtaccggaaaaatttcctaggggctggataaattcttcgtggaagtcgaaaagagggacagaaaggggagcagctcgttcccccccgagaaattttttttttaaatttgctaacagaactttttcaagaaaaaaaatcttagaaagttttttcataagaaacttctaagaaaaaaaattttcgaaaatttttccaaaaaatcgctgagaatttctcgaaaacgacaatcttttgaatgatccgacttccgaaaagtttgagggctcagaatgccattcctgcgctataaacttaaaataaacattcatcccgttcaaacattttattgagtggactataaacgacctaatattattatcagagagaataaattgcaaattgcatcatctaaaggcataattaggtaatttacataatttattttgaaaacacatcaaataaaatgattgattccttcgtccgtttgtccattttcaataggtcgtccagccaatcgctgaaaatccgagccgactcgcctctgaaaatgaggagggtttttaaaatttttcgaaattgcaaatcccataattccagggggggacgggacgaaatctcgctggccgaaatctcgccggctgaaatctcgccggccgaaatctcgccgcagaaatttcaaaaaaaaaatttcaaacttagaaatttttcaagaaaaaaattttagaaaattttttttataagaaaattccaa

SEQ ID NO: 3270 - DNA, 7186 bp, Heterodera glycines
aattggcactgatttcgccccgtttcgatgttttagtggacaaacatttcgatgggcaaacgcgaattttttcaaatttcggtaagtcttttgtttttgctttttttgtaagtgattggtttttttttgtttacttaattgaagtcgtaagtttcattttttcaaattggccatgaaaatattttctatctaaaattttgattggattcggtgcttaaaaaggaatttgtaaatattttttaagaaatttgcgattttacttatgtttcagcatattttatctatgttttaaattattttatttgataattaaaaacggtaacaccttaagggaaacttttttctcttaaaattaaaattttttttggaaatttgatatttttaatttagttttatggccctttttactcaattaagactaaaaatggattttctatgaacaaattttctcatttaactaacatattttttcaaattttcagctgggtttgcaatgatgtttggatggaaattttgccctgttttgaccatgctcaactcggcctcaaattggcactgtttttgccccgttttgatttgctggtggacaaacatttcaatggtaaacgcgaattttttcaaatttcgataagttttttgtttttactttttttgtaaaagtgattgattttttggttacttaaactaatagtgttttaatggaatttagtagccccaaacctttcttggtttcaaaaaatggctgaaaattattattttcccaaaattcataattctttttgatttttttgttagagtgtcgggtttttttagggctttttgcttatgtaatttttggaatttgaaatgcataaaaacggtaacaccccaaaaaattgaaccttatgaatttaaaattggtctctaaaatcgcagaattttgaaaagtttcggtggcaaaatcataaattatttaagaaaaaatcaattacaattagctgaaaccttgctggattttaaattatcacgtaattatagaaactttaatttttagaaagtttttcattttaaaagataatttagcaattttttagtggaaaaccccataaagccagaaagacaaatatatttttactttttttcatttaaaagtaccaaatttttttgttttttgttactcatttttaaaaatttttttggattttaggagtttttccctttcttagcattgctcaacttggcccaaattagcactgctttcgatcggtttcgatgcgttggtggacaaatatttcaatggcaaaagcggattgctgcgcaagtttttttgcactgctttcgctcggttttgatgcgctggtggacaacatttcaatggcaaaagcggattgctgcgcaagtttttttttcacaaattaaccggtcaaatattttttatgctctaaattttttgattgcattcggcaattaaaaattgaaattttcaaaaatttgtattttcaaacctatgaaaatcaattattgtgaatttttgaaatctcaacattgttgtggtgatgctgtttccatcccgcaaattttttgtgagattaaaaaaattctctcaggaaactgctgtatttggccgattaaaatttttaaaattcatcgatttgaccatgatttgaataaaataagaaaaaattttcagatgcacatatatattaaattatggcaaagtgtacactaagtaaatagttttagtaacccaaatctgaggttacttaggaaataagtttcatacactttggcacgcataagctccacaatagtttttaagaagcctttactcttgattaataaagtaaacatttttgttttcaaatatttgaacaatcacttgtaaaggcttctgtcctcttattcattttgagattcacatttcttatttgtatcaaaatcttatcggtctgctttgcgaccatgataagattgtgcacatgccggtctgcttcgcgaccatggcaaatatcggtctgcttagcgaccatgatattagtgtacacgccggtctgctttgcgaccatggcgaggctggtctgcgttgcgaccatagccaaccgtgtcggtctgctttgcgaccatgacacagtgccggtctgcttcgcgaccatggcacccatatcggtctgctttgcgaccatgatatggaaagcaagcccagacttgctctcgccaagagatgcatgtggctgggccgctcaatggtggcgccatgaattccttatcgttgctggccaacagccggtgcgaagctggtcccgcactttgtcaagaccagtggactggtgagaagtaacgtaggaaatctgagttcatcgaatgaatgtggactgccttttgaggattgtggttcaatggccagtcccttaaaggacgaccatggctaggctggtctgctttgcgaccatagccatcagtgtcggtctgctttgcgaccatgacacagtgtaaaattggttcgctgactggcccttcggggcttggtcgcactaatgtggttcgctgacaggcccttcggggcttggtcgcactaatgtggttcgctgacaggcccttcggggcattgtcgcatcaatgtggttcgcagacaggcccttcggggaatgtatcgcaccaacttttgcatctgcattcttattgagatgtgtgagccctggctgatggatttcagcacaggacgactacactccacggcgaagaatgatgacagaataacctttttgcgcaattttaaataaatatttttattttatgtgcatcatatggttattttcctcatactttgtgccacatttgcaacactttctgatttgttgtttcagatgccttcaaaacaaaagaatttgagaaagaagatgaaagatgtgtatcggcgacaggcagagcgatctgtcagtcgggataactcacccgtctcagacgggagtgcagatgggaatggagaggcatcggcatctctccgaggtaccaccaccccaagcttaagtgctttacaaataagcacgccggcgtcttccattggaagtaaaaaaagaggcaggccctcgaaagccggagcgaagccaatcttggctacgcaagaaagggtgtctctcattgacacacctcgaactgcggtcactcaaagtgaccagggttcgccgtgcaaaaaaaggggaaaggtcgccgagtgtggccaacccatgttttccaatgaagctattgctttgacgcctgtttcgactcaaagtcgtggagggcgtcctgccaaaaaaattggaggcccaggccgaggcagactcactgattccatgagcaaaagctctgaaatggatatcaatcttgaaaatgccccaattccggcaccctcgcacattgtgtctgaaaaaattgacttcagcactgtgccaattaatttcgccacatcgcgaaatatggcctgtaaaatttggagatgggcagcaattggcctttatgagcgtgatggcgaaacagcacttggcccacgctctggcccaagattaattgagacctgttggaacaggccaaatgaatggctaaatgacagctttattgttgcctatttagcttacattgcaagcatttcacaacgaaaaacagtagttgtggattctttggcatcgagaactgatgtttctcgattttccaacgtgaagaattacactttcggctatgatccgaatgctgttcctgaagttgtgcttatgccgcttcacttcccaaatcattggactctcatcgtctacgatgttgcacatggtgcatacttccttgactcgctgcatatgagcagcttgagtgatgagagaatggcactcatccagtcaataattgctgagatagtgcccgggaatgcgtcattcgctgttgaatacgtgcagcaattgacaaagcaaaatgatggtaacagctgcgggtacttcgtgtgcctgtatgctgaatcctggctgatgaacaaccgtacatttgttctgccggatttgaacatcaattatgagaagaagcgcattttatggcacataaatgagctttatggctcagatattgtgccgtttcatccaagggaaggtgtttcaacatctttcgctgttgtgtctcatcacaatggggatgtagcgcaaacttcctccaaggtcataatgccaatggaagtggatgattcagcagtgcttccttcctcggaagatactgctgttcttgcgcaagcaccagtgatcggcgaaaatcaagctgacacccacggtgttgttgcggacacaattgtccagcaagaaccaattgcgcaggctgatgatgtaattttcatcagacctaagacgccaccaaggcgatcaatgcgcgttcaaaaaaggctttcagcttctgttagccgttcgccttcaccggcgccgaaacgccccccgccagcaaattcgatgggagtggcaacgccgatcacacggcgttgctctgcatttcacaaggggtggcaatgcgctgcagcagcagccaaacatttcccggaatattgtgactccgggaaactcggtgacaaaaaatgcgccgattgcggtgcacatctcttctcacatgaagacagtaccatttgctgccggaagggaagagttgtgctgccaatgcttaacccgcatcctgatgagctcaaacagctgattgtggggaataagcaatcccgtgaagggaaagaatttgtgcgacacatgtcgcgttataacaacctgttccaatttgcgagcgtttccactggcaacaaaccaagccctgctggcggtccgatggccgttattcttaacggagaattccatcgccgcataagcagcatgcaggctggtacaactcagattcctggctttggccagttgtacattctggacccagtcgaggctatggaacagcgtcgaaacaaccccaggtttactggggagaaaatcacaaacgaagatgagtttgtgcagggtcaccagctaaatgagcagactcttgagatcttagaacaaatgatccaagtgtatcatcctgctgcgcaggcatataagcaggcgcgtgagcagctcactgagcttctccaacaacaaactccggaagagcttcgcttctttcgcatgactttgttgaatgagcgcagggctccagctggtctgaaagacccaaaattgcacccacaccaaataatcaccccttctacgggtgaagggatgttcgctattcatgcggaccccactggtgctcctccgcccaaaggaatttgggtagagaacaaacaagggcaattaaatgaaattgctcctttcagtccgtggactgatagtcttacgtatccattaatcaagccaatgggcgatgatggatacacaactggcattaaatatgctaagccaccatcgcgtaagcgaaaaggtgctcagaatgcatctggcctatttgactcggaagccgagtcagataatgagtcgtgcgagactcagtcaattgcatcatctgatgctgggtcagtcgcaaattcagatgctgaatctgtagcatctgtttcatcgcagcaccggcggattgacaaatccaaacaatttatctccctgcgagattattgcaagtattatctcgcaataagggatgaaaatgtggagttgcaataccaccacatcctttcatgtggtggaggacttggtcagcgctggatccttgaccaggctgcaaaaattgattggcaaattgcaacatttttgcgtagacctgacatggacctgcggatcagcactccaaaaaatctgctgcagtatttggtcaaccaatacaacaggcagcaggcacggcaaaaccccaatgcccaacagaaaactgttgatgacattggcagtgttgttcggctttccgaacacaacgtaaattctctccaatattggaagaaaatgtatgaggattgcaacaccgtttttgcacggtgtcatgacgcgaaaaaggcgcgtctcttcatcacattcacgaacaacagggaatggcctgagttcaaagagaatatatataaaaacggtcaagtatttactgaccgttttgacatgtggatgcgtgtttggaccagcaaaatcgctgagttccgagaagaactttatgagaaaaagttctttggaacaatccttggttacggtgaatccatggagttccaaggccgaggaggcccacatgcccacattgtggcgcaaacagacctggacgcagttccatatgtcattcaggaatacatatgggcgcacattccatctttgcctgataaagatgacgacacgcccattgcaaaaatgcatcgcgaaatccgcgaaacaatacatatgcaactgcacagatgcagtgatagttggtgtggtcctagcgacccaatttacgggcggtgcaagaaggggttcccagccccttactcaaaatgtacgattttgcgcccggacaggcccgcaatgtatttccggccttcaccaactgatggtggtgcccaattagaggtaaacggcctgatatacgacaactcacatgtcgtgccgtataatccttatattctgctgcgttaccgagtacaccataatgtactgtttgcatatggtaacaaagcaaatattaaatacgcactcaagtacccttttaaagggccaggacattgttatgtcgagtgcaaacaagagtccggcaataaaatcggaattgatgagccggctcaatatgccaagatgaacttccgtggtgcaacggaagcatatgccattgttcattcactgccatttgccaaactttcacatcaggttgtcaaacttagcatccatatgcctaatcaacaaccgattgtgtacagggcttttcagctggtgagcaaagctcaacaaatccagcaaggcaaactgccagagacgcaatgttctgcctattggaaacaatggcaaaatgaatggaagcatgatccgaagctcaaggacatgctttttgaaaaagtccctgagcattttatatgggcgaaggacaaatggaacaaaaggaaatataacctaacaaagagaccaccgatcggtcgaattgtccctgttccacccaaggatccggaaaggttcgcgctctattcacttatgcgccactttcccggtgaccctgaccatcttaaaatggtaaatggtcagccttgtacctc

SEQ ID NO: 3271 - DNA, 5380 bp, Heterodera glycines
  unsure (1)..(5380): unsure at all n locations
tagatcactaataatttttgattcagggaaagttgaatttttaattgtgtacggtatttttttgttatttttacctagatataagacggaagatttttttactgaaaaatttaagccccatgtttcagcccaattaaagactgaaattagagctgtttctaaaactttacgttgggattcatttgaatagcaatgataaatttttgtatcatctgcaaaaagtttaattgagatttcttttggaatttcttcaggcaaatcattaatgaaaattaaaaataaaataggtcctagaactgacccttgtgggactcctgatttgacaggaaattcgtttgaaaatttttgatttattcttactttaaaggttcttccaagaagaaaatcccgaagccaatttaataagttgcctgttattccgggttttttgagtttgtatattaaaagatcatgcgggacttgatcaaaggctttttgaagatctaaataaattatatcaattttttggtttctaagtattgcattgtaccagtcttccagtgaggagattaattggagggttgttgatcttctttttaggaatccgaactggtgttcagagataagattgtttttaagtaagaattcagtgagtttttttgctattaagcgttcaaaaattcggcaacaggaacaagtaatagatataggacggtaattgtttactaaatttttgtctccatttttgaagagtggcaaaactaatgaagttttccagatttttggaaggttgcccgaacataaagataagttaaacagatctgtcaggtgcctagctaagattaagtgaaaagttttaagaaatttgaaactaatattatctggtgaagtgttatgtatttttatttggaagatatattaaaatttcaagaacgtctaatacattgaattgtatattcgaaagagtcggtaaattggaactatttgagaaagttgtgggcggttgtggataattactggaattttggaaagtcgatgcaaaatgtttggcaaaaatttctgctttttccccgtcgtctatgatagttttgttttcataaagaattaatggggtttcccatctttgaaaatctttttcgatatatttgtaaatatttttgggatttttgtcaagaaattttttttcttcgcgctcctgaaattttctaatctgaatttttatgtgtaggctaattgaattatataaaggcttgtatttgttcgggttttctttaagctttttccagatttttgccttttcctttatagaagcttggagtgaaatgggatatttgacatttttttattcttttttgaaggttatttttggtgaaaataagtccattgcatcaatggattctttagtgaacctattatatttatgatccaagtcaaattcagtttgcaatgagtcatttagatgaaagcttaggaaggaatttatttgatggatattttttgggccaaattttctgtaacttattacagtgggattggttttgtgtagaaagatagagagatttatgaaaagagattcatggtctgaatttattagactgtctttaatttcaacatctgttaccagcctagaataatttgtcaagcaaagatccaagatttcatttcctcgggtgggcccggtacaatgcatacttagagaattttttgcgaaaaaatttacaaaatgttggccaatttttgaaagtggggttggtttaccattttcccattttatacatttgccattcaaattgaaatcccctaaaattaaggtcggtccattgattttttggtccaaataagaaaaaagattttttgtcttcgataaattaatatctgggggtctgtaggccccaattagtgaaaagttttttaaatttttaaaacgtaatacgacaatttcacaaacgaatttggaatccgttgttgaggagtaaatgggatatttttttcagttataattgaaacgcctccacctttttttcggcccttatggcagaaaaaatttgataattgtcaggtaaaattgagtttaaaattattaaattttggttcttaagccaggattcggtaattatgaggaagttgactttttcagtgttgagaaaggctaaaagaaggtcagttttgtttaaaattgaccgggcatttgttaaacagcctttaaaattttgtgtttttttgaaatttaacattttaattttgtacagattttgtgggagatctgacttttggggtaattttggatttggtatttacggccttttccctagaataaataaatggtgaaaatgtaaaagaaatatcgtcatgtgaggtaaatgatgtcatgggtatcgcagatggatgagcaatataattaattttattgacatgggaaaattggtggtgaggtttaggggattttctgttttgagaatatattttttggaaattttggctacccccaaacctcagaacattgctgtcatgaatgagttttttcgatagcgtgtcagcagagagtcaatgtgaggaaaaggcccgctcaagttctctccgttcatcctccttcctttgatttcgcttcggagcacaagcatgccgttgtagatgatccagtcagcggatgtttcttttcgcttttcggcacactgcgcttgaagttcacgtctcgatttcagttgttcttgagtgagcaattccctgatgttcagcgaatttccaatgattttttgttccattggtgaaggcatgtgcgctgaaaagatgaggcggggagcacgacttttatgggacggcaggcaccatttcttgctcggtctttgctgtaccatcccattctgtagctgactatagaatgggtctcaaccccgagctggtcaagaaagtcaatgtctgagacagaattgttgacgagggagacggcgattttgaggagattgcttagttgtgaaatgatgacacgggcagctggagaaatggacgggtcgtcgtcaagtgtgtcaatggccaaatttgttgaagtcacttcgttgaggaaatgacgtttttgcggaatttgattaagagagttagaatttaaggggcgtttaagaagggaatgcgacatatttaatctcaaacttgggtaattaaaccttcttactttttctttattaaattttcgaaaagcttgcccccagctgactgatcctgacaagtttaaaaatatttgggaaaatatgtacataatccgctcaaatttttaaaatattagaaatatgaaacaattcttctctttcttcatattttcctaaattgtcttcaacttttcatttgtatgcccgccctccctcttcaaattgcataattataaactcttttatgtaatttttattttcttttaattataaaaaggagggtcaatctgtaaccctagccgagttataggccccgaaaagcgcataacgacaaccgaaatgttgaatcaattcaaccaacggttccattttttctgggtgctaaaatttgaagtagaacctagtgaaattgttagctgtgaatttattatattttaaaaattttaattttgctaaaaacgcctgaaaagattttcaatatgttttttatgttatgtagtatcattatcattcaagtccatattgcttaaaatttttctgaaaaaatgctttttaataaagaataaaaattttttgatttttatgcataaataaatttgatttttccaatttttttgcatacacatattttgacatttttggggttttagcacatatttgagcatttttagcacatattattacatatttcaggatttataacacataaaatctgagcttaggccaattttttaagaaattaattaaaaataaaaatattgatgatgacattgactttgtaaaagcaattcaaactgttgcatcgctgaaatgaattggtggctctgaaaagggacaagtgacaatttggcaaagaataaattagattttttcaattgtttttctcttgngcagctcattgaaatgggacaaaagcaatttagccatatattaattgaataaaattattatatttttataaatttgactttaggtgctttttcccgtttcctttttttacaaatattttgttgcttattaactcgagtttccaacacttattttgtccacatcacaatgtgcgcccgtttcaacttccatcgtcacgttcaccgcgttctcctccgcgcaataccacccattgtccggcaatattaattgctaaataaaaattggccatttaattaaataaaaaggagctcaaccagaaatgattcagggaggggtggacagaagtctaacacgcactaaaaatggctatttgtgactttcggactgattttcggggatatcctcaaatgtcggatcttcaaatgtcaaatcctcaaatgtcgggtagccttttgcatatttcaagatttatatggtttaataataataataattttcgaagataataaaaaaataattttctaaaaatttctaaatttatttcaaaaagcaaaaactggcaatgttcaattttttgattatgattatctttatatttataattcttaaatgctttttaataccatatttagccattttttaatttggaaggaattttggaaattttacgctcaatttggaaattttatatacatagatctacaatttttgatgcatattataattgttagccttaattatgtcaataaattattaaacgtaccgacaattgaatatgcccaatataacaactgtggtagggatcatcggagctaattgtgccttgtccacttcggacataatcactttttccttccctttgcgaaacaattcgaacggttgccgtataagggcatttgtaattgaaagcttaattttgaaatagttcacattggctttggcttttcatattttggcttaattaaccgctgttcgtaaaaatgctgacgcgttgaaatgccgacaaaactaaaattagtcgaaataccaacaaagctaaaattagtcgaaattccgacaaagctaaaattagtcgaaatgccgacaactttaaaaatataaaaatcattattcctgttaaaatataaaaataaaaacaatttaatttgttttacattccaaatcaattttctttttaaattttcaagctaatagagcatattacggtgtcatgacaactcgtacaaaggcaactagtacaattacttaggctaggctaagttttaggcttaggccttattttctaaaaacaatttttttttgtacaaatttccattaancccattntgataaaatgaattctgtatttanaatcctaaaatgtaatactcacctaatttatttactaattt

SEQ ID NO: 3272 - DNA, 4583 bp, Heterodera glycines
ttatcggcatttcgactattttttagcttagtcggcatttcaaggcatcggcatttcgatgtatcagcgttttgacagcgtgcctaattaaccaactcattttcattttcgtcgtatcgtattgcgcgtaaaacctcaagctgtatttgcttttgtgtacagctaatctccatggaagtgcttggatgtacaccgctctgctcacatgtttgctgttgttaaggagcaaatcggacattttgattttcattgccaacattccatgggctttgttagggtctgaaaggtgcatttagcaattttaggcatcaaccgtggaagtattggtagtgaagttcgagacatgaaacttacactagaggggtaggtcgaccaaaatttgtgggatggcatggaattccgattccggagttccgacgtttttggggtccttcgacatttttggggtcggattccgtctccagaaaacctttggggcctcggaatgcaatagttggtctggaggggaagggcggggttggaaagggggtcagcgaccaaatttgtgaacggaatccaaccatgcaaattattaatcgtatcgtactgtacatagactagccaaggcgtctccacagaaaatttgctatattaatgaaatttgttgaaaaattagtcaaaaacaattttctcttttctcccgtcacgcaacctccttcatgtcatttcttgaaccccccgccctacaaatggtgcgagatggaaatttttcgagaccaaaacatgacaagcgactcgagacctttatcaatccaatttttcaaatataaaatcggcagttttttcgttgggcaatttttacaaaatttttgaaaaactatactcattgtaccgtcataagttgaccgtctgttagtggggaattgcagttcattgttttgtatgctcggcattggttggttcgggaggaaatggtacaaaatagcatctatttcaccaacagtcaacacatcggacggaactgataaataaatttttgaaaaaattaatagtatgaaatctttattcatacccacagagtgtgtcgattaattggcaaatcccacccagtatggctaccagacatttgcggacggacatttgcggacggacttttgcggacggacatttgcggacggacatttgcggacggacatttgcggacggacatttgcggacggacatttgcggacggtttctgaataaaaaaaattattttttaagaaaattttttggaagagtgggccttgtcagtacggtctcttccggttaaaaagcaactaattacgtgtgtttcggcccaaccgtagacacactaacttaaaaagcgcacacaaacaaacaaaaaaaagcaaagcaaataaattttttgattaattaatattttaaatttattaatggcttgccaaaggcccaactggcaatttaaatataatcagagacactcaagtaggtcaagttttttgtcattttgaatggcatataaaaacaatgttgtcagtccatgcttgtcagattttgctctttttatttgtccatcggtcccttaatagctattctatatttatatttcctatacaattattaccgaaaaaacatatttccttaagtgactcacggtccatataagaagcgatttttttgaacaaatcttcaacgcgaaattcgtcttggcttacaaaaaattctgtatccgttacagagaatttgagtgggaaaaacgtggcagttatagatgattcttaaggcgaaatgtatttctttttaataaaaaataagaccttcgtttaaaacatcaaataaatcgtccactattaaaccgactaatgccccagctccgccaattaagagctcagatttttttaatagccgaacttcacggaagagtcttcccaaatttaaatttggccgtgggatatgaactctagcaatgatttcaacagaaagaaaaataatgaaaattagtatggttattagcttcatcttaaaaactacatattgtataggcttaaataaacgaactttaaaatgaaaatgaaaaaagatatgattctaataatagtttaagtaaaaatatgtttttaatcaaaaaatgtttttgcttttatatactctaaacgcggttccgccgaaagataatgcgctgatcagctgtcagataaaggaaatgcggttccgccgaaagataattcgctgatcagctgtcagataaaggaaatgcagttccgccgaaagataattcgctgatcagctgtcagataaaggaaatgcggttccgccgaaagataattcgctgatcagctgtcagataattaataataagcacaaaaattactataaaaaccaaagataaaagctaattattcaactccctagttcttcttactctcaatcgtcacatttgcacaatgtattcaatttaacggctaaaatattttatctttttttaagataatgccattttttattttttccatttttcttttgtttaacggagggctagcaattaacacatctaaaaatcgcgctttaatatattttggagggtacgaatatcgtcaaaaggggacgagtgtgatgggcaaacccaattttggcaatgtacacaaaagaattgtccaggaagagcacatggtcctatcggcactttggatattacacgtattgtgtctgaacataaccatccccaagtttcttctcagaatactgtaagagaaattctgttagtcggccttacctaatttccgggtaggtcagacaaagaaaggaagacattaaagcggctgcactaaataaccctgtcgcttctgtaagagagattaatgtgcaggcaaggcaagctttatcagacgaacaactgatgatgatgccaagctccagtgctgttcaacgccaaattaacagactgcgagaaattcccgcaagacaagcggttgacgtaaagtcaattcaagaaatagttattgaggtgttttcattagctcagggctcccatttttttgttttcgttgatcatttccaaatgctcatttccaaggaggtccttgccattcaaggtctaatgggagccctgcattagctgtttttcttgctaaaattctattaatcaagggggaatttgctcttgactatcgtgggcaaagatttctattgtatgattctcgtgcaactgaacccgacgaggttgttttttttatcttcgcgacagaacttgggttaaatagactgtcgacttataacaaatggtctgctgatggcacttttaaagtgagatatacataaacagcctgagacttttataattctttctttaaactatttggctatataaattagcagtgaaattttatgtaggctaaaattattaagattgtgccgctttcatttttgcaactatatacaattaatattttgttggaacactcttctgttccatgcgcatatattttaatggctaataaggcagcaagcacctatatcagatcgttagaggtggcttattatatatttttacatagtcacacaaaattttcaaggtacttagaacccgtcttcgcactaatccagagtctgtttttattgatttcgagctcggttttttatttttgaacttttgaatttattgaaataattaggagccagaagcgcatttaaacatgtttggcctcaaattcaaattagaatgtgcttatttcacttgtctcaatcggtattacgttatgtacaggtaaaaatacctgtttttacccctattattttacctcagagacatggtcttatccgtgaatatgaagctaatgaagaacttagaaaatatatacgctcattagctgcactcgctttccttcaacctaattgggttgaaggttctctggacatattgcatgcacgggctctaattgtagctcgtcctgtttttgaatattttaggaggtaatgttgttaattatgcgtttgtaattaggtgttagaacatatataatcagggataatggtccattatttccggttgatagttggaatcatcaccaggcggttatagatgatttatgtagaacaaacaatgcccaggtatcctcaaacttgaggtgtcaaaccgctttgttataaaaataataaagaagcatttcatattacattgcgaagaaaattccaaaatatgcatcttccattatcaaagcaactattcaattttttaaaaataagacacaaagtacacatttttatattaattttacttttgaaagaggaagaaagaattgctcaagacaaagttaggacttatgagttggaccccacaagcggtttgaatttgcaacctaggcgaaggacatactataataatgatgtggccatacgcactcttgtcactagatttgatgcacttgcaaaccccaaaccagaccaaattgtgcatcacttaagagcccttcaatatcgcttagcatccaatggatttggcaatttaatccatgaataatgattttatatttatcgattaataaatttaaaatattaattaatcaaaaaatttatttgctttgctttttttagtttgttggtgt

SEQ ID NO: 3273 - DNA, 956 bp, Heterodera glycines
gggcaaagatttctattgtatgattctcgtgcaaccgaacccgacgaggttgtttattaccaggcggttattgataatttatgtagaacaaacaatgcccaggtatcctcaaacttgaggtgtcaaaccgctttgttataaaaataattaaggaagcatttcatcttacattgcgaagaaaattccaaaatatgcatcctccattatcaaagtaactattgaattttaaaaaataagacacaaagtacacatttttagattaattttagttttgaaagaggaagaaagaattgctcaagacaaagttaggacttatgagttggacccaacaagcggtttgaatttgcaacctaggcgaaggacatactataataatgatgtggccatacgcactcttgtcactagatttgatgcacttgcaaaccccgaaccagaccaaattgtgcatcacttaagagcccttcaatatcgcttagcatccaatggatttgacaatttaatccatgaataatgattttatattttatcgattaataaatttaaaatattaattaatcaaaaaatttatttgctttgcttttttttgtttgtttgtgtgcgctttttaagttagtgtgtctacggttgggccgaaacacacgtaattagttgctttttaaccggaagagaccgtactgacgaggcccactcttccaaaaaattttcttaaaaaataattttttttattcagaaaccgtccgcaaatgtccgtccgcaaatgtccgtccgcaaaagtccgtccgcaaatgtctggacgcgaataattctgccttcttctgtaaaagaagaaattgaaattaacatacaacataaggaggactcgaacctgagacccccttttggtgactaacgcacagaccactaagacgaaaaaaccaacttaattgtacaaggagcccaaaattgaatcgccgtgt

SEQ ID NO: 3274 - DNA, 2343 bp, Heterodera glycines
ccttccgattgtgaaacggtggtgaaagcgctgacaggactaccgtgttaaaacaacatacaaagacagaaatggatacaccaaaagctttgcttttggtggaattacagcacaaggagctgcaataactatggcttatggacgtctgggtcgtcctttcaatgttaatgtggccgcacatttctacgtccgtcaccgcattaaactccgacaccctttccttcactgtgctgttgagagctttccggaaggacaagaggatcgcttctatcctcttgaattatgcgaaatggaggatggttcatcggaaccagattggcttggtcgtattttcacagaaattcgtaacgacaactacacagaaaccatgagctctgcaaaccgagaagttttaacgccagaagacacgtcaatgtctcgtgaagggcgtgatgagtgcagtcaaaatatttcttacaccttatggtaattaattttttttcaaaattgtctcttctcttccttaattttgtacttttccagccaaaaagtactctttcctatccttaattttttcgaaaatgtgttttagatgatacttacactttctggtattgattaatattttcaaaattgtctcttctcttccttaattttgcacttttccagccaaaaagtacactttccaactcttaatttttttgcaattgtctctttgttttaattcaatttaatgttttttgtaataaaaaaatcgatcgttaatgtgcaaaatttatgttcaattaataatcacaaaattatggtgaaatgtgaccaaaatcgagaacacgaaaatgctaaattttaaaaaatgcagcgcgatttatattggtcttttacctttgggaactcgtcagtgagttgtcccaagtgcacccccgtctgaagtgggtttgagtcttccgggtgtacaagaaacaatgaatcggtgtctaaaatttagaataataaagaaaattattgtatgtttacccgtgtataaaagagtgcagccgggacttctgaccactttctgcattgatttcagtaaatgtagtcgggctgctgatgttgtgaacagtgaaatcacaacatttgaacaaggatgctctttgatccaatcttttttcaattgataactgatcagaattctttccggcgtcagcatgtcaaggccgctgatttcaatctttttgttgtccaggtaatttccaagctcagatgggtcatctgtgatgagcgtctgcgaaagaccataatttcgaagtgaaaatcggccccctaaattttttgtttataatattttcataggacaacgaaaaaaaaaacatacataaattattcacagccaattttgccaatgatctctttcccttgttcggaaccatttttgttcgatcaatttttattccaaattggtcccagcattccgcaataaattgctcttcggcctcaaaattgcctttgatttgctcatcaaacccagaagcatggagtttttcaacaacgaactcgctcatgtatggcctgaagagtttgttgtcacttttgtggtattcgagaacgcgaagcagctctgtcactcgatatccctcctctagtgccgcatttaactaaaaataatttgaataaaatattaaaaaataaaactttacttccaacgaggtgcatgtactaatccagcctctttgtcggtcatcgtgagtacaactgtatgatgatttgacggcaccattcggaaattttttgcaacatttgatgcaaagtggaaaacaaagccgatcgtcaactttgaccggcaaaacggggatgtcgatttgtcgcggtggaatgacgaacacttttagaatggcgagcgggtatgggttgtcctcgggtcggcgccaatcaacttcctcgcagagcacgtggagagttggatgtccaatcggataatcggtcacacaactatttttttttaaatattaaaaatgttacgacaaatattcacttgataaaaggatagaggctggtaaagtcatagtagctaattttctcgccccttgccgctttgtgataaagcttcaaaggaccagttctcccgcccatgaagcaactgcgaatatcgattggtcctccatctccattgaattcgctgaatttctgccgcatttgcctgtcacgggccgagcattgcctcgatttcgcattgccaaaacacttcaacattgggaatttttccgagtataaaatccgtccgcttttggttgagctctcggaatgcggcccgcggattttccaccgatggtaaaacttcgcgcgggcgcggggtagcactttgcacatgcgtgcccatatacatcc

SEQ ID NO: 3275 - DNA, 6582 bp, Heterodera glycines
  unsure (1)..(6582): unsure at all n locations
tgtcgcncaaggaatgggaaactgctgctcacaatggagaagaccgtcggagggtcgaaacgagcagtggcgacaggaatggagcaaaggcgaggagtgcttttgctggaaaaatcactgaaggatttttcctttcgtttggaataaagaaagaaagttttttgtttttgtttatgggaaattaggagacaaggatttgttctggtttggttcgactcggataaaattcccttagggacagggaagatcctagaaaattggctttggaggccttaagagtctgatagaaccgagttagttagaaataccaactttactaaaaaaccaaagcaagaataaatgtgaaaaaacaaggaaaatgatcaggtgaaatgatcacaaaagattggtttgatcgttttgaaggcagtagagggaaaagcgaagaggccggtgaaggtgaagaacatcgaagaccgtcctttcttttataggctcttcggtccatgtgggcggtgcagggggcggttccgatgaggcggcaaaatgggatatatgcgggattaaggggattttagggaatgggaaattggcccgatggaaaaaatttgaattggaaaggctgggaaaggggcttatgagagaaaagggataaaaaattttgaatttaagtctagagaggaaaaaaggaatttttaagaaaaatttatgatgatcaacgatgaaaattaacaattctgtcagtgacagcgacagagatccccgccgaggaggaaattcaatcatccttctgtccgttttccttttcgacctccccctcctcctggtccgattcttcttcctcctcctcctcttcgtcatcaccgtttggcaaaggcggggggatggtgttcttctttacatgggcgaagaagcgagagaattgaccagcgaagtgcgcgaattgaccagtgaagttgtgcacttcacccaacaactcggtcaggagttgttcgactcgcggagtcggagcgcgggctgggacagccttggcgccgggctggtgggcatttgtgccgtttgccggctgttgaccgcggttgcggttgttgcggcggtaaggagccgcgcctcggcgctggggaaaggaaaaatgtttggaaaaagtgggtatggaaagaaaaaaaaggtgggggaaaaatggttataaaggggagaaaaatttggtaatgaggaaggggggtataagcaacctgttgctgttgattgccattggcattttgttcaacattggggcggaccggacgaggaacgtgacccccaccggacggctgttgcatcggaggagcggcattaggtggcaccaccatttgcatcaacggctgtgccggctggtaagcctgtccattcgccgccggcagcacattctgcacactctgcggctgctgctgcggttgtggggcaaccggaatatatccgtaatgctggggaataagcatttgcggctgttggacgtgttggggttgttggaagttttggggttgttggaaattttggggttggaaattttggggttggtactgttgggacatgctttggagaggttagaattgagtaatgaaagggagaactggttggaaatgaaatgtgggtggaaaagccttgcttttatggcgccgtttggctccaccttttgatcattggtgatcagaaatgtgcggattatgtgggtatttgggaaaagttaatgtacaagggaaaatttacatatacacaaagtctcgcctcgctctccattcccaggactaatgccgaaagtcggcaattctacagctctgaggctgtattctgtcacggcggatcagtaagtgccgcagccatccacgtctccatagctgctccttcaagattatggcaatggcataaatgtcaaaggcaatgatgattgcgcaaatgacccacccgaaaatttgaccatactgagaaaaaaatattttaatcctcatgctgatcggaggagcggttgacatgttcattttattttcggcattagcccatgacagattactgagcagaaaaatggtaatccaaattttcctagccaaaattctataaccccaaaaaattgggttaaatttgagaaaaatgtaaaaagcacaaattccaacgagaagcactcccaaaatgatgatcagctgggtgccgccgaagatccatttcaagacgtggaaaaggtctccaatttcaggtaggctaatgcctcctggactatttttggttttgtctccagtcaaacgccatgatcttctgatcgatgatacataggccaaagtgccttccatttcgaataaagtgtcacccccagggcacgtcaccttacaatttgtcttaattttggctgtgtcgaaagacaaagaggtattgtgctgcgttggctgagcggagcacggaattgcccaatttgctccattttcacacacaatttcagccaaaggtgaaccatagctggccgtacaggtataggaaaaacggctgccgattcggcatttatagcaaccttttaaaccctgtggtcttatcttacatgttgccatttggtggcgtattgctaggcgtaatccttccattctcaagaccatctgaattggtacaaagtccgagtcgacccaaacttcccgtgggttacggtagtttaagactaatgggccgatcgagagggggagtttagtggaggggtcctcgagtaatcgttcgatgtccaattctcggcaatgacaccgaaccactccttcactgtgatccggacggcatttggcgcaggcatttaatgccaaatcgcatttcatcacttttgccgagtcctcgtcagcacaatgcagtgctggatcgagagaagggatcaatgcacctccattcgaaccgccaatgaattttccggacaatgcgggtgctgctggactcccaaagacggccggggtgatcgacaaattcgctgatgggaggcgaaaggtgtgaccggagaaaaggatggcctcttcatttcggattgtctcaccatgcaaattgatttttatcccggtcatgatccgaaaatcccacgtaggacaacgaaacatttcatatgtgaatttatttccgggtcgggttggtacggcgtaattgcggtaaaatagacaggcagaatttgtgccaccacaaccgttaaaccaaaatgacccgctgtccaaacagtaggaattgcccgggtagccgttcgactcagctaactcattcaccgtttcattggttaataggttttcacaggtcttacctgtacaagaacccattcccgggcaccttttgctggccatagtctcaattttataagaacgaatgaatcccaaagactcagggatacattcctggtataagcctttcaaagtaaacgtaagagtccctaatagtatggattcgggacccctgatcataaggtccaccgattggccgactgggagcaaattcaacaaagtcacagagttaaatcggcattctgttccattttcattggattcgcattcttcagtattggccgttatagtggtagggactccatttcctagggggatcccttggaaccaacaaattaaggtcagggccatgcccaattttgtcaaaggcctaaatctccgattattgaatcttttgtgccgacggttttcataatcactttctgaatcactttctattggccgtttttgcttccttcctttcagatttcggaacatgcgacaacaaattgttcgacaacaacgtttaactgcgcggaagaaacagtttgtccaactgagaaggcagcacaaaacggttgatacaatgcctacaacaagggcaatgcaaccgatcaaaagagcggagaaagtgggggagcagtgaaagttgaacactctttcccagcatacatagcaatcgaccagcagacagatgtccactggggcgcattgggccgagtatgaagtggaaacattgggtcccatccaaaaaatagctaggcaggaggtcccaagtaataaattctcctctggaatcggaaaaaagaatggtcttctgtattcccgatgaccgcaaataccgtcacagcaaatatcaaccttttcggtttcggggagtccctcgagcattatccccttggaaacacaggaaaaaatgcctgtggcgtttggttgtgtggataaaagtgcagcggagagtacaggtgctgataaaactgctgttccgctgaagaaacacaacaccagcagcatcgttagccgagtactcagaattgcggccgaaattgttgggcgaggagggcgttctgcccatttgaatttctgccgaaagttgccacggggtggctcttttgcccatcggaacttttcttttggattttctttaccgaccgattctgaaatttgctcgaccacatccatcagatttccctcttggggatctcccggggggcgcgaaagagtctcacacacaatcccgggtggttcttctaatggcaccaatttcgaaacgggacgggacaatacccgtccatttgccattaaaatgttggcactccgagggtttccttcggggccctggacttctgtaatttttcccataggccaggtattcctaggaaattcctcattttcaaccaggacaatttgatccacttttggtaaagatttggatacaattctaggtcctttgtgtttcgtctgattgcgttgtcttaacaacaacaggtactcctgtgaccatttttcccaaaactgccgaattgattttgctgtcccccaccatcgggcggctaacttttcagctgtggaaggtcgaaaaacttcgtctgacatgtccggctcatcaaaagcgaggtttgcttttggagacaaaaaatcgattggtcgcaatggaaaaagaccatcagcttcatctgagacgaaagtgatgggtcgcgaattgatcgcggcctcaacttcagtcaaaaaagtgctaatttcctcccattttaaaattcggcgtcccaaaattcgtctgaaacaattttttattagcgcgtttaagcgctcatagacaccgccagaccaaggactaaatgcgggaataagtgtccattttatgcaaaaatcagtacaattttcaagtacatttttcgctaagacaaactgagtcccgtgatcagataaaatcgtgcggggtaatccgcgtctcgccacgaatcgcctgaaggctagcaaaaaatggtcggcagacaaggaatttacaatttctaaatgtacggcgtgggaggccaagcaagtgatcaagagaatccaagctttagcttgttcaacgttagtcattttatagagagttgggcctaaaaagtcgatcccgatctgctcaaaaacggaagacggtcgtgtccgtgatttaggaagaggcggcatcggtggcagaccaaattaaaccgctcagtcttttttgcacaccgggcattcatttatgattttacggaccgtacgtctcgcccttttacaccaaaatttggacagaaaatcggtgagggtggagtccacacccgcatgaagcaagcggatgtgcgagtgccttatgagcaggacaagaacccacgaatccgtcggcacaaaaactggatgctcaaaatctttatctccaattccacagagccgtgatttgagcctaatcaaaccgtctgtgtcaagataagtcgagacgggggagagcattcccctctaaatttgtttgaataaccaatttaaaacgaatttttggttttcggggtccaaaaaatcggaatttctcatattggggaacagttgtttgcttttccctattttggacaggaatcgtaaaacgacgaaagcagtaccgagaagttttcgccaagaaccgaatcggtcgaattcgaaaatgtctggcccaattttcacaactgcgaccacaacaggatcgggcgctgaactttcctccggtggcagaattgccgtcaattcgtctggccaaaggtttgctggtttttccaaccattcgggtcctttccaccatattttggcggatcggagctcatttggactggtcgggtgggttgccaggtcggcagggttttcagcggaacgaacatagtgaaaattaactgaacgatttgttcggatttcacgtatgcgatttgacacaaaaactggttgtttttctgtgctagaaatccatgctaaaacaattttggaatccgtccagagatggacactttctatgtcataaaataaatgtgattggatgaatttggctgcactggtcccgatcagaacccctaagagttccaaacggggaattgtgagctcgtcaggctgattttcacccattcttttgggtttaaggcgagaacgggcgtaaatgagggagttaattacattgccctctatttctgctctcagatataccgccgtcgcaaaaacattgggtgaagcatccgaaaaaacatgtaattgaatagccccattttttgtgcggggcgtatttcttgggatcaaaattgtttgatcaccccactgacttctgatcaaatcccatgcacgttttcggaattttctatgggctggtcccaaccgcgtgact

SEQ ID NO: 3276 - DNA, 2224 bp, Heterodera glycines
  unsure (1)..(2224): unsure at all n locations
gacagaaacatgttctgcaccggctgactctgcccttggccacnttgggcgcatttgccctccggctttttcacgtttctcagcgggattgggtcctccagcatttcctcctcgtcccccgactcgtgcggcgcctgagtgatgtagtaattgtctctgttgtcacagatgtggaaacgtctcagtgcgatgtcctgcaaatgtgaagcgtaacaattggcaaggacaagactttgggtatacccaattacgtctttgtattcaaggacaaactcagttttgtgaaaatggtttcattaatcgcacctaatcattctcattcattaccgacccctgcacttttggcatggcacccttacccgaatttgctccaccgacgccgtcttcggcacggaagcggtccgactgatttggttacgcaacgagctgttcccgtcgtagatgcgcagtagcaggtagtcctcgctctccttgtcctcctcccggcccggtccgcctgccccaggccatccctcccgctcgtccgctgtcattctcgacggggaagacactttgcgacttccctcattgccgatggagcccgtgtggatgttgagcagcatgtccatgggcagttcggcacgtgggatggtcaccgaattggggggcagcataatcttgcgcaatacgccgaagtcgcattgggagcgaagctgccggaagcaggtcgagtgcacgctcaggttgcaccactgacaccggaagcccgagaagcactccgccgtgtagcagcctttcctgcataccgcgcacttggcgtcccttgccaaattaccctcgcgcatgtggtgctgctgtttgtgagtgacgaggtctaacgatggcacgtaagtggacgcctcgcgacagtcggccaacgccaaatccttgaaagttgcgccgatttatgccgaagggcgaagttcacctgacagtcgacgtgcacataacagttgcacatctcacactccgaggacagtccgccgtcctctgtccttttacggcacacacagcagaagtggcgtctgaaggaagtaaagtgacggacgccatttctaattgcatcccctcatttgtcaggccaacttaatgtgctggccatcagtccaagtgtgggccacgggatttttgatcagctgcaattgtaagcccgtgcatttggacacaatcgaacgcatgcatttgtcatggcaaacgaagttgcacactttgggaagaggggcatcaccagcgagtgcttctctcccactaattaccttcgcaggcaaatccttgggaaagcattccccaaattttgtcacagcaatggtggcaataggtgggtttgccgaaggtcttcttggcaaatacatgtccgagatcggtggacacttccgtcgaggcggtggaggaagtcgcggccattgcggccgaaacgcttgcggtcgccgcggcagcggcgccgcttccgtccgctgccatcgacgagcaaaaactttgtgtggtggtcgatctctgctgctgctgctgatgattgttgatcatggcttatcaaatgaaactatcagaaataatttcagaggaagacgcaaagcaaacagaaggaacacaaaaagcggccatgggaggagggaccggcggaaaaagcgacggcgaagagctcaaagggcgaggaacggcacggagacgcagcgacggcacgggcggaggggacggagttggggaagaaaaaggaacggtggaagagaaaagacggggaagaagtgaagatgagcaaatttgggagtggtcggggaaagtgagtgacttgggggcaagctggagaagaagagaatgaaaaggatggaactaattaatttgttcatttaattcattatgaaccccactgaaagcccccgaaagattttgtagtacgcgaattaacgaagcgactaaatccctgataaatgttcagttatggattcgttattggattaggaagggggagggaatcaatttgtcgacgagaaaatgaaaatgccgttgaggaagacaacggctggatggttggttggttcagattggcatttctttcacttgccagtccttcttagggttctgctgaggaaggagaagcagacagagagagagagagaggcgagagcaatggcccaagaacgaactgctgaactgaagactagggagaggaggagggcgacagagggagagagagggagggagggggaag

SEQ ID NO: 3277 - DNA, 2373 bp, Heterodera glycines
  unsure (1)..(2373): unsure at all n locations
cacccgcccagccgagcaccaccccaggcctggccaggccaactcattgcattgccccgcccccctccttgacgttgcccactccaaaagagcattcccaccttgccctcactcactcttccccctttcctcccctctccctctctcccctctcgcccgccccctttcctcccctccttccgtttcttttgtccctttccgactcggttattgaaagagaacaacagccgagctgttgctgcttgtggcggcgtagaaaagagaattggcaattcgttgagataagaagtggagaaatagcatatgaggaaagagagggcgaatagagagagaagggggatgagagacagtgggagagaaagagagaggagggggggaaagggaatgaaacaaaaggggatgagagacaatggaaaagagagagaacgagagagagagagatggtagggagaaagggggggggcgaaagagtgagaggaagcaattgattgaaatgcgtaataagagaaaaagcgaagagcgaagatggacaaagtgcagcagacaaagcggaagcagcagaagatccggtaattttcggtcaatactttggccatccgtattgcgcagatcatttaaatatgtatttgtttttcttccaccgaaaatgtcgaattcaattgttgatggcgtaagaaaaatgaccaattattgtcgaaactgattctgtcgaaatcattttttttgaatgcttaacactaatgaatttaatatgtattggaagacataattaaatagtgaatactcttatgattagggatgctgagtttagtggcgaaaaagtccaaaatagggacctaaatggggggcaaaaaattcgcgaaataggggcgaaaataggggcgaaaaaatttcaaatgtaggggtgaatttattaaaattactgttttctctatgtaaattagttaaaattaagtcaaacaattttatttactgattacagttagaaatgaagtacatttagaaattttcaggatttaagggtcgattctcaggggtgtattttccgaaatttttgggtcgattcttaggagcgtatttttttgaaaatttttaggtcgattcttaggggtatatttttccaaaatttttttgtcgatttttaggggtgtattttcgtttttattgcatttttgttaataaatttccaaaaaatcgagaaatagggggaaaataagggcgaaacgccaaaatagggataaaaatttattttaggggcgaacactcaaaatagggatttttaggggcgaacatccaaaatagggatttctagggtcggataggggcgtgaaaacgaaggttttccgaacaaaaaatgtgtttttcgtgcatttctcgtcgagttaaagccgcagaaaaaataagtaaaaacctacataagaatcccatccctacttatgatgcgtattttctcagttttaaaatattttatagaattccaattttaattgtaagcctttgctaattgtaagcatcagtaatcacttaacagcccaaaacaaagattggcatctgctgattgaccaaggttcaacttcaattcatttttagaattgtgaaaaaagtctacggaatgtgtgttcattgttcatatttttatctgaagcttgaaagagccgtgcagacgaggctcgctcttaccattcattttcagaagaaaataaatttttcaataaatttcaaattaaacaaaacaataaagtcccaattagcaacggacagtgaacgaattaattaattgattgctggtggcttcaatgggccagcagcagcaggttccaagttttgagctggtaattgcgcatggaattcacaaaaacagtccccgccgtgctcactttcacttggtaattactttccaatcgaagttcgcccattgatcggtcttttggttgctcgactttcttcttctcctccaataaatcactttcatttttgttttcgcttcttttctttttgccttttcctccgtcctttttctcctttgtccttccctttttcggtttatttttgtcactttatttgtccccaaaagcagaaaatgccgcgccaagtgctcgaattgtccgattacttcgctccattagctgccttaattatggtctttcatttgccgcttttcactttgcttttcatcccttccccccccaaagttcgctttggccatcctcgtcttctctttcttcgtgatcaatttcttttacatcaccgatcgggacgacttgacagtgttntgagaaagtgatcagccaatcaaaagaacatcatcgaatttgatcatgagtttttcagtttggtgccatttgcacctctgtttgggccccattcgatgtc

SEQ ID NO: 3278 - DNA, 2975 bp, Heterodera glycines
gatttttaggggtgtatttttcaattttcttgtatttttattgcaatttttctcaaaaatgccaaaatatgtgcaaaatatgtgccaaaccccaaaatatgtgctaacatattttatgtgacaaaacgccaaaatatgtgtttttatgtttttataagtcgctctaaatcaaaaattgttcggagataatgctatttttgggcttctctcgccataactaagccgcaaaaaaatatgtaaaaacataaaaatccggtctctacttatgatgcgtattttctcagttttaaaatattttatagaattccaattttaattgtaagcctttgctaattgtaagcatcagtaatcacttaacagcccaaaacaaagattggcatctgctgattgaccaaggttcaacttcaattcatttttagaattgtgaaaaaagtctacggaatgtgtgttcattgttcatatttttatctgaagcttgaaagagccgtgcagacgaggctcgctcttaccattcattttcagaagaaaataaatttttcaataaatttcaaattaaacaaaacaataaagtcccaattagcaacggacagtgaacgaattaattaattgattgctggtggcttcaatgggccagcagcagcaggttccaagttttgagctggtaattgcgcatggaattcacaaaaacagtccccgccgtgctcactttcacttggtaattacttaattactttccaatcgaagttcgcccattgatcggtcttttggttgctcgactttcttcttctcctccaataaatcactttcatttttgttttcgcttcttttctttttgccttttcctccgtcctttttctcctttgtccttccctttttcggtttatttttgtcactttatttgtccccaaaagcagaaaatgccgcgccaagtgctcgaattgtccgattacttcgctccattagctgccttaattatggtctttcatttgccgcttttcactttgcttttcatcccttcccccccccccccaaagttcgctttggccatcctcgtcttctctttcttcgtgatcaatttcttttacatcaccgatcgggacgacttgacagtgtttgagaaagtgatcagccaatcaaaagaacatcatcgaattgatcaatgagtttttcagtttggtgcccatttgcacctctgtttgggcccccattcgatgtccgacatttaccgagggggaccacgggattatccgcagccccaaggaacggacaaggagatgaacagctgaaaagtcaaactatctgattaaataaacgattgtcaatacgctaaataatgtgtgtcgtgtcgtccgttccaattccgtaaattcggacaattttacttttcatttccttttttttctttccaatttcaaaattcaaattccgccatttattcattaaatggaagaagctccaaaaaatggacgtcatcagcagaagaataaaaatgagcagcaattgaccgcttccgagcttcgtcattacgaggcggacttcgacgagtccgacccgaaatggaagtgctggcccgaaaggaagcacgtccaggtcagtcagttgcagctcagcttcgtccgtctcacttccgcttctgcagaaggtcgctttccacgcttcggtggcgaccgtcgtgttggctgtgctgctgctactgctcgcgcttctcctcctccgtccgctatttctccgtctgtccttcgttagcctcggcgtcgtcctttgtgccgtttccgccatggcattcttcgctaatttggcccaaaatgacttcctcttcgtgccttaccttttcgttgtggtccgtttccccatttttttcgttgtttaacccaatgcaatcgctcagtggttgctgactattctgagcttcgccttcttctttttcttggtgccaatgttcggcgtgcccgacttttggcagaattgggtgctcgtcgcgttcggcatcgcccagggccgccattcgctgtccggtcagtccccctcccctccccctctcccattccctccttaaagtcgtccgtctgatcaccgttttgggcgcagctgtttcattcgcttcgatttgtctgctcactttgttcaatttcataatgctccgcgcaagaaacttcgcaatcgccaaaagagtggcaattaaaaaaggatacaaaacgcatccgacgggagagaatggcgagagaaagcagcggaaggacgaaacgcgaagagtgcgggtggtggagatggagacgagcgcatgacgaagaagggacaaagcgaataaaaaagagggccaccaaaagaattcttttaaaggcatttatgcagaatagataaaacgtgtgaataaattaataatgtggtcaatcggaatcggaaaggggcgcccgacactccgccgacacttttccctcaaaaaggggcaaaagtgcggcgtcgtcgctgatcagcaacagttggtaaggggcagacccatcttcgcaagaacttttgaagaagaatctgaaatggtatgtgaaaagcggggaagcaagcggaaaaaacgcactggcgacgatcctttgaagaaatggacaaataatggcggaactctctgaaggtgagcggccgttggggcacgtgcgccacgacgagcactccgtcgccagaagtgtcgcgaaaggaaatcggcattttgggcacttttgaagacggagaagcgatttgttggagaggtcgaccgaacgaaagggagggggcattggccagctgcggagagtggctgaacgatttgggaaataaaaagaattctaatgattagttcgaacgcaaaagcgaaagggaaagcattcctaaatctgggatttgcaatggcgtttcccaatttggcatttgaaatggcatgcaattccattggcaatttgcattcgaattggcactccccgatttggcatttgcaatgccattcctca

SEQ ID NO: 3279 - DNA, 2889 bp, Heterodera glycines
gcaatgccattcctcaatttggccatttgaaatgccaacttactcgcttggtttgccatcggccatttgcggctgctccctgcgcgccgtccgagtcagtccctgctgttgatgtgcaccactcctttcgcttcgtccccccgaggacagttcccgtgccctgcggaacatcgccgccctttgtctgtcgttgtcgcccctggccgaattgcccgaatgtgtcgtggtcattgagccgattcccgaagtgtctccgtcgttatcacaataaacactgagattaatttatatagccattgcaatttaaatgcccggagggaaaagcgaaaagcaaaggaagtcactgagtaactcccacgggaggggcacccttcggcttgtgcctgcctgccttgtcatctgcttcgtcggattgactggggacgacttcttgggcaaagcgggcgccggaaaggccgacggacccgcgagatggacggactgactaagagcggaagaatgaggaggaggcgggacggaattgtggtgatgagaagaggggagcagtcggggggacgaggacgacggcattccgggtaaagcagcgaagggcgagcggagctgacaaggggcgagtggtgggactgaaaaggttggcgatgagaaaggcaatgccaaagaaaactggcgacctttttgtactccattttgaggaggtgcgaaatgcaagtcgaagtgctgctgctggtttagggacgggtggtagcaggactgactcatcccagtccgactcatccccggctgactcatccccagctgactcatccccggccgactcatccccggctgactcgtccctaattcggcggatgatagcggcatgtccccgacttgtgaacagtgtctttgctgctcagcagggggccccgttctgttgtccgccgctgtcggtgaacatgacccgcgcgactttcgacgtgttttccgcgcgctgagaatcaatggcggcggactctgttgtgccgaattgttggatgacgagtccatcattcgccgtcggaaataattctccacgtcgtcgtccgcgtcatccgccgcggtggcgtccaacagaagcggatcagccgcaacgccggcaatgatcagttccctcgtcgatgtttttgtgtctctttgtcgtgccgaatttatccgatcaatttgtcggttgacagactcatcttgctgatgctgtaactcaacatggcgtaatttttgggccaacttttcggcaaattcgcgccttccctgcgctgtttcatggcaattgggcggcattccggcggagttttctctcaggaaaatgtcaggcttctgaaaatggcgaaatgctttgatttgcatcggtaagtaagaccgaccggaaatgcactgagtaaatgcgttttttgctgttggttcgcgcgtcgttggccttcgcgcaattgccgcatcgaatgggtccctccccctccggggacatttgcgccagcggcgacccctcgtcggttggcttcgctggaaaaggaagaggacacggcggagtcctttttgctggcattggtctgtcccatataggggaacttgctgaccggcttaaacaacctaaaaaagagcaatgaaatgccaattcgtcgtcagtccatcgctattccttctcttacccggcccctcccaccggaatgattgcctcgcgctcccattgcgagcgcaacagcgaatcggctgtcaacggctgtggcgctttgccggcgctatcccttcgtcggctccttctgatcgaattttggtgccaaatggtcgcgggaaggggcgaagaaagcattggcatcatttgctcatcagcagaggtggacggtttctgctggttgcggaagcaaaattcgttgaagaagtcgagaaattcttgagattggactgaattggaaagattaaacggagagagaaacagggaaaaggagaaagacaatgagaaaaaacaatggagagacaatgggaagagagagggcgataaaagaaattctttgccaaggcattccctcaaatgtaccaaagactgcgtgctgtctccttagaaaagtgtccagcggggccaaacactcgtcgaaaaggtcctcgtccgcctgctctcttttcagccgttgcccaattcgctcgcggatggacgcaccgataaaatcgcaaaggccaactcgcggcagcaaaaatttggtgaagatttccttggccaattggaaggaccgcgcgtccccggaggcgctcatttcgcgaaaggcaattattgcgaagtgaaggcgcaaagggtgctcagtgctgtcatcatcgacgccgagccacgattggaagcactgaaatttgcattggcagtgatttgcatcgattgttagcttttgcttgggtggctttatctgtgaaatgccccgcttcacctgcaaagcgtcaaagtcattcagcacttcttccagccgaacagcccaatttcgacatttattctcagagttaccaatatccatgctgcaaattagacgaattcagaagttttactataataataatattccaggaattcatatgagcggatgaaaacgacggaagggtcagtggccagcggagaatcccccggggggggggggggagggcacagggccatgccatgactctgtcccccacccccgcttagtccatttgaagtggatgaatggagtggtgagcaagaaagagagagagagaagagagagggaaaggaatgcgtacgatggatgtgtttattgccaaaacaccctcttcctctgcacacgttcttcttcacatctctcttccattttcaactgccaccgccggtggtggcagttgaaaatgaggcggaaaaatgtgggaaagaataaagaaaca

SEQ ID NO: 3280 - DNA, 2108 bp, Heterodera glycines
  unsure (1)..(2108): unsure at all n locations
ccatttgcagatgacagggggagaaatgtaaaaaagaaaggctttaagcgtcgtgctgaaaaatggaaagtacaaaaaaacttactttaattnttcacttattttgcctaaagaagctaaagtgccaattttacttgacaggagatttaagggatgtcgaaaaacttcagaatggcccggccaaaacacaatacgaacatgtatgcatatgcattttaatttgtcaatggctgacgcgccatatgaagaatcgaaatgatttttggcatcatgcatgaaatggtgaaggaaatggcgcaattattaaattttttaaatattcctcatgaaatgtatttcgactaataagtaacagcccacttgaatcactttattgtagaaagaagctcaataaaagccatttgcagatgacagggggagaaatgtaaaaaagaaaggcttttaagcgtcgtgctggaaaattggaaagtacaaaaaaactaattttaattttatcacttatttttgcctaaagaagctaaagtgccaattttactcgacaggaattttaagggatgccgaaaaacttcagaatggcccgaccaaaacactatacgaacatgtatgcatatgcattttaatttgtcaatggctgacgcgccatatgaagaatcgaaatgatttttggcatcatgcatgaaatggtgaaggaaatggcgtaattattaaattttttaaatattcctcatgaaatgtatttcgactaaataagtaacagcccacttgaatcactttattgtagaaagaagctcaataaaagccatttgcagatgccagggggagaaatgtaaaaaagaaaggcttttaagcgtcgtgctggaaaattggaaagtacaaaaaaactaattttaattttatcacttatttttgcctaaagaagctaaagtgccaattttactcgacaggaattttaagggatgccgaaaaacttcagaatggcccgaccaaaacactatacgaacatgtatgcatatgcattttaatttgtcaatggctgacgcgccatatgaagaatcgaaatgatttttggcatcatgcatgaaatggtgaaggaaatggcgtaattattaaattttttaaatattcctcatgaaatgtatttcgactaaataagtaacagcccacttgaatcactttattgtagaaagaagctcaataaaagccatttgcagatgacagggggagaaatgtaaaaaagaaaggcttttaagcgtcgtgctggaaaattggaaagtacaaaaaaactaattttaattttatcacttatttttgcctaaagaagctaaagtgccaattttactcgacaggaattttaagggatgccgaaaaacttcagaatggcccgaccaaaacactatacgaacatgtatgcatatgcattttaatttgtcaatggctgacgcgccatatgaagaatcgaaatgatttttggcatcatgcatgaaatggtgaaggaaatggcgtaattattaaattttttaaatattcctcatgaaatgtatttcgactaaataagtaacagcccacttgaatcactttattgtagaaagaagctcaataaaagccatttgcagatgccagggggagaaatgtaaaaaagaaaggcttttaagcgtcgtctggaaaattggaaagtacaaaaaaactaattttaattttatcacttatttttgcctaaagaagctaacgtgccaattttactcgacaggaattttaagggatgccgaaaaacttcagaatggcccgaccaaaactctatatgaacatgcatgcatatgcattttaatttgtcaatgtctgacgcgccatatgaagaatcgaaatgatttttggcatcatgcatgaaatggtgaaggaaatggcgtaattattaaattttttaaatattcctcatgaaatgtatttcgactaaataagtaacagcccacttgaatcactttattgtagaaagaagctcataaaagccatttgcagatgacagggggagaaatgtaaaaaagaaaggcttttaagcgtcgtgctggaaaatggaaagtacaaaaaactaattttattttatcacttatttt

SEQ ID NO: 3281 - DNA, 993 bp, Heterodera glycines
tcgacaggaattttaagggatgccgacaaacttcagaatggcccgaccaaacacactatacgaacatgtatgcatatgcatttaatttgtcaatggctgacgcgccatatgaagaatcgaaatgatttttggcatcatgcatgaaatggtgaaggaaatggcgtaattattaaattttttaaatattcctcatgaaatgtatttcgactaaataagtaacagcccacttgaatcactttattgtagaaagaagctcaataaaagccatttgcagatgctagggggagaaatgtaaaaaagaaaggcttttaagcgtcgtgctggaaaattggaaagtacaaaaaaactaattttaattttatcacttatttttgcctaaagaagctaacgtgccaattttactcgacaggaattttaagggatgccgaaaaacttcagaatggcccgaccaaaactctatacgaacatgtatgcatatgcattttaatttgtcaagggctgacgcgccatatgaagaatcgaaatgatttttggcatcatgcatgaaatggtgcaggaaatggcgcaattattaaattttttaaatattcctcatgaaatgtatttcgactaaataagtaacagcccacttgaatcactttattgtagaacgaagctcaataaaagcaatttgcagatgacagggggagaaatgtaaaaaagaaaggcttttaagcgtcgtgctggaaaattgaaaagtacaaaaaaaaaattttaattttatcacttatttttgcctaaagaagctaacgtgccaattttactcgacaggaattttaagggatgccgaaaaacttcagaatggcccgaccaaaactctatacgaacatgtatgcatatgcattttaatttgtcaagggctgacgcgccatatgaagaatcgaaatgatttttggcatcatgcatgaaatggtgcaggaaatggcgcaattattaaattttttaaatattcct

SEQ ID NO: 3282 - DNA, 3931 bp, Heterodera glycines
tatgcatatgcattttattgtcaaagggctgacgcgccatatgaagaatcgaaatgatttttggcatcatgcatgaaatggtgaaggaaatggcgtaattattaaattttttaaatattcctcatgaaatgtatttcgattaaacaattttggatcaaaatttgaattttcgaacttttgttcgaattcaggtccgggattctggtcgccgaaaccctatagttgacttcttttactctgaaatgtaaaaaattttatggggcctaaactactatgagcattctggggcgatatttgtatcggcgatatttggagtgcacagttcccaagtttattttttcaaaataagaaacaatggctcaaaaactaagagccgagggtagttgacggagtcagaaatccggcctcaaaaaaaaattacgaattgttgaaatgttattcatttccctgttttccacctcttaaagcgtcaaatttcttaaaaaattaacaataacaatttttcaagtttttaaaatggaagcaaatgtcattttttaattttttttaataacaattattggcattaaaattgatattttcataaaaattgggtggtccggaattcgatcagatcccatctctgggtccaatttatgcattcattattataaatgtttcactgtttcaacattccgtgcgttcagtgagtaggacacgctgagctcacgcccctccagctcccccctcgtcctccccaattgtggacaccgtcactgagccgattttgcctgaaaacggaggagggacactgatcagtttgatatcgaaaattttgaaaaatatttttttaggcattcaaattttgcaaatatttgaattttaggactgaaaatgaactgaaaatttgagatttaaaaaacatttttaatcccatccctaaaattttcaaatggccttattccagaggctcaaacacttgccaggcgacaatcgccccggaggtcatttcaatgttgagcttttcctcctcaactgtgaactttttcatcattgttttttcaataggcggctggaaaatgaaaaattaagttaaaaaagtggggggggggcaaacgttctcctcgaagttgtcgtcgcgcattatcaccgtccacgactgtttctcagtcagcaaaaaaaaaaaccatctccacacaaataattgcaaaactgaacacgtcgcccacttttgtgcccgtccgattgttttctcgcaaaagttcgggcgccgtccacaaaaggccttgtaaatgcgttaatttaaaaagtgtggcaaatgccaactttccttcggcatcggctgactcagtccgatcatgttcagtcctaagtcgctgattttcactttccatcggtcgttgatcagacagttttcggaggacaaaagaccgtgggcgccgatgaatgattggtggatggcgaccctgaaaagttatcggagatgggagatggatgagatgagttatcagtggtgatataacgaatgatcagcaaagatagggggatttaaataagaagacagggaaaattggaacatttaaagttaaaatgatcagaccgacttagccattgatcagttgtcattttgtaaaatgatcaaaatttacacttgcaatgtcgcgcatcaaagcaaacattacgaaattgtcacccacatattgctctatggcgatcagctcctaatttgttcaattatcgtaattacccccaattagttaattgcgaacttttaatgtcccgcgttggcagtgtttccaaattcagtacaaaaggggcccatctgcacaaacgccgtaaaacttgttcaaattgtcgtggtcaaactgacggagctgttaccgtaaagaaatgatgagagattactgtattgcgatttttggaataatcggaagcaattgcttaaaaaatcgcagtcggcccattttttggagaaaatctgttaagcactcattttttaaatttttcccggcggcactcaagtttttcctcatttcttgtgttttcattggaaagtgagtacttgataaaaaatcaaaaactttctcagaatttccctttgcgcctttcgctacaatccctccccccgccccgccttcttgtaaacgcaccgtcactttgcgcccatccctggtctgcgagtcgaagtgtctgttcagctcgaacccacagtcccagctagtgaaagtaattgggttcgacttgatctgccatttttggcatgcgtcgtcgacgacgaattccagcacgtgtttcacaaatgttgcaacaaaaaaaatgttaaatttaaaaaaagttatgggcaaaaatgttcggaaaaagcaacttattgttattgtagtattttgtcaggaaattttggcactattctttttttttaattttgcaactgatagtgaacattcatagtcacatcaggctttttgaataagaccaaattcattcaattcgtgtaattacgaatggagttatacccctaaaaaaagggctgtctcccaattatccctttccgccgtcggagaacacaaatgcaagcagaacaaaaaatgggccaattttgccccatcaatgggctaattttcacaccttcaaaattatggctactcacttccggttctgttgttccagcccctcccggcgtcgtatgtacaccgtctcgcccaggtaacagaacgtttttacaaccgtcagtttggggtcgatcacccgagcgccgtcccagcaacgcaacggcatccacgcgacggaagtgtcaaaatctgatcataaaaggaaggcacattgaaacggtacactacctttcacgcctggagtattatcaaaaaaagttagaaaaatttaaaaaaaaaaattaattaacaaaatttttcaagcggtttttggaatttatggtaaactaataattttctaaaaaattattttttgaaattatcttataaaactaccacggaagacgatagacggaggaacgaactgctccacgttgaaacaaattgcaagtcgagtaaaaaaaaaaatttatttttcaaaattgaaaaaccttatgaatcggtgactgccgtggcgcccgaagagtcgccgtccgtttggttctgctgctgttgaagaaaagcgttttggtaggcggccacacgccaccaattctcggccagataaatctttaaaaaagttaacaataagcctccgaaatttggtttttttttgaggttgccaaaaagcaccaaaatgccaataaaccgccccgtttggtgagtgaactcgcattggacgcattcgcatggcgacgcgtcgccctcctcctcgtcgcccgccgccgctccgttcgtcgtcctaagccttctcgccgtccgagtcgctgctggccgcgcccgaattggacgacggcaccgcggacgaatgcgattggctaccatatcagaatgacgtccacttttggaagactgtcacaaaaatataatttatggaaacgccaagttttggatgcatttgcctgttccgctccctctccgccccattgtccgctttctgccgccccttcgctttcccgcgccgttgcgtttccgcgcgcgtcctccgctgctgttgaacaacaacacgtcgttccgctcgcctcctcctcctccgccaccgtttcattttcactgtccctccgttgcatttttgtggtcaaaaagcagacaatgtttggccgaacacaaacaagcaaagtccgcctggcgcgggtcctcgtctcaattgaatggttgggcaattcaaacttgtgttggttcaaatccaaagacatcgccaggtcactctggttttgagaaatggggcaacataactgcctagagttccaaacagaaaagtcaggaaatagccatttcgccgccagaagattttcaaaaatttaaaaaattttcttatttttcaa

SEQ ID NO: 3283 - DNA, 2092 bp, Heterodera glycines
aaaaacaaaaacgaaattttaaattgaaatggcgcgggaaaagcaacaacagcagcagaaaaagcaaaatgagctccgcaaagatatgacaatgttggatagagcgattgtggcagttgaaaatgcacgagacgcagcagcggaaaatggtgggcaaaaaaaaaatgggaaaaaattgggaaaaatattaattgtttattttttctaaaaattagagtagagcgggaccgggccgggaattcccggtcatccgaggtcccggtcccggatttttaaaagctcaggtcccggtcccggtcgcggtagggcaaccgggaaaaacaagcactggtaagaatgggggtctgacaaaggaaggtccccgggtgtccgtgggatttccgaatgaaatttggtgggtggatagagcacccatgggttcttaagaaaagtgtttttattttctgcgaaatgagtctgagtgccgagttatgacgtgccaaagttttttttattgcaataaattaaataaacatttgcactgttttgtgttgttcggtggtgcggaggttgtgctcctgccttccctttttgccctcgcaggttcgaatccctcatatgttaatttattttccccgttttatttttgattttatgcaaattaatggccattgaaatcaattccatcgggtcaaaaatttttattccttctttttcattcaattttattcattttcacacaaattgtaatcattaaaaaaatggttaaagcataaatataattcacaataagcacaccgtaataaaataaaacattcacaatttaatttctgacacatgtcattttttggcacttcaaagcagtatttaacgggatggcaaaaatttggcagaggctcgtccccgtaataacccgattttctccaggcaaaattaatccatcccatgaaaacgttctgcttgaaactgattatggattaacgattgtaatttaacaatgttatccctgtcgtgcaaatttattttcacatcataaatcattacaaattccgttatttttctcgtaaattgcttacaaattctaaaactattttttattttatttttggcaacaaaactaccggaaaatgtaaacatctaatggttggcatattccagttgcatgttttgggatttgcttcacttttaatttaacattatccgggagtcgaaaatcattccaaccattccaactatccaccaacaataatgattgttctccagggcgtaaaactgggaccaaaacattgaaatgaacttcgtgatctaaaataatttattttttggactattttatttatttttaacctttctcgaaactatgcgatggcgttttttaaaagcagtgacccatttttttgacgctttaaaattaacaattttgttgtccccgagagtgttgtttgcggaaattgcctattttcggaggatttgatcagataaacttaaatttaatgccgttttctccacaaattgccctttaacaatgtcgtcaatttgctttaatgcttccatttggtttttaagattggtttcgaatcttaatactatattttacagaaaaaatatttcattatacctccggagcatttttaggtcagattcactcttgataaatcgaaattttgaccgcatacatgaaagtgaccggtgtcctttttcagaagaacggtaaaattgaacggcttttttcttatcagaatgtgaaatgaagtcttctcgagccatttttttgtcggttgatgggaaaaaactcgatccactcgacttttcttaattgaaatattttaaatcttaaaaatttcagttcgttaggatttgtagatgttgaatactatccgaaacagtacggtcacatttacattttgccaaaacaatcggccttcagagtcacgtttgcaaggacaacaacacccgcagagcgtggctccgccgatcaccgtcacttttctgctgtttgtcactgccagctgattgtgaccggcgtacggagagtggagcacctcgacgagacttgacagaacatggagacgatggtcaacagaagcacttacaggtgatagtcgaaatcccc

SEQ ID NO: 3284 - DNA, 7377 bp, Heterodera glycines
tactcaattgaagcctttcgggaacattaaaggggtctatcgaatcccctaaatgattttttcttctacggttatatgcactccgtactgtctgccaattcgggtaattaaatggtattccagtcgtatcttcaatcccaatatcctcagcaatatcatgttctctggaccggtctgatccctaaaatgttctatttgggatttattaaaattttacaatacttctcgccatatagatttaggatccgtagaacattgcgctaaatctcttctttggcttctatcaatttgttcagcagtaagctgttcaagcggaacaccgttacaatgctggttatgaattattttgtgagttcggtctaattgaccttctcttattattgcacttgcgatgatacttaatataatttataatcattaaaatatgtaaagctaacaacccatcagaattttgtttcctataactttcacatttcaggcaataaatataaattgcgccgtttctttcattagtctgcttaaactttcgatattcatcaccgtgaccaattatgaagagaaacttattgtcaaattttgaaaaacattgtgacacttctgctttttctatgtcctcttgaattccttccgattttctacttcttatttttgaaaggtgtctatctaacgcccttaggcttaggtcgacaccaatttcttctagtttttccaacaactctcctcttgtttttatttcttttttaaggtattgatcaaccaatcgctttgcgctttcgtttatattttttggcagttttaagaaacgcgctggcagttttaagaaatgcgctggcagttttaagaaacgcgctggcagttttaagaaatgcgctggcagttttaagaaacgcgcatggttggcagttttaagaaacgcgctggcagttttaagaaacgcgcatgggtggcagtttttaagaaacgcgccagcacggctaacaactagctttttgagagacatggccattgtagatttgcgcgcgtgatcacatgacttattgtgctgttatagtttttgtgcactttttttgaaataaatttgcaagcccatggatttgtagatgttgaatactatccgaaacgtacggtcacatttacattttgccaaaacaatcggccaactgctttctcgcacaccgaattccgtgcgatggcaacgcatggcatctgtacggagtacgcgccgcgacgcttccctgccatcgtgttacgcattagaggctacaacagcggtgacgacgccgttgagcccaatggagtggccacagatctgctgtttcgcagcggacgtgtcgtcatgacaggtgtgcgcgctcccgcgtgcggtctttgctcgacagtcaacgtgatggcccatcgggtgtgccaccgggttggggcggcgctccgtggggctggactatcagccgctgcactagccttacgcataggggaagtgagtgtgcggaatctggtgagcagcgtacgcttgcccttccgagtgcacattggcgtttgtacaactcgttgatgagccgacactcggcaattgaccaaaagcacgacgacaatgttctcgccgacacccaatttgtcggcgtgcgcagctgccgtctggacttctgtgccttcccagcgctacgttgcacgctcagcatgacactttcagagtcacgtttgcgaggacaacaacaacaacaacgcagagagtggctccgccgatcaccgtcacttttctgctgtttgtcaacgaccagctgattgtgaccggtgtacggagagtggagcacatcgacgaggccttacagaacatggagacgatggtcaacagaagcacttacaggcgatagtcgaaactcccccaccccctcccccataaagtgcgaccacactttcacttatatttttgcgcataaatttaaaaaattatccaagtaccaaaaaatcaacatcatcatcatcatcatcagtgtcgctttcgtccgagagttccccatcttcggcttcctcctcctcagcatcgtcacggtcagcgtcgtcgtcgtcgtcgtaccagccaaacggtctggtgaagtaggcatttccggcgccgccgccagcctcccgggcgtcaagcgcaacgaccagccctttggtgtacacgggctggtacagcttggtgccgcggcgcgtgaacacctcggcacgcttcgtacgcacgaagcgggtgcaggggacgggcactcgctgctccgcgtcaggcatcctgctcgggggtagcatacacacacacacattccattgttatcccaccccaccccctcgtgctcaccggccgaagaagttgagcaccagctgacgcatgcgctcgaacgggagcagttggctggcggtgtaggtgagctccagcccgcgcaccttgcgctccgcacgttcgtccccgccgctcgcggcgcaccggtgccggaaaccgtagttcttagggccagcgctgaagaattggacaatgcgccggccgggccactcgcgcatcagctgcccgaacgcgtcgccctcggatcgaaggaactggtgttgttgcggaccgggtggtcgccacgcgcgtacaaagtacacggagtcggtgtcgcagtacagcatgcggccgcccgccaaccgcacctcctccagccgcccgtgcagatggaggcgggcgtgcgcggtgacgaagcaggcgaccgccaagttgttggtgtccggcgcgcgcacaaagggccaccggcgccgcaccacgcaccggtccagctgctcgttgaggtggacaaagtcgaccacatcttggcgcgggtcgcccaacagctcgtggaactcgcgcgcgctgcccgtgtagcacacgtcgtcccgctccgcgcgctgggccagcttgccccacagggagttcagcaatgccttggcgaccgcgcgcagccccgggttcggctgcacgcggcccgcctcgagtcgtatgccctcctggtccgcgtagcgcgcaacgtagcgcgcgcgctgctccaccgtctggcagtcggccggccacccgctcgcctccaccttcagccggagcatcgtgtcgacgtagccggcgaacaggctgttgcccgcctccaggctcgcccagcggtcgtagtgccacacttcgtacagcgccagcacccggtagccgagctgtagcgccgcgttcagctccacatcggtgtaggcgtgcgtccaggcgcgttgcgccgcccggtgtcgacagcggggcaccgtgcgatggtggcgctgcaccttcttgtccgcgttggcccactcggcgcacgcggcacacagcggaaaagtcagccgccccgtgcgcgtccggtagggcaacagggcgtggcgctcgccaagctcggcgggccgaggcggcagcacgcggcagtggaggaagccgcggaaggggttctgctccgcgctcgtccacggcaaccgcacccccgcgtcgtggtcaagctgctctgcgctgagcacccgcggcaaacccacagggaaggcgcggtacttcatcacgaacgggtacagcgacacctttacaagcgggggagagttgtgagagttagcacagccacaccccccccccccgccccatcacttacaatgtccaatgcgtctatttcctctcgctctgtgcacgtgtagtggagcgcgaacggctccactcggccgccgaacagcgcgtcccggcgcaggtccatcgggccgggcaccgcccggcacacatccgtgtacaggcgccgcactcgggtgggctggcggcgcagccaccgctggaaggcgcactcccacaccgtgcgcaccgcgaagccgtggtgctgctccagctcccaggcacgctgccgtgtcctggcacacagcgactcggcggtttggccgcccgccaacacttgatggcgcctcgggtagcactcggggcaaccttggacgaggcaaatggaaaaggagcccctccacccccgtccttaccgtgaaagaagcacccgttgaactcgatgacgagcgggcgcagcggcaccgggcggtagagcagcgcgtccagccggtacccgtcgtcctccacgcacgcttcgccgatggaccagcgcgcagtgcgcagtcgaccgcgccattgcgggcgcagtctctccagcagcgcgaagaagtggcgcgaggcggcggaagcgcgtcgtccgcgcaggaagccgccctccggcgtgtgcaccatcagatcacggggcagatgttgttgccggtagatggccagcgccagcccggcgatggtggaggcggccaggaacggctccacgccgcccgacagctcgccgaccacgtggcggaagcgcagacaggcgcgccgcagaatgcgcacgtagttggcacagtagcggagcagctcccggcgcagcacgaacagtcggttgggtcgacgctgttgctcctcagcatgccagcgctggaacgcgtcgcgctccgccgggcgcatccggtccgggtcgtagtcggcagccggcggcaatcccacatgcgccacatccatgttttcggccctgatgtagttgtaggggaagaacggcttgtccggcacgccgtccagcccgaacatggccggcagcttggacagggcacagccgaaaaagttcagcgagtccttggcgaccacgctgcgctgatttcgtccgcccagctccagcgtgtagacgcgcagcccggtggcgaccagccgccgggggcgcactccgcgccgctggagctcctccatcagcaaatgcacatcgtaccgcccctacaaagcgtatatggtagcttttcttcaactacgcttttgtacacccccgtaccccgttgttagccagcatcacggtgcgcacattcacgggcccgtcgtggagcacaaagtctgcaaactgtgccataggcgtacgcccgttcgccgcgtcgtggaagaaacgcaagcggcgcgggttcggtcgccgccaccgccgtcccccgtccgcgttgtcgtcgtcgtcgtcgctgaacgcgtcctcgcgcgcacgcatcaaccactggcggtgttgtccgtctcgccaagccgcaccgccacagcaacagccaggcgcccgtcggtccggctcgcgctccaggtccacgccagccgccacacaccgctcacagatcacctccgcgcacaccagcagcggcacatgtttgagcactcgcgccggcactccctcgtccccctcttcattttcgtccgccacttgggcacactccacatcccagaacagaaagcgcagcgggcgccgccgtcgattcggttccgcatcaccaccggtcgtcgttgtcgtcgacatcgtcagcatcgccatcgttatcatcgtcgtcgtcgtcgtcgtcgtcgttgtcgtcctcgaggccttcccgccggggcggctgggcgctccgcgtcgttggcgatcagctgacactgcgcccgcttcggctggatgaagtggggggtccactgcgcgtcgtgaatgccgaaacaacgcgcgcactgctgttgtgctgcttgctggcggtcgttgatgttgttgttgttgttgtgggcgcacgcgtgcgcgccgtgacgggtccacaccacctgacgacagcgggcgcacacgcgccgctcttcacacatcggacgatgcggccggccgcgacgacggtcatgttgccagccaggcggcggcgggtccacccggcgccggtgcgcctcgaagcagtccgcgttctcgaacacgaacaggcagtcggcgcagcgcgacggagcgtggcccggctcccgcgcacagggacggccccagccaaagcgaagacactgggggcacagcgcccgacagccttgcgggtgcgtgcgccggtccaccggctgctcgcagtccacacagtactggcgcgcctaaaagcttcccatatttaaaaataatttcacaagtaaagggacattgacaaacatggaatagctgctccgggcactgtatgtacccgtagtggccgtcctgtgccaccaagcacaggttaaagcgtgccggccgcgcgcccttccacgccacgcggtaggccagctcgcgggcgaagatgaccagccgcacttggtgggcgcctaggctggcgtccagccagcgctggactcgttgcgcctcggcagccccgtacgttgggcggtccagcggcaccgctgcgtcctccaacaggcgacgtgcctcgggcgcgcccgcttcgccacgctgcgccagacagaaggcgcggaagtggaccacgttgcgctgctccagtacgcagatgcgccgctgggccagccccagcacgatggcgcgtgccatgcaccagcggtcgccgcccgcccagttcacaaccggcacaaaggattggagcggacagtgccacgtgcgggcttctcgtcctcggcacatgcgccctccacgcgcgcggctaaacggtggggggaggggtcaaattttgtcgagggacaggggtgggggatgcggaggacgagctcaccgggcaaggcccaaaccgccgacactttgaagcagacgtcggcggagaacaggtcgagctcgtcgtactgcttcgcgaatgtttcgagggcggccgccagcgcgtgcactgttctgctgtggtgggcgcatcggcacgtgagtagtattagggtaaaaatcttgtccccccctgggaagagagatgcgcattcattataggagagagaagagaattagagaaaaagagtaattgcaaaagcaaagaaaagcgattaaattgtaaagggatccccggccattaattgtaatgcaaaatccccagcccattggtattctcgggtacccctctccaatgcgcgggtgcagtgctttttttttgtttgtggtcctccaattaatcgaaccaagggaaagttattgattgtgaatgcaaaaaatttttttatgcttgggcaaataaaatcacattttaaaaaaactaattaaaaaatatacccctcttctcttttgaccacggcgattttttagtgtggtaaataagaactataaaatgtttaattttttattaatatttatatttttctcggttttatattataaaaatttttaaaaaaatcatagattttaccctcatctaagctaaggtttatatcttttttttgctgttaaaaattcgctcggattgtgtgggtgtgataacatcctctttttcggagatggtccctttaatcgatgacaaagtaaaagagagaaattgaacaacaaaaattaaatttaaggacaaatccaaatgcgcgaaaaaaatgctaaacaaaatttatatgaaaaatgctcgaattttttagtttttagagcgggaaataaaattatttaatttttaaaa

SEQ ID NO: 3285 - DNA, 1059 bp, Heterodera glycines
  unsure (1)..(1059): unsure at all n locations
catcttccattcactaataatgcacaaatttttattacattttaataaaatggcataaaatgtacacaatttgaggtacaaaagaaacagtcatatgtgtgtgtgtgtgtgatagataatgtacaaattacaatgtgtgtccaaaatccaatacattgaaattggccccgatgattccctttcccacaaacgggcgataacatttttgcataggcatggaaaccacccgacctccctccctgatgtttggacgaaggaagttggggtatgtgatgattatcggctcgtattcaccacttgtcgcgtaccggaccacctcctctttgaagttctcatagcgcatcccctggttgttgatcacatcataatttagcgtcagcccacgcactttgagcacatgttccaattgggctccctcttccgcgcccttgcgtcgcagacaaaggccgtactagagtgttaattttcattaattaccgcaaaatgagccgaaaattcacttgttttgccccgccactgcaaaattccacaatgtcgtggtcggagtattcgtcggtgaactggcccaaatgggggccagttttcagtgggcaccgctcctccgggtggacgaggatgaggctgtcagtgtctaaaataaatgtttgtgcacaaaaaattttttgtagtttaacttaccagtgtacagcagatcagagcccggtgatctgaccaccttctgcattgccttgagtagaacgaggcgcgctgctgaggtggtccacaaggagatgactgaaagttgcacacatttataacattttagtgtgtgtgtttgtcaccaatgtttgagcatgagtgctcatccacccaatccttcttctgcagataggtgatgaggatgtgctgctcatccaactcgtcgattgatgtcacttcgatggatttgttgtccaggtactccgccaaagtcgctgggtcatcagtgatgagtgtttgagcgagaccaaaattgcgaagcgaaaatcgtccccctattttttttanatataaattanataatggacgacaaaactcaca

SEQ ID NO: 3286 - DNA, 4285 bp, Heterodera glycines
  unsure (1)..(4285): unsure at all n locations
acccaccccccctgttctgtcattgtgctcgcagtggtagtcgttgtccactcctcctgtcgggtgctctttggcgcaagtgatgcacagggggaagcaaagccgctctccaactttcaccggtagaacggggacgtcgatgcgtcgtggcggcacaacccacactttgagcagtgccaaagagtaggggttgtcggctgcactgcgccaatccacttcctggttcaacacatgcacgtttggctgtccgatggggtaacgggttgtgaagctgtgaaggaaacaatgttaatttgttacaactttaactgtgctcactttatatacgggtagagcgatgtgaagtcataataggagattttctctcccggtccagctttgcgcagcagctttagcggtccagttcgccctcccataaacgcgtcgcggatcaccagcgggccatcatcgacatagtcttcaaatgccttgcgcatttccttgctcctctccagcatccgatggatttcgcattcccagtagacgtccactcggttgaccttctctctcagaaattccatccgcttggcatcccgttcgcgcacttgtcccgcagtcttcccactggggagcagcatgttgtcgttggggtaacaccttttgcacccgtgccacgtgcagccttaaaattgcccattttaaaataattttgcataaaattcagttaccattgacttcaattgcgcgtcgttccgcctcaatccacccatccaaggagtagggcccaatgcgcttctctcctccaaccgcgtgggctgtctgcacttgcactccatgctccttggcgtaccagtggaagaagcgtaaggcgagcaggctttggttctgcgcgttgtcatagccgcgctcgggcacaatggccaagtgctcgtcgggcaggtggttggtgcggaagtgccgcatgcatgcccccgcgatggtcatgcactcacgcagcacatcaatcccgtcgtggttctccttgtcatcaatcccatcaacgtagtcttggcgccgtgaaatttcgaagaattcccggcgaaaggcgaccagagctgccatcaatatttccacatcgttggtgcaataactgaaaatcgagaacaaaattattgttatagcaaaatatttttgcagtacctcgctaacgcctcatccaatttaaagggctcatggcgatgcgcggcgtaccactcgtcaaatttctgtcttttgctgggcatcattccactagccaagtagtcttcgggcgtcgggtgaatctcacggccgtagttctcgggtcggttggccaaatgggggaagaagggcttgtcctcgacgtccagaccgtaggaggggatgagtgccgccagcgcacacggcatcaaattgaatgagtcacggaagacaatgttcgggttgcgcctcttctgcttgcgtaccttcatctcatacattttgttgccctgacatttttaaaatattttttagaaaaaaaaattcttaattgagtacccgtcgaagcatctccgggttgaacccaatccggaatagctcgcgaaagaccagaaccatgtcgaaccgtccgccaaagtgtgagtaggcgtatgtgtcgtatttggctggtagttggaagatgagccaatccacaaacgcctgcagtgggttgtccgccaccactcgtttgtccacacgagtgtcctcaaagggtcgctggcagaaagcgacagttcgatgtggaccacaaaatcggcagcccgctgttgccctccgccaatttccgctctcaatgcacttagggcacgcgactcgggcagcaatgaagttgggctggtgctctctcttctctggctgctgggggtccactggttgatgctgcatggtttccaagtcgaaagccacaatgcggtacgggtcgtgctcctttggctcaatgggctgaatgaagcacccccgctcgggattgtgaaatgtgttgcacagctgacaataggtctcgtggcatttgtgaccctaaatccatcaagaaatgaaaattttattttatttttatgtttacttttctcccatctctgttatgtactcgtgtggcccatataacgccgcagtccttgcactgctttgactgggcgcaaaagttggatgccaaatggtgttggaggcacccgttattgcgaaacattttgttgcagcccgcgcattgatggaaaaatccgcccgatgggacacacgggaatgctggtccgacgcgtgagcaaagcatacagcgcgccttgcaagaattgaggtgccttgacggacgctcataaggcttttcgcagtcgaggcagtagtgttgtccaaacaagccatgcaatttctgcacaccatcaaaatgctggttgttcaaatagagcacaatgggagtgtcgtaatgatcgttgatgtatttgtacaacggcttgtattgtcccgatgagccaaagatgaacactgcaaatcgatgctgctgttgcgtgttgttccagtggtcgaccacacgcggcacacaaatctcagcatcataagtgttccgaccggtccgtacaccaatttgctgcatcagttgtaaagcatcccgcctcagacatccctgttgtcccctccgactgtgcaagtagtcgtaaaatctacaacggggccaaccgcacgttttggccaccattgtcgcctgcaaggcgtagaagaggcaatgcccgtccggattgcaaatcttaaaacaaattgtcatcgaatagttttgatttgatggcgcgacacgaccttaatcaaacaagtttccgtcaccctatgatgcacagatgctaggcttcgtcgagcaccgcccttcagcacccttcggccgggcagtccagtacggtcaactgtggtcaccaccacagtgaatggctcgccccacagtgtgacgttttgctgctgcttgctctgagccactttggtgaattggttgaggatggtgtttacggtgttgtcggtgatttgtcgaaccgggatggggatgtccccgccggtgagcaacggactgctgatcatgcagccgagatgcgtgggttcaattccacgtccacgactctcctccatcgctgcgtcaaggcagtactggaagatgccggccaggagtccctcaggatttgctgctggcacatcctcaatgctgaaccgcgacttgactttgctgtactggaagcggggcacatgctcaacggtgctgtccagctttttgacgtattcctttgcagactttgatgatgatgagctgctgccgccgccctcttgaagcacctctccaagcaattcattgatgagaaagccgcgacgcggctttttgcttgggaccgatagaatttggtcaatggaaaacaaaaagggatgcttgggaggctgattttgcattatctaattttacagggaaaaataatgaattgaatggataaaatgaacaatcttgacacatatttttgaggcatggaaattgtcgttgtgaatgcaaattaatggataataataataataattttaaaaattttaaaccaactatgccctgaagagcagcgcactgccacccatgaagcacaagacgacagggcacctaaacggctcgggtaattagtaaaggtcacgcgcacaaccccaagccctaaaagacacacaagtgctgccaggataaacggagcccaataattggagcaaccgccctggttaacagcaataaaataaaaattttattacaattttattattaaagtgagtaaggatatgagcagatgtgaatgaaatgtgatttggactgagtatttatgaagtctaggggcggggtgtccccatccgaataccaattaattttctcgaactctccttccttattgtcggcaaattcaaatttcctttgaagttatctccttcactattgtcggcaaattcaaatgtcttttgaagtcaatattaactattgaataattaatgagcccatgagaaccgggcacaaaaatattttaattcactcttcattcattcattcaaatttcatgaccaatatgatgcccaagcgattaccagccgagcttctcttcgaaattatctactcactgcccataatgtgcttatttggcggggtatcacccaagccaggtgggaaaaaaaaattcaaatttcaaatttttcgcaaaatttaaggccgtccaccatccggtatcgcagtggtcaatcgaattatggaaatatttcgggacaagcgtcacccaaacttcacccaaattgntaataataa

SEQ ID NO: 3287 - DNA, 5005 bp, Heterodera glycines
cagcaataaaataaaaattttatacaattttattataaaagtgagtaaggatatgagcagatgtgaatgaaatctgatttggactgggtatttatgaagcctaggggcggggtgtccccatccgaataccaattaattttctcgaactctccttccttattgtcggcaaattcaaatttcctttgaagttatctccttcactattgtcggcaaattcaaatgtcttttgaagtcaatattaactattgaataattaatgagcccatgaggaccgggcataaaaatattttattcactcttcattcttcattcattcaaatttcatgaccaatatgatgccaaagcgattaccagccgagtttctctcccaaattatcgattcattaccaattatgtatttatttggcggggtaacacccaagccaggtaggacatgtgtttttaaaattattgtttcacatttccttcacaatttaaaggccggccactctccggcattggtgtgcttaacgcaaccgttgaggtttttcgggccaaacgccaccaaaaatttgcaataattgtaatgcaattttctgttttttcattttaaattttacacatttagaaggaattggcttcaaaatttgatgtgatcagttcaaaagggtggatgtcagacggacagctctacctacatttccgttacaacaacaatgagctgtgtgagccggcctttttcaatgagttcgcccaatatatttgcttcggcaaatctgggcgcatttgttgcacccgcattttggtcgactcgcccaattcgcgcgtaaaatttttgaactattttttctttttcaattttgtgataaaaaaattaaggaaaatggtgctctttgcaatgtggtgctaaactgcttaacaaaaagcgcgaatcctttcacaatgaaaaagtgcacgtccgtcgatctggtgcaccgcgacaactttccggcaatattgaaggcatcgccgagcgtaatggctgaaagtggaattgtgtcaacggagcctttgtccgctaatgatgatgatgaagcatatattttgaagaacccgcattttggtgatgatgaaattggctaccttgacgtttatgcccgatcatcgggcttttactttttctttttttcaaccatttaatttatttatttaaaattttgtggagtacaaccgtggcatataaatcaggatttgcacaagaattgagtcgactgagaaattgattaaatgtttcgcctaaggataagtggtaaatgaaaacaatgcaatgggcggcacaagtggagacaaggggggactggtatggacgagaattcttcattatgccccctgggaaatagcgtaaaaaggatgacgtaatggtgggcggaatgggttgagcaagactgtcatagtagagcactggcgcttccactccctttgcgtaaatggcgcaccaatgagagccttccttgtggcgggggtccctgttcacaatgagcgcagcgggatactgtatcgtggaggggggcggcaactggtcactggcgaagcagccccgaaacactcgctcggtctgccgattttcgctcaatatctttataatttggaggctgtccattctttagccaaaaaattgaacaaagttgatgaagaatcagactgaggatgagcattaaataaagggcgaacaatgccccgcaaatggctttctgcgcaaagttgctttccgctggtagatccttacacagttggataagcggtggaagaacagcagagaaatgctcatcaattaacttgtcgctttttggagggattttggttgtagttgttgttgttgttggtggtggtattgttttggttgaaaaataaattttagacaaagacagtcttctcaaatattcactgtaggaatattctgggtggtgttgttgccgagacaaagtcaaatttttcaaataagcagaatatgtattctctggcggtgacttttgcggttgttcatggaatgttgaaacaacaggaatagaaacgcggagcaagaacaaaatgatacccaatttttttgaatacattttatgcaaatgaaatggcacaatatgatgcgcgtttaaatagtggtatcagtgcttatcgatcgatttttgtccaacatcacaagagagtcacattcgcccatcaccaccaacattattcctccctcgggcactggatggttaaatttgatgctcaccgctgtagtgccattctttatcaaatcaaacagtgccgcttgatcatccccgctgttggtcaaattgaacacgtaaatgcaatgggtttttccgtattgggcaaaagttatcccgttgctctccgatgagtttgcgaatcccaccgcttcgttcatgtcattgaatgggcgaacataccttccgctggggtagtccaagtcatagggcgcttgtgggtacgagcgaccattagcaacaatggaaatttcgcgaacattaaatggctgaaaattgaatggactgcgccgaattgagccaacataatccgcattcgccaccagacccattgtcacacgccgggggatttggtccatgaacaaattggctgtgaactcataccgacccggactgatgaacagtgatttcatcattgttttcctcacagcgtagcgggcaggcttcacctccaactttcgcgcaatgtccagcgccaacccatccatcagagacaccttcttcacatacaatttcagtcccacaacctcgaaacggtagcggggtgcacccgcgagcggcgcaattagcacaaattcgttatcgttgggcaaaatttcaatgtccagctcacaaaagttgatcagataaagcggctgattgaataggtcggtgtcaattttggcaatgaactgagcaacgttgctgagcgcaaacaaatcgcgtcgcgctgtgcatccgtctcccgtctcaagcacatcacccgggtcccggtagtagcccgctgcattcaggtgtgagtcctttgccgtcgttgaataggagagctcatgtgaaaagtatgttttataagccatcagagcattggcattaaatatttcgcgcccgttgatgctcattttaatgttgcggatgaaagtttgaccgatcatttgaattggcgcaatgtttatatcatcagcggttaggtcaacaagttgtccattaacgttttccttacggattcgaaactctgtgagcaaatagcatttggagaggtcaatgaaattttggcttgagtggagtttgaagtggtagggcgtgtcggtcagagggttgctgggcagaagctcgaatacctttgaagatgaaacactcacatttgttggcggaatacgaaaaaagtccaaagcattggtgattgagttcacggagtcagtgtcgattttgtgaaatgccattattatttagtaaagtccaaatgcgtctgagcgaacccgttttcttgatggctttgcaactggtcgtccaattattgtttgatgaccaggcacacgtgttctctttctttttatacccgttcgtccgcttccaaactgtttgggcaggccgcctttctccagcacagtatcaattccccgttttccctcactgaccaacgcctccttgagcggcaccccctcatgcccgactcgctccagcacccgctggccagtgctcagcgcctccgaccctaccgtagttccaacacgacgaagaatgggcaggaaaaagcgccaaagtccccgaaacacatcgccaacgcccgccccgcgttggataccgtagcccctctgaaaagggctggtgccccggaagtagtcgaattcctccttctctaagccactaccgtactgcacgtactcatcatacccggcaatgcttgggtcaaacacaatatgaaccatttttatattgtcaaaacaaaatgaatgatgaaattagaaatttatcactttcttaaatatcaacacgaccatcgttgtcccataggcgaacggcacgagacggcctttgtccattgtgcgcagctcaatctcaatctcattgatctcccgtggtaacacacgagcaaaaatgggcgaatcgtaaattttctcgttgtactcccaagggatggcaccgctgatagacacaacacgaagcagcgaactcagtgaattgccaattatcatgttttcggtcaatcctttcgagtagacagcaaagcttgagatgcctccgcgcaaatccaccggatactttgatagctcatttgacacgacatgttgagggttttcaaagccaagcacatagcccaactgcggtgagaaggacacatgactgacgatcgcctcattgaacaccagcttgaatcgttccatgttctcaagatattgaattgagacggaattgggtacatatgagagagggtctatttgaacgctgagggtattttctggtaaattcaaatctgctagtgttaaagcagctgatgttggcgggggtggtggctgctgtttctgttccgttccttcaaaacgctgtggagagcctgacggctttgcgggaatcgaaactggagctggtggttttacgggcacttgctgtttttgttgatgaggcgttgccgagctttttagttgcgccggaggcgccgtaattgttgtcttaactgaaggttttgcaggggttgtaggcttctgttgctcagttccttcaaaacgctgtggagagcctgacggctttgcgggaatcgaaactggagctggtggttttacgggcacttgctgtttttgttgatgaggcgttgccgagctttttagttgcgccggaggcgccgtaattgtcgtcttaactgaaggttttgcaggagttgtaggcttctgttgctcagtttcttcaaaacgcggtggagagtctgccagaggagcgcgaggagccaattcagcggaaaccgaagctggaggtggcgccttggctgtcgatttaactgagctggaggtgtcaaattgttggcttaa

SEQ ID NO: 3288 - DNA, 2786 bp, Heterodera glycines
actttaagctaatcgttggttgaaatagaattttgaaataattttagaagggttcgagaaatcaaagaaacgaaaaaagagtgaccgaaagcaaattgagagagagaagagagtcaaagagataatggtaaaagcaattaagaagcccccccaatcggcaacggtcccaaacgcttctccatttgccattgtcgcggaccgaaaatgccgccaatgcgaccattttgctgacgcggacgcaacgcgtgctcatcgagaacagttggaaaagggtcaaaaaagtaaacaaaacaaaaaaacgaatgaaacggacactttccctttttttgttgccattttaggcggcggtggagggaattggcgccaaagttttccataatgtgctcattgcccagccggacattaaactgttgtttggcttggagaaagtcccgcaaggcgagtgaaagaatgtaaaaggaattgtataaacggcaaaaaggccggggaacttttgaggggaaaaaattgggatgagacggagtgaacggcccggccctctgggtgtacgattttttcggcaatttacaaaagtgcggcacaaaagtgtcactgtcttttgtcgtgctgcggtgtctgctactgtccatttggttgttcaggtcgcctgaaatacgaaggccaattccgccgccatgccgggctgttgaaccgaactttggaatatgtcgtaaagaatttacaatacacagacaaattggggcaacatttcaaagtgaaatggcaaactcaattaattaattaattggttaaactaattgaggcacttggcaagaagcactgtcagatgaacggaggccgagcctttccagcgaattattgggacacttttttagagtgaattgcctcccccccacttttaatcaaaatggccaccctttcagatgcattttgcagtcagtgctcgagacggacggctccaccagcggacgtttccaccgctgtcgcgaggctgcgttttcctggcgaaatttggttagtccgttgcactttggcattcattgtttgctcattttgcccattttcgatctcatttattgtccaacaaatgcgtcggggctttgacgacgagcggttaatgcgcaaacgcttctccgcttcgctgatgggcttaagggggtccgcgttgagagatgcgtattatggcggggacaaagtgccgtcgctgaaggctatttccggtcagtgtttctctgtttttcaaattttacatttgccacaggtcggccccgtccgtcgttgttccaacactcccacggctccttgggctcgttggagatgatgtccggcttcttccactcccatcgtcccaaccatccgaccattgctttccatcagaccgatggccttcacaatgggaggcaacgacagcgagcagtatcagcagtttctgcccaaattagccaagtgcagcagaatttgcagcaaaagcaaagcggaattggcaatttgaaagatgaaaagaaagagcagcgaacaagtgaattgatgaagaagcataattaattaagcattcttttcattgtctcaaaaaggctctcggcttcagccccggacggacggctgtcccccctcggcgaggagtgcctcgtggtgtgccgaagagagtgccgatgaattccgccgactcaatttgaacgatggcgcaacaaaaagagccactcgaagcgaattgttcattgacgacaaattcgaagaagctttttacacaccgcccacaaaattgaagactgatcggcaaaaagcgacagaaggtgataatgagggcctgctgttggtcactgccaattagcatcttccgcttaatcactgcttccccaataattttgccctaattgatcacttatttctcctttttccaaataaatcactttctcccaatattttgctccaattgatcattttccccaattcactttctctcatctttatttgtctttccccaataattttgcccaattggccatttccctccacttttaggcttgtcttccagcccttcttcctctcgcctttctttctctccctctcctcgcatcatttccacggttcagcttctgctaagtgccgccaattctgaacccttcgacgcaatgactgcttccgagcggacactttcgtcgttggaacttccgaatgattgcggaaaacactcaaaagggcgccattcattttccgaatttgcaaatgccgggagggaaagattagctgcaattgaagcatcgaagcgaatgttggaaatggtgaagaagaatcagctgcacgtggtcggcggagagaaaagtccgacggaacggacgagacgcctctcggccatttgaggacggattacagaacattggattggaaattgttaattattttatttatggcaatcgattaaaaatattgcataaatctaatatcggttaaccaattaattaattgattataatttaattaatgcgttggtcggcaaatgttcctttgcttatgcttcgtcccatcggcggttggtctctctttcgcttcactggtggtggtggtggaacttcttcatgcgtctgtacccgctcggctgttgcggctgcggctgcggcggaggctgtgccggggtgggagcgtacggagctgcgctctcagagacttccacgacaggcgccgcagcagggatgggagggggggacatctcttccggcgctggcgcaggcacagcggctgctgggcccccgtacgccatctcggctgctggcggcgactgtgccgcg

SEQ ID NO: 3289 - DNA, 1823 bp, Heterodera glycines
  unsure (1)..(1823): unsure at all n locations
tggccctttgcgccgctcgtcngaatttgcttttcccgggcccatctttctccctccctctcccaatttcagcttacttcagtctcaaatgcgatgtcttccgatcagaatttccncagaacacttcgctttccgctgattttgcttctttccttttcaaaatcgttgctcgacggtgccttgttggccaatgttcagccgagagtcaattccatcgtcgacttccattcgtccattaatcagttggaaccaaccgtcccaaactattgcaacgagtccaagctgatcgagcagtccgggctgatcagagcgccgatgggacagtttctaggatttccatgcaggtgacagaaaaacagaaaacagtccttgaaaggttaattcagcaacgaattttaccattgtcgttggcaaagcgatggctacagaactcataaaaagaattgccgagcaggtgagtggaacatgaacgagaatggctggtcttgaccaatcatttctgtcaaaaggactcgtctacgatgtgatgggcacgcaaaattgtaattacgactacaatgtgaaagggtgcgcaatgggtccatccgccggaagagagggtttgttggaatagcatttttggtgaggaaggcaccgaattatgagccaaattggcaagcaaatgccaagtgctgaacatgagggcatagctgtggccaaagaacgaatgggccagatattctctcggaaaaaacggaaatttaaggcccacatgaagaggggatgccagaccctttaaaattagccacaattggttaattatcattaaaacagtgaccaattgtacgcggaaggaccaattcgaatgtccgttgtccgaggattgtgtgccgttgtcaaagcgatgcgatggcaattacgactgtgtgttggaggaggacgagcagaattgccgtcagtcaaagccaaaataaggtggcaactgattgagtttgtatttagcaatgtgcaaaccaacgcattttccatgtgttgtttctgaacaatgcattccggtgagtgggaaagagaagacaattgaggagagaagacaatttgccactgtttgatagcttggccaacgctgcaacggcatcaaagagtgtcaggacggaactgacgaattggagtgccaaagttggtcattcaagggaaacaaacagcgaactactgaccaaatgcaaaaccaatcacagattgtggagctggaaaattcttatgcaggaaatcgggcaaatgcatttcggcaaaggaacgctgcgatggatttgcgcattgtccgcacggtaattaaatgaacgattagtgaacgaatgtttgatgaagaatgattaatgatgatgaacaccaaaggtgaggatgaacaattgtgcaagaaagcacgaattgtccttgggccgcggatgttcgtttgcgaggttttcaaaaacattaataattatatttaaaaaatatatttctaaactacaactgataatcaccacaaatgttattttcagagtggcaaacatcaaatccctcaacaaaatgtgtgtgacggcgttgtgcactgtccagacgatgcatcggatgaaaaatattgccaagtcggaacagcgacagaaacaatgcgcaaaatgggagcaaggacaatgccaaggtgggaaggcatgttttcaatctcatttatgcaccaacgcggaaattaaacctcttaaatgtttatgactccgtaattaaagtaaaaggtaaattcaaaaaaactaatttggcagaccaaacgctcctcccaatcagttggccactcccgcaatcaacttttaaaa

SEQ ID NO: 3290 - DNA, 2818 bp, Heterodera glycines
  unsure (1)..(2818): unsure at all n locations
cggtaattaaatgaacgattagtgaacgaatgtttgatgaacaatgattaatgatgatgaacaccaaaggtgaggatgaacaattgtgcaagaaagcacgaattgtccttgggccgcggatgttcgtttgcgaggttttcaaaaacattaataattatgggcaatttaaaaaatatatttctaaactacaactgataatcaccacaaatgttcttttcagagtggcaaacatcaaatccctcagcaaaatgtgtgtgacggcgttgtgcactgtccagacgatgcatcggatgaaaaatattgccaagtcggaacagcgacagaaacaatgcgcaaaatgggagcaaggacaatgccaaggtgggaaggcatgttttcaatctcatttatgcaccaacgcggaaattaaacctcttaaatgtttatgactccgtaattaaagtaaaaggcaaattcgaaaaaactaatttggcagtccaaacgctcctccaaatcagctggccactcccgcaatccaactttcaaaaattgcgtttgatcagcctatcactgcacagcaacagcagatggagcaaataaatgccggaaaaagtgagccatgggttggcacaaacggcggaatgacgcaaactgatggtggaccaagtggcaaaccgccgcagaaagtccgttcaatttggtcaattaaaggcatgaaatgctttttagttttcactgagtacggcgaaccaaccgaacaaaattggcaatgttagggatgaaacatttccaacctcaaactttggaccgatgagaaatgcgatgaacgcgcagcaaatgatgggcatcagcaacgggacgaatcgactgatggtggaaatgccaaggcaacgaaagccgacggaaaacaaaagcatgcaaatgaaaacggaggacagcagcggggcaaagactttggtggagggccacttccaagcgggcgtttggaacggaagcgcactccaagcgcagcaccagcggaacaacccttacgcggacgaatggtatcagcaacggcagaacagtggcaccgaaggaaggcaatttcaacagcaaatcgggcaaaacaatttgatccaagaggaaggcgaccaattcgtaatgagaatgggaaagtaaggcatgggaaggaaaaaacacattcagaaatggctaacatttggtggccaattgccacaaccgcaacccgtggtcattacgagacaacagcaaattgagcagagaagggcaattaaggaggagatgggcggagaggacagaaaagggggcgccgagggggcaaacacggcgggaacggacagaacggcacaaccgcagcaaacagcgggcgaggaacagaaagcggcggaaagcggcagtgccggactaaccgcaacggaaacaacgaacgaaggcggcgaccagcagagggtgacgggggttccgctgatcactgtgggattgacaaaagccgaggagggcgccaaagaagtgagtgatggcgtaaaggaatggaaaagcatcggcactgactacgccttagaaaaatattttgaatcgaacaccgaccaatgcccaaaattcgacgattgataatcctttgcaaatgttattttcgattagcagttgtcgtcgcaaactctggccacggttggaggcgcggaggacgagctgaaaaaatcagcggaaacgaaagcaacggaaatggtggcagaaagtggtaagtgcgacaacgccggagaaaagacagacgaaggaacgactggggccacagaagaacagcaaaaggcacaatttgggacggaaatgcccgaattggaacagacaaaaacggaggtaatcccttaacaatgtcagatgaacaaaagggaaaagtgtgttcattgtcagcagaatgagcagcaacaaattgagagagacggcgggacggaacgccaaacggaaaagaaagaagaaaacgatgggacgaaagccaacccaacgggggaagagcagcagctgaacagccaactcacagcactgaaagggatcggcgaaatgggaggtcagagagtggaactgaacacgggagacgacagcgaggaacaagagcaacaagcgatactccggcgattgtacagcaaatacgggtcgaatgcgaggtaaaggcggacaatggcaaaagccatgccgatccaatttcgaggccgcgtttgtgcttctaacagggatttgcttcaacgagtggagaatttgctgttgttagccgaagatggaatatcggcaaaaaagacggtgaacgaacccaatgatagcggaaaaagccaaaaaatgaagagaaggcaagcggaggaggacaaagggctgatcagaaaatatttggagcaactcatggacagtgagacgggaagaaataaaaccaaataaaagacaataatgtacataattatagattgtatgaaaatatctatttataaatttaaagttaaatttgggaattagtgcaacgaatgattgggtgaaaaggaaataatgtcaatcaaagagtggctgtgattatggaaaggaaacaaaaacagttaaatgggagggcgattaagaagaattggttgtaaaaatcaaagctagtgaggtccatagggtttttgtgattggagtggtattagacacacaaaagcagaatgaagaaaggtcccaaattccaaattttacaacattaattcagtccaagaaaaagtcctcacaaagtccacgcaaaaggctcttcaccatccnattctgcatngtcgacgggatgtaagactctctganaatgcgtccatccttgtgctaaacagtgttt

SEQ ID NO: 3291 - DNA, 1685 bp, Heterodera glycines
ccccccccccctgcttacttgagatatgcgaattccctcctcgccgagtgcttcgcttcgggttagcacaatcattttgttcagcatctgatgtttgaaaatgaaagaacccctagaaaaagcgaattaatgccaaaacattggaaaaggaggcaacagactcgtcctgccgactgttgcaatgcagagaaagacgacggccgagtgaatgcagaaattggacttcgtgaaaaagggaaaagaccgggcgcggagtttcgttgttcatggaaaggggcgagttgtttgtgagagtacgatcggaggaagtgtgagaggacaagtcgaaagtgagcactgaagaagccggcgtctcgtcgtaactttgtccatggtccgacggagtggaggaagtggggaaaaagatggtcccattttggtccacgtgttgcgcgacgaggggatcagtggcggtggtcagcgaagaaccgaaagacgtgacggaagccgaactctgacgaaaaacagaaataaacgcgcaaaagtggtgatgagtgaaaaccgtcggagagggactttgtccatcggagtccgtgtcattcgaagttggccaagtggagacggattgcgacggattgatgtaacagttaattgcctgaattttgactccagatgactcctattaggcaataaggatttgcaaggttcgtggttaaggaaggacctacgcacttttggacgaacattccttccttttggggcatttgtttctgtcagtgaaggccctttggctaatgaagaacagctaaatgaatgattgaaaaatgagtactccgtgcaaagtttaaaaggcccgacttgtccgttttgtcttcgaaatcggcggctgtcattccaaggccaaaacggggtttggctggtggaaagcgactttccaaaggctgtgggaaaatcaaactcttctctccgaatgtttttttgttttcacagcaaacctttcgaaactttcttcccattgtgggcactgcgtttgtggcgactccaaccgggggaatttcgctgggaagaacaccacgccgaatttgtagctgccgcatgaaattcgcttttaggttaagccgcctctgtgctgaatttaaaaacgataatttgtaaaactgaattgtcgcttaccaatactttcttcagtggcaatgtctttcatttatttaaattcctttgtttgcttccagcttaatgttaattagttttgtggtttaggccgaaaacgaaatgaattaaattttgttaaagtattaaaaaaagcttttggacttttgtgcttacctaattcatttcgccaattttatgtttgtttcgccatttttagcgtttatttttattttcgaaaaattccttaacaaatgcaataaaaatgaaaaatacgcctctaatttgtaagaatagaccggaaatttcaaaaataaattaaaaaagaatttctcaaaattaatcccctaaactttttttcttggtaaaaaaatttttgattttacaaattattctaatttcaaaaaatttagaaatatttaaattaaattggactgatcactagagctcggataaaaaggcaccaaaaatcgtgaaacaggcactataataggcacccaaaaattgaaaaaaaggcatgaaaaggcacgaaaatcgcgaaaaaggcatgaaaaaag

SEQ ID NO: 3292 - DNA, 6430 bp, Heterodera glycines
gtggggctgcgccgcgtggaagggtagacagtaaacagccgtgtgctcgctgtgcagcagcattgtgtgtgggaaaagggaagaggtgagaaaaataaagaaggaaatagtgcactgtctgactgtctggttacgcttttgaaaaatttgacccaaaaccgggacccaaactgaatgaggtaccctaaattttcccaaacatgtaaaatgtgttgagtgttcatccaaatttttcaaccaaaattccccatttctcgcttctttacaattagatttgggtaaattgcttatttctataccattattcgacttcaaacagagtttattaacgacatggtaattttaaacaaaataaaagacaaaattctccgcttttagccaggcaatgaaacaattcgaggccatttggaaaaacggaaggattggatccgacggacgagggaccatcaggaaaagtcggcggatatcaaaaagttgaagagaagcgcacgggaacggaaccccgacgaattccattttcatatgttgcggagtcaaatcggagtgagttggccattaaaaaaatgccaaaggatttggaaattgaatttccattttggcatcccttttttgttagtttgttatgttaataatagggttgggctcccgaccgtcggggttggaaaagtcggggtcagcaagttcgggggcccaaccctagttaataattcaaattgagtttgatggaacacatcgcgacttagagacggaagaggaggagaaaagcgaagcgcaacgccttttgagcgatgtcagcgatattaatttcgtacaattcaaattgggcatggaacgaaaagttagcaaagataaatttgtagtaaaaattttgttttttagaaaattgaaaaattgaaagcggtgctccacttttgtgatgagacggaaaaaccacagaacaaacacataatattcgcggaggacgaagaagaaggtaaagggaaaagggaggaaccgaaggggcggaaggacgaacaaattcagcacgcaatttcgaccctcggcaatatttcaacacttccgaacaattcttggcacggactttcaatagaccaatcgaaggcgacgcgcggaaaagcctcagcgtaacggagaaacgaaaattaaaagttagcgcgggtggggaataaaacgataattaaacactggtggaatgctgtcaaggaaacagagaaggagcgacgccgtccttacgccgaactttgcaaacgcatggaaagggaacgcgaactgacggtggtgttgcaaaagttggaactgaagagagatttggcactgtcaaaaaagtctgagttaaagccgaaactgatcaaaaaaggagacgcacggagggcagccatttacaaatggcagtacgaaaggaagaaatgagttgataaggaggaaggcaaagtgtactgggattgaaaaattattgtttatttgaacacgttgtttttgtctatggaatatatttatgcactcttttggaacggacaatgacttgggttggttttaagttggggatggtccttcgtctattttgcttcctctttctctctctccatgtcatcctctaaggtctgcgttcgttactcggaaatggtaaaagtccatcgcggtgatcgaaacgttccaaccggcgcttgtggcggcaacgaagaaaatgaaaaggaaagtgattgggtagaggaagaattgcgtgtttttcagcgtgggaagtgctgaaaacaaacattgttaaatatatttcaattgatcattaaaatacaaccggtatagccgaggaaagtaatgtaattataataaatggtggcaatgcaccaaatggaattgccaaaaaagcgggcgagaaaattttggtaatcaaccaatcctaaaaaatattttgttcaaaaaaagaaaaaaaagagggaccgtagaaaagcaaaggtaaaatgacgtggagaagaatgagcaacgggaaaaaagcattcaaatggacatcgaagcaataggcccactcgaccacgtcgcaatccctcgtccgacgcaaaaagcgatttgaaatgaacctaaaaagggagggacacaaaaatatgtgaaatcggagagtaaatatcgcaaaatagcgaccaaagtgcggttgcaatggcaatgccaattccgatgcaatcgatgaacacaacccaaaggaaaaaggcgcaaaacgaagaaaaggacaaattgagcgctaatgcaaacagaacactcgagccgagcagagaaagtgccaaaaggaggagaaaggcggggtcatcgcgggcccattgatctttggcttctgaacgaaattagaaattaattgagagggacaacaaactttttctgtacatgaaattcctgtacaccttttgcggattgaccagcaggtaaagcatttgccaagcagcgaattcaaagtccatctgtcggacgtgcaccaaacggcggaagaaacggctgagttttgccgctgcggtcattttaacggcggaaaaacaaccgacgtttgaggacgaactgcgaaaggagagaatgatttaacatgaaataaataacacattgaaagcaataagcttattgtaattaacataaactaaagcgacgcaaccgaaaaatatgccaaaacgaacgcacaatctgctggtgcctgaagtgattgagccgggggtggaacatccgcttctgttccaataataatccttcctcaaacctcccgaaaacgaagtggacggagactgatagccggctgaatggttaaaatatgttttagtttaattaccaatttctttcttttttctacctcttggaacaaagcttttcttatggctatcggcgaagctcattcaaatttcatcaaacgtggaataaaaggataataattaaatgaaaggaacaaagtaatataaaagaaaaggaagtgaacgaattattaccagccaaacaaaagccaaatattgaacaatactctcctaaaagttttagcctcagctaatgttactaagaaaactcatcgacagaatcatatgatgaaatcatagataaaatcgtgattttatattttgaagctagttcttgatcagcgcctagattaatctagaaaagttaaaaaagttaaaccaaatataaccaatcaactaatgtatgcaaagtattcatgtaggaatgcatcaaagaacatcagacaaagtgtaagggcttctcgacgtatttccctcatttacttattcccattagccattattagttcaatgtttttttcaaacatgttttccctttcctttctaagagcactggtttgggtggtgagccgattgctatacctgaggtcgagggttcgattcaatcctaggtatatatttttctctcttattgtttttctttggcggcgatttagataagtcaaataaattggactccatacccgactttccagaaaccctgatcccgttcatcccaaatttctatgtctagtgagattttgtccatttctatttaatcaattaggtatgggtgtcatttgatcacagtgaaatatcgcgttggttcataaaacacatgtagagactgcttcaactttaatgacttctattaaaaagagaatcgacaacaataacatttgaaacagttcattgagtccgtagtctgtttgtgtaatttgctttcactccgttgtaaagcccaaccgcaagtccgacgttagcccccaaaaagaggcttatcattacagtttgcaagaaccgaagtgagatcatccgaatggaacgaggaccggccaaagcatttgtcaaaccaatggcactgccgacgataagaccatatctgaaaaggataaagcatgatcagaataaccgacttgaaaatgtataactctactttaagccttttttagtcgtttttggcacttctccgcggaactctctgaacaaattattcgtctcttcgagactcactggcaaaagcatgctgcgcttatatctcagcaaaacttcttccattcgtttcctttcccaggcggcttttcatccttctcggcctgttgtaatttccgttgttcgttattttgtactaaaattcaatgctccattaatttttgttggttgtcgacgaaccatcacagtcaataagtcgcaaaaactccgcagtttctctctcccttttcagttcgtccgccatcatttttgctgtttaaatttgcttcgatttcattaaaaaaggcacgaaatgggaagagaagagaagagtattgaccaaaacaattggggaagaaattccaatgaaaaaatgtaattttattcaaacaaaaaaggagaaatgttgtatcactcacaattaaacaacacacatttggaggattcggtgcaacacgaggggattcagtccgtccttcgaaaggccatccgaagggtcgacgtgtcggacggtgttctgttttttggtaaataatgaataaattttaaagatgctaacaaaccgttgccggatcgaattcatcgtacagtttgaagggtccattaacacaacaaaaattggaccgctgattattgaagcctaaaaacaatttcgacatggacaaattcattagtttgataggttctgtccattcaccttcaacatcaatgttaattgcaagagtgttgagttgaccgagagcgaaataaaacaattgcaagccgtcagaaagtatcaattgggaactcaacggggcgacaatttctgtgtattgagtgtgtcctaaaaatgtgtaattccgaaaatcttgacgcacattttaaatgccaaactaaccaagacaatgcgcttgtccattcaaccaattgaagagagatacgaccgccgttgcggccaaacattctctgagcacttcctttcgctcatgttccgtgtcgcaacgccaatgagtgtccagacgagtgatcagcggagtaatgtccttgatagccaaccgaccgtacttatgcgtttcacctaaaaatacgaacggagtgaaaataagcacagataaagtttaaaattcaggtcttattgttggaaatgggggctttattttacacaaaagtggatagtccgaatgaattgaatgtgcaggttctgctgcagagcgatgatccacgagtcaggatgccgggagtcttaaaccgataggaaacataaatgaatttgtggaaagacaaaatcacacaaaaaagcacagaccattgccgaaagcacaaaacgagcccttcggcactcactttgatttcgattccgtaattacgcgccgtttccgacgggtaaacgctttcgcactccttcaggtcgatggacaaaagtgcttcgaaaagtacctttttttgcaccattgtttgttgtcattttgggctcacattttcaaaaaatcatggttcaattggtgccgataggcgtcgccgggaaaaaatgggcaattttatatttttaaaaataaaatttttacactttccaaaataaaatacgcaaataaaaacaaaaataaaaaaatgtacaaaacggtgtttttaatacccgtcgataacatctcctttctcgaaccaaatcctaacttcacgttcatattcttcgacggagtcggacgcatggcacacggtgtcccttctgcgtcccaaaatgacggaatttgcgtatgttgcccgaatcgttcccactggtggcacacgcacatcagcacctaagattctgcgaacggatgaaatcgcgtccggtcctaaaccagatgattgatagaaaaataagtatttgggcagttgattaccctcaagtgcaactgcgataacagcgccggacgtcatgtacgcaatcagttctggttgtgctccaggataatgatggcggatcgtccttgccctcggttgaaccacctcaaataccaatttgttttcaaattttttaaatttttaattaaaccatttgcattccaacgatgcgaaaaaaaggcggttcctccaagcgcttcaaaatgtctgtggctgctttttggaggacgctttcgggtttaatcagaaccaatgtgcgttgcatcacgacaggatagcagccttcgacgtgatttctcgtaacacgtgaacggttggcgcttatggacaccgaaccatcgcaaccgaggcgggcattcaaacagctcccgtgtttgaaattgcgtgttattttcgtcacataatacatacgttcgtcgaaaaaaatatactcctcgccagctatagttttatcaaacattgccatttctgctaaaagaaatatacaaattaggtattcaaaaagttcattggaatgaagggttggatttcagaggtggagcacggacagaaaatccatcggaatggctgagggggctaaagcccccccccccccccgccccatgcacatatgatgccggtaccgactccgttctccagca

SEQ ID NO: 3293 - DNA, 1862 bp, Heterodera glycines
  unsure (1)..(1862): unsure at all n locations
ccccccccnncccgaaacccaaaaaagtaaaaaaatagtaatttttttcaaattttaagcaattttcttaacaaatttgctttaaaatactcaaaaattttcccgacggcgcctatcggcaccgccggaccccattttaccatatttttgaaaaatggtggccaaaatggcaaaaaaagtagtagtaattttttgacgaaaaacggtgaaaatttttgtaaaatacaccccctaattcgggatttttgaaatttagaaaaacagatttttaaatattggtagtgaaattattctgactacatattctgatacatatttatgttcaattaaacatacaattgttgactttgacatggtgtaattttccatttgatttttcaaatcccttccctttttcagagttatccgtacactttccaattttgtgtgttatgccaaaagaatgtccacagcagtaagaatcgcttcctcccaccgccttcaccgaattttcgtccaatttaggcaaattgccctgtcacattcgccagtgccatgtcggcaaaccgatgttccaatgtccggtgtgcgatttcacttcgacttactcgaaaaacaatgtgaaaagtcacatggtttcgcttcacggattggcggtaacattctccaaagaacaatccttcagcagatacagccaatttaagggggatcccatcagttacatggaccaatacgcaacacaagtggaggagttcatgaagcagtgcttcccaaatgtccggggtcggtatgatacattaaaacctcaaacttgaggggtcatttcatttgactggacgaattatgtccattctttttaatgaccctcaatttttaaggccgtggacgtcctcttcacgggcgacagtcaccgaatgccaaaaaccaattgaccatcacttcgactgttgtgagttcgacacggccgaagccaactgttgcgccagggaacggaaccatcgctccgatggcattcggtcagtcgcaaagccaacagagacatttctctcctccgttggcggggccttcgccgcagcaacggatcggcggacgaccgcaaaaggcgaccacaaaaagcacaaattgtcaacaaacggcggacggacagccgacggtgagaaaggcaaagagagaagggaaagaatgaacgaacaaaccgttacaattcgtcgctttctttcgttcattttgcaatttgaaatctgtccatttcccttttcagatggccattggtcgtacggattccctttgccttccccccttctccaccaattcaactgcaaacgatgccaacactttgcttccattcggtgtcactgatttttatggagcagccatgggaatgctgaagacgacgcagggccacagaacgcccacatcactgctgtccagcagagacggcggtggggcagaaggaaatttgcccaattttggcaggggaagcggcgcgtcgtttgggccgatccttcagagggacagcgggtcgacttttggatttatttccgattttattttttgcctttcattcattccattatttaaggtttctgtccgccttcaatcccttcctttatctgcaacaaatcaacaatttgttcgccgttaattctgtgaatccgaacgcacattcgcagcaaatggccatggaaacattgggaggcggcgaagaacggaacaaaatggaggtgaacggaagcgaccaaaatgacgtcaatttttaaatttgggtttcgttgtcttagactgaaatggacgtgtcagttggagaagaatcgcctcatcagcaacggtttctggaagaatgtctgaatttgagtcaaatttctgaaggagatgagtaaaga

SEQ ID NO: 3294 - DNA, 1167 bp, Heterodera glycines
ttattcatttagtccgcttttccagtgaaaaatccactcttccgctttttccatattaaattctcgatttaatggtgccgcgtttaaaaaatcaatagattatttcggtgattaaatcacgaaaacatcaagtcggggatcagaagaacctttgaaaggctgctgtgctccaaactccaccacgatttgaaattggaaaatacttaagggattagggaatgggataaccaccggatttaaattttatgacaaagggcaatttgccccactgaaatccccatgggaccattcttaaatggcaatttcaatattaataagtgaaaagattactgaacaacaatttaaatctattattagccttctattttaatattaatttatcttttaatacatatttttatccattaaacaaattatgagtaaaaatgctaaatttgtttatgattttaaaaaaatataatttagtcttaaattaaataatttcatttaaatatctaaattttttaaatattctcaggattgcgaaaatttcaatatctttataattttaggttagtaataaatcataaaaatgttttagataggaaaaataactaactttttattaatttatttttttcatttattttttagtttaatattttaagaaatactttactttacctttactttaataatctttgttctttcgtttaaattcttgtcccagtgcttacaattgtagaagaaaagattgtatcatggctaattgtattaaaaaataaattagttaattaatatttttccatatttatttgtaatttttgattacaattatgaattaaaacaatatctaattagtcgaaaatataataaattttattatgctttcgccatcctcgcaagcatcttttctcgtttgttctttttgcatattatttttttttcttaatgatgaatttttaatgaaactttaaggcattaccctttgacgaatccgaaagaatttttttgcggcaaccaatccctgaagagttacagacccgggactgaattggccaaatgcctttgggactgaaccgtccaaaacatatgaaattgcgacaaaatatatactaatcgattcctctcggcataccaaccacgaatctgaaagaatttttgagcaacaaaagaaattgaaaaagt

SEQ ID NO: 3295 - DNA, 2515 bp, Heterodera glycines
aaataaactagattaaaatgaacatttctaaaatattcttccaagatgatttgtgataatagaatcatcaaaatattgtataaattatttaaataaattatttatacgcacataaattctcgtaaatgaaaatttcatttgggtctgattccttcaatttaaaaaacgcaattaacgagtaaattgaattaaaaacaattaataaaatggataaaataaaataaataaattaatgaaaatatattctgaatgtgtaagagacacaatatattaaaatataatatagatcaaaaagcaagaagaaacacaagctgctcaagaacaatttgagagaaacgtgagacttcaactgcgcgattcgccgcgctttcacaatgggttagcttcatccgttttggtgccaccgcgccaactgttttgggaaacggaatgcgtgatgtacaccagattgaataatgatgactaatatattaacataatacagaaaaaataaataacgcaatcttgcgtttctctagcaaagacatatactggtgcatcggtcgggagaagtatttaaaagttaattaaattaaaccaaaagaaaatgtttattaaaaaacaaccaaaaaaatcataattatgaatggaaacatagtaaatttaaaaagattacaaaaactaagaactgacgttgcgaggaattcgaaataattgcgattactcacaagagataattaaataatatttaaaaaatattattataaattatcaactatcaaaatcacttaatttgcaaagatttaaataaaacaattttataaaatttttctaaattattataaatatttattaattaaattacataaagacaaaaaatattttaagttttattttgtcaattttttctttaatattgtcgtagtaaatattattgtgaaacgaccctaacctaacataaagaagagtgtctcgaaataataaaatttttaacctttcatgcaaaataagaataaaaaacaaagccgaaaagcataaaaatcatataaaatttctatttaccgatgataattaaaattatattttttttattgaaaacaactaaaaaccatcactaagaattaaaataaaataagaaattaaaaaaactacggcaataaactcggacatttgttcaatagggccaaaaaatttaaaattattaaaattgcattttttaaatatctttaaacaaataattaagaaaatattttgctgagttaatattgtatcacgggtttttctatttatgcaaaaaataagctcgaaataaagatacaaatactgaacaaactttttatgaccatgtttcaattcggttttactgtgttcgagacaatttttttagaaaaaatatttgaataaagaacattatcttttgcttaaaaattgttaccttcacaaagttgtcaaaaaataatgacagtttgtaaaaacgttaataaattacaaaagtgaataaactaatgctttaaattatccacattaaattgcatttatttaatagataaataaataattgaaatttttgagggaaaaatttaattaaccaaatctgtatgaaaaccgagcaccaaatgcacataatgcaatactaaaataagtttaaaaatataaatttactccaataaagagtaatatttaataaaactggaataaaaattaactgtaatttcgaagtgaaaatgctatcagaaagcaagcaaagaaaaagaattatctttgcctttgcaccataaaaatgccgaattctttgggcagtgtgggcatgtagactttattaaaatttaaaaatattcataaatttgttaaaacaatatttaaaattgaaaaagtgaaccggaaaattctatcacaattaattaaaatactattttttattgaaatttaagtttattattgttttataaatttacgtggaggaaaaaacttagttttaaatgtcagctacgaattatgctgaaaatttaaaaaatgattacgcaagtttggatgtcgcttaaatttgaaattaatccgctgtttagtgaatgttttttatatataattagaaattcatttcaaaaaacaataacaaacaaaatattttaaaattaaaacgttttgcaaagaatattttattaaattaaaaattaatccgctgtttagtgaatgttttttatatataattagaaattcatttcaaaaaacaataacaaacaaaatattttaaaaataaaacgttttgcaaagaatattttattaaattaaaaattaatccgctgtttagtgaatgttttttatatataattagaaattcatttcaaaaaacaataacaaacaaaatggctttcactaacaactgaaataggcgacgggtccctccccaaaaatcccagcggcggcatttgaatatgctctttatttcagtaatgtgcgcacaatacaattatatatgatgagtaaatgtgggaatggggaagggactcccagttcggtctcgggataattaggggag

SEQ ID NO: 3296 - DNA, 5168 bp, Heterodera glycines
aaccctttctgggcctgatcgctcagttcgcgctccttttctcggattacgaggagcgtgtccatcaccacacgtgcttccttcgtgttttggtccatctctgcgcatcgacgcattttttcgccaaatttcgaacttggctcatcgggtaacgccggaggctccagctcactccaaactcgctttttggagcttactgtgactcctacttgacccgtctttcggttcatctctctcatttctgccacgtctttttttgcctgattatacagcgttgattcccaaaaagccatgcgctcacttgttaccttcgggtttaggaacaattcctgttctcgttcctgttcccgttcttctgtagagtccacgattgacacgacttcttctccgaccgtcaccgcacttgcgcttcgtttttcttcctccgcctttttcctaggcacttccctcttctccttcttttcctcctttttgttttccttcattcctttctcttccttcttttccttcttttcctccttttcttccttttctctccactcgtccattagtggtgctacttggtcttcgtcctccaccggcattttcgacccctcactttcagccaaacttttccgaaccgctaacaactgcgattgtagcgatttttccagtgatttgagaacgtgctcttcgtcttttgtcaagagttccatttctgtatgatcaattgttttaaaaaaagaatggctctcgtaagtaactccatttaatttgctggactcgtttaatctgccttttttgttcatattttccactttgtctaaaaattgcttatcattattctccatttctcccatttcttcatttcgcccgctatttatgatatttatacccattctgaactcgttttggtcgtcataattttctttttcacttatgaaaatttctggaatccggtttatttcgtacattactccatttattcccgaaattatttcccaatatgattcccgttcattttctgtttttaatgaccatttttccgcaaaaagaaattgaacttccatgcccaaaacgattctgtcagttatactgctaatatgcatttcaaaattttcaccaaaaatccaacacatcacgtatctctcgccctcttggttcctataaatttcccaattctcatcaacttggttttcaggaactgacgaagtaaggggaattatggtgggatttaaccaccctgtgcatgccgtaactattgtaccattcaacacaatgtctaacaaagttggtgtctcatcattttcaaacacaaaatttctgttctcaaagaaaatttcgggaccctcatcgtcacttatatcttcctgattttggacaaaagcaatagtactaccattctcctcctcttcactgctttcaaaactaaattttgaaaattttttgctcttgccaatcatttcctcactcattgctttctctttacttaagacaatctcgaatccttcctcttcactttcttctgcttcttcctgttccaaatttggatcatctacatatttttcccaatttatcggttcatctgcctctcgcaaaggtaaagttgctggaccatggaatttcttcactttttcttgatgtactcttttaaattttccctttccatctaaggtctgtaaaatcaaattttttcgctctgtctcaattccaacacacctcaatggtcccatccacttctgatcaaatttatgtttcatcacttcctttttaaccaaaactaaatccccaatttcgaattctctttctgtggccctccttatggcatcatttccctctttatttctttcctgtgctttcacaatctcagttctcacgatttcccaagctttcgctgccttttccacatgtgtacgggtatagaccgacacatcagacaaaagttcgtcagaagagggcaattttaacaattgatccgtcggtaaacgaggattacgcaaatgaataacaaaaaatggtgaattttttgttgccgtattaatcgaggtgttataagcaaaaattgccccttgcaaaatctcatcccaattatctcctccttcgttaatgctctgagaaattatgttagccacgattcgcattgatccctctgctaacccattactctgttgatgatatgccgtactcatattgtgctcaaaaccgtaaatcttgctcaaattttcaaacaattgagacgtaaattgtctcccttggtctgtgacaacgatttctggggttccatgctgatgtatgaccatctcgacaaatgaatttgcaatagtctctgccttctgatcggaaatggcctttgtcataatccattttgaaaagctgtcgattgccaaaagaatgtaagaattttcattttttgtttttttcagtgggcccataatatcacaatgtactcgctgaaaaggtccttctgtcggttttatcggaatatttggtgccgcttttgcctgtccgggttggactttccttttctgacaaccctcgcatgtttcggtcaacaaactcacatcatccttcattccaacccaataaaatctgcttttaatctcaggccaagtcttatcaaacccaaaatgtccctgatcatgaattaaatggaaaattttctcccttaacgagtatggtatgaccaatttcggtttttctgagttacttttacctctcttatagtaaatcgcgccatttactaagtcataatcttgaatgactctcttccattttaaaacattctcagggaatttgcccgtttttaaaatgtaataaatttttgccaattccttcacttttctctgtgcttcaattatttcctttaaagaaattgcctcttcttgtactcctatctgttcattttccttagtttgcttttccgccttatcctcggtactcagaattttcttattttggctatttatttcctcctctcctccactgtcaattcccggaacattataccttgataaaaagtctgccgccttatttttctttccaggacgaaagattatctcaatgtcgaaactttgcaaagtaatctgatacttttctagtcttcatttcaactccttcgctttcattattcccgtcagagcactacaatctgtgatgatcttacttattcctgatcccacaatataaggtgaaaattctttcactgaatagactactgccaaagcttctcgctcaatcgatgggtaattagtctcatgccgatttaatgcgcgggaaacaaacgcgacaggccccttttcttggagaagtacagctccaattgccttctttgacgcatcacattcaattgtgaatggtctcccaaaccttggcgattgcaaaactggtgctgtggtcaacatttccttcaaaatttttaacgcattttcttgctctggtccccaattttcttcaatttttccttcgaatttatcctgagttagagtctgtaatggacgtgcgatatgcgcaaaatttctcaaaaatcgccggaaatatgttaaagcccccagcaatgattttaattctgttagacttttgggggcccgaaaattttgaactacttgtacctgcctcgggtccattcggacgcctttctcacttaacaaaaacccgaggtaacgaatctcagcttttccccaatggcatttctcaattttcagtttcaatccgacttcctttaaaagtctcaaaaaattctcaatgtctaccaaatgaatttcctccgtttcactcccaatgattatgtcgtccaaataaattaacattgctgctgtcaatcgtcttctcaacgaattcattaccctctgaaatgtgtccggtgctgccgttaaaccaaaaggcatcgtgataaattcataaatgcccaaatgagaaataaaagctgtcttttcaatgtcctcctttgccatggggatttgcataaacccttgctgcatgtccatgcatgtgtaatattttttggctcccattaaatccaaaagctcttgaatatttggaagatgaaaaactctctttttggtcattttatttaacgccctgtaatcaaccgcaaatctccatgattttttgtccgctttcgggaccatcacaataggagaagcgaactcggattccgactcacgaataatattctggtcaagcatcattttaatttgtctctcaatttctttctgagtctctggggggtaccgataaggtctaaaatggaatggtaacgccccgggcgtcaaatcgattttgtgaacaattggaccattgtaacgaccaattttcccgtcatcaccgacaaatgcatcggaatatttgtccacaatttgctttaattctcgctgtgccttttcacttagtctggtctcttccaaatctattctttctgaaggaggccgattcatgtcatttacgggtaatttaggcaaattttcactccaccgagtttcaggtggaataaaatctttagccgcaatctcatcgccaggtaatgcattaatttgtaatggctccaaatctgccaaatgtgagttcccgtaaattttaattggtgcgtttcccgcattcataagtcttattatcacttctttggtcgcgcctggggcaaccaatgtccttccaatgataatcccagggtactgatgctgtataccccttaccaagaaattttgtccagttggaaaaatttcatcaattctcgcattaagaatattttccgtccgtggttcaaacgtgtcattttttggtaaaattactctcggtagttttggtggttctgtgcctatcactgatactatgcttgtccaaatttcacccaaccgaactttcttttccccaagtgcaataactcctttcaaatccataagaaaaggtaaaccaagcaatactggtccaggacagtgcttgtcgggtgaaacaagcagtgtcgcttcccattctccaaatttacccgtcactgagtcttcaattcgaattttcgcttttattttcccaacaatttttatgtttgaatcatttgctgcggtcagttctgaattttctccctctaactccaaaattttcagtcccgctctgtgtactatattttcccgacagtaagagacgcaggcacaagaatcgaaaagtgccgaagtcaaaagtccatttaaatgaattcgaat

SEQ ID NO: 3297 - DNA, 5756 bp, Heterodera glycines
atttagtgatgacgtcattgacaacgacgacttgcttcttacggtggtggagcacatcgcgccatccgcgtctcctttccgcagattgaccgtaacgtccaggccgacctcttcacccgggaggcccacaaggactaccggcccttctacgctaagggacgcgtccgccctgggatgcaaacgcgcccatttgggtacgtcgaagatgctccacagccaatggatgtcgaacagcagcccccgccaccgccaacagaacgccgaaagaggactttgattgaagccgatcccaccaagccgggtcactcgcgatggttttaattttttttacattgtgtttttattcgttttttttttgttacgagaaaataaaatttaccgaaaataattaggaacaattttagacaagtaatcaaatgaattttttaaattttctacatttttcaccccagtaagaataacttttccggaaatgtaaatgagacacgtggctccattatctaatttgcaccgaagggctgggaagatcgtaggatcatagatgccacccagagattgttgtagtttctccactcgaattctttggtcaaacgttaaaactccaacaatgttgaccacacgtagctcatagattgtcatcgttctgcattgcgtgtattcaattcgtcgtagaacccttgctgcaaacttttgggcttgatcagggtgtggaactccagtgaggacgacacgtgccgattgaaatatgagtgcagccacagtttttgctccatatcggattcgcatgatgattgcgtggaaacggcgtggattatattctgtattaattccacgttgtgcaatagccaaaaactgttgcgtgttcaaggaatttattttaaaaataacagtacagttagaaattttcatctaaattaaaatggacaaaaattttacgcaacaaatttattttaaaaacaacaacaattaaatattgaaaaacatctaaaacataatagtgagaatttcaagcgggaaaaaggttttgtgatcaccgcctccaaattctacgacacacggcaagtttggatgatgcaaacggattccatgttttatgtagtaatgcattcgtacctaaaatctttaattatgtccaccaaattgccaaaaagtaccgtaattcccaagaagccgcggtaggccgggactgagtgggcgtcgagaatggagaggtcgttacagcgcaccgggaaatttcgaacaaaagggcgcaggtgggcggtccgcagttgagcagagcgcaagtgctcgacaatgtctcggcgcttctccaagtttcggaacaacacgtgcagctcatgcgcgctacagttgaagcgcttgcataagtgctcgacgagcgggatcgggcgcgggcgttctgcacaagcacaagtctttggggtacctaaattaaccaatttgtttaaaaaaaaaaaaaaaaaaaaactgaatacttgctcttggcggctcatcataaattggggtgaacgggtcctgcttctgctcttcgtcaatgaggctgatccagctaggctccttcgtctcctcctcatcctcctggtcttttttcggcgtttcattgttatggtcctgctggtccttttttgtcgtttccttattatggtcctgctggtccatttcgggataagcgttgtttatccaatcggtagcaagaattaaatccatttaaaaaattaatctgtaatgaaatctatatatatatataaatgaaatctatatatatatatatatatatatatatatatatatatatatatatattaaatatcaacgcgcaataaaaaaaaaatggattcgtttccaagctttgaacacgtggacttgcaatttcgtcatccattcacaatgattgtatctgggagtacatgcagtgggaagtcagagtgggtaatgagtcttctacgcaatttagagaaaatgatctctacccccattgagcgcgttatttatggctacggagagttgaacactaatgttttgaatttgcaacgcactggaaaaattggcaaattgccagtaactgtgcacagcggggtcccatctgcggaacaggtacgcgattgcgccaaaaaagaaaaactcttgctaatattggatgatttggtagtggggatgagtcaacagtatttggactcgcttttcacacgcggctcacacaattggggcgtgagcgtaattttggtgacccaacacctgttcaacaaagagttgcgcgtcgctcgcacaaattcacattatttggtattaatgcgaaacccagcgggtgctcttcagatccgtacaatagccacccacctcttcccgtcaatgaccgcccactttatgcaagcctatcgcaacgcatgcgcaaaaaattttggctaccttttggttgacatgcaccccgagagttcggaagagattcgccttagaacaaatatatatgaacaaaaacaaatagtttatatgccaaaatgaaagggtcgcaattgattgcaagaaatgaatcctttttggagacactgtctaattccaaaaaggcgaaaattgttattagagacgcatccgatgaacaactattatgcctggtagaaatttgtctcaacattctaaagggccgagttccattgcgtccacgtcatttaaagaagctgaaagctcacgcacagatgcttcgtcgtctcgcccgcacacgttgttctcgctctgccaaaaacgttttgctacagcacggagacggcctcccagccattgtagggctcattgcatcgattgcccttccgcttattgcgaacgtcattgaaaattatacatagtgcttgataaagtttaaaaaaaaaagtaaaatgcaacatacaaagcgctatttgttggtccccgaagagatttatcagagtttggcaacactgtcaccgtctgacggttcaccaattgggctggtccgtgccagaattaaacaaataaaaaatgatgacgccataaatgaggcggaaagagcagtcaaatatgagcaggaaattaagcgtctcaacaagctcaaaaaggacgaggatgaacgccctgtcggtgttaaattagaaaatttgagtgatgtggttgacgccatgccaaaaccattcaacattaaaagaccgattgttgtagctacgcgtcgccatctcaaggttgggcgtgcgcgaaaagaaaatgttgaacaattagaagatgatgatgatgatgaagatgattatgaaactccacgcgcgtcgagtacaaataaacgtcaacccacacaaatggaaatcttaaatttaatttataaaaacgcccaatctcttggggtgtcggaggaaggacaggtcttgagagcgggtggacggccatttataaccagcagtgtcgatgatattgttagtcacctgctgaataaggacaagcgtggccaaaaagagccaacagcattcaaagaatttattgaaagggcaaagcagaatcgacaattaagtaggtatttatttcccgagggccaatccggcaaaggaatttataaaagcactttacttaagtttaaaccatccctatggatttgaaaaaatttcgtttgctcgagttcttgtacaaggacttaagttcgcctgtctcattcacgagcgttgaaccgcttctgaaagaggcgcgtaaaagtcaaccaaaaattaatagaattgatgtccaaaattatttagctacccaacgtacatacacactgcatcgccaggcaaaacggcgctaccgccgtttgccaaccttggcacccggcttgcatactgaatggcaggccgatttggctatttttgaccgaattactaaacaaaatcgtggctacaagtacttgctagtctgtattgatacccttagccgacaggtgtttgtcgaacccgtaaagaccaagacgagcgctaacatgatcaatgcctttgaacatatattcaaaaggtctaaatatattccttggaaggtgttaacggatcagggaaaggaattcactgcccgcgcagtgcaacagtttttccgcacaaaagacgttgaacacttttgtatgctcacttctccccaatttcatgccggaatggctgagcgtgcgaatcggagcatcaaagagcgactttatcgctactttacggagcataacacgtacaagtggataggtgttgtgcaagaccttgtttacgcaattaaccactcgcaaaattcgagcattggaatgtgcccagcagacgtgaactttaaaaacgcagaagcattgagacaaaaattacatgatgcagctgcaaatgttctccgacaccagccaaaataccgtgtgggggatcgtgtgcgcattgaaaagtataagcacgtgttccaaaagggttacctcccacgcttcagcaatgaactcttcacggtggtagaggtacactctgagcgttcaccagttgtctatcggttgcgtgatgacaataatgaaattattagtggttggttttacgcaaatgatttatgcaaaacgctagaaaacaaacagcaaaaaatgtatgaaattgaaaaaatattaaagaaaaagaggcagaacggtgtaaaatatgcacttgtgaaatggaaaggttacgatactcgcttcaatagttggattcccgcacactcaattagcgaaaaatctatataaaaagcagtttttaataaattttaacaaaaaatgccttcaaattctttttatgttgtccttccgtctaacaccaatatagaagggaataggacaaattctttccgagtgcgtttacctcgcaagttgcaattcaattcggaatgggaggtgggtcttgccgttattgtgtatccccactcttggccctccataggcactgtggagcaacaatttgttcagattgagtggcagacagggaatatggtgcggattgagcttccatcatcaaatgtcaccaacccccacgagcttagcaaaaatttatacaggctcctggctgagggaagtgatcccttggcaaaaaaggtacgctcaacacagaattctttcatgcttgcaacaaacaaggctcgccgctgggccagagaagagtacattaggcgaaaaacgaaagaaaaactgggcgtccgtgacgaagagctgctcctacaggccctaatgacagatactggaccattggttggtctcaacaccgtgacgcaaggccttctggcacgcgaaaagcatgccgaaacaagcaatatcgcgttgagaacaccaactgacgataacgattcgtaccagaaaaaattggatgactacttttctaaattaagtgagaaaaatttgagcattgttgatgaattgggtatgataaaattgaaagccgaaatcaaaaatttgacagaagaggaacgtgtgatcctcgaagccacaaaggaaatgggaacggaagcatggattcaagcctaccgtgagatacgtctagtctgccaatttaattatgacatcagtaggaatcgttttgttctgaacactgacccacggtacgttaaaaaggttgaaatctcccctcaacttgcttacattctcggcttcaacaacacagagtttacacagcccaaaaaggaggcaagattcatgccagacatgagcggcggtgtgtcatcctttcacgtttacactccagaccttattgaaccaatgatgattggcgacgtcacggccccaaaaatgcgcattgtaaccatacggggagaccccgaccaag

SEQ ID NO: 3298 - DNA, 3397 bp, Heterodera glycines
ttttaaataatgaacactttggaaattgacaaaatattggcaaacaacaacgtaactcgccactactatattggttgttttgcggcagaccaaataccaaccggtgtcattgtcaaatttccacactgtatggtagtgaatattgaccccagcacctcgcatggctctcattgggtatgcatttattgtccttctcctttgaatttggaatattatgactccttagggatgtggccaccgcccagtgttcacattgtggattatttgtctcgttgcaaacaaattcaatataactctctcccccttcagtctcccaactcaagtgcgtgtggtcgacatgtaattttctttttgtactgtcgatgtgttggagtgacctttgagaaaattgttagccttttgcactttggaaaactgcaacctgataagctcgtaaactattttgtaaaaagcataattttcaaagaatataaataatgaaaagaacgtcaaattttaattttttaaaaaatgcatgtagattttgatcctctacaagtggattggtccacattctcgtccgagtatgtgcaatttggtggatacaacatttaccggggattaccctatcagcgtggagcgggagttggcgcagtgttcaggagccttatgagatacttgctgccgataggaaagcaaattggctctgcaattggacgtcagggaatggaaagtggaaaccgcgtcctcaccaatgtgttggagggaaaagacctcaaagattcgctcgtcagtgagagtaaatcaggactaaaaaaccttcttgaaaaagcagccaacaacataaccactcagaagggccaaggttttgattttaagcgatacaaaaaagactcgactccaaaaattggaaaaattaggcgaaaaaatataaataaacttcagtcatcaatcgggccacctatggttgctaagaccaaaaataaacgtctgcgtattgactcattaggaacctactaaaaaaaaaaaatgacttgcccacaaaaaatcagtgacaacagtccactagcaattaacagtggtctgaatattttctcagttccacctaccaatgtgtctgttgttcgttcattctttcgtcaggtgcttccgctcgcaacaatcacgcaagaatcgccttacctatttcggctttacagtgacaatttgtggactgatttatctcggatatatctttatctcgaactgtccattgaaaaaccgggagcaaacgataaatgggttgcgatagaggacgcggatactagtgtctctgccattcaagggattggtcaaacatttgtccagcaactaaaagttacggttggcaacaccgaagtatacgatagcgggaacctatacccattcaaggcctatatcaccaatgagttaagctttccaataaatgccaagaaaaattttcttggttcaacagggtattatcacaccttaaaccaagatgacttaacagacgaggggttcaaagagcgttgtaaaatttttaagggtggtaaaaatgcgcaattcctctcccgtctcgactttgatttgggaaaccaagagctttatctcttaaataatttggacttgctcttcacaatttacaaggccaaagatgtctttcttttgcaaacattaaaagcaaatgatgcaacgaaatatcgtttggccgttcatgatgtcaagatttatgctaaaatggttgagttacaaccctcactaaatatgagcctttacaaaacacttgaaaaacaacccgccacgtacgctgtacgcaagacggaaatcaagtcttcattcatcagtgttggtcgatacgaatttgagtacaatgtattcagcgcgaccattcctcgacgcgtaataattgcgttggttggcaattcagcatttcatggtgactacaaactgagtcccttcatgtttgagccgtttgatttacgtgaaatttcaatacatgctggagggattgtctacccagctgttccttataaactaaatttttcaaaagatcactatgtctacgcctttgttgacatgtatgaggcactgggtatggctaattcggagcgttcatttgacatctcaatgacccagttcaaaaaagggtgggccttttttgtcatcccattgacatccacacttgacgacagctgtggatttgagctgttgagaagcggcacaacaaacgtacgagccacatttaattcaccaattccagttggtggtgtggagatgattgtcatgggagaatttgatcaaatgattatggttgattacaaccggcacattgtgaccgattcaaagcttggataaattataaataactttattattaaatttagtttaaaatgaataacactaatacaacgaagccagccatacaaattttgaattcacctgaagagcataatgaaacccttttgcatgtattacttttttctcattatatcattgcatttcctgtgtttttgcttttttggttcgctttaattaggtggcttaaaagccacggtcatctatcgcccagcgaagcagagacagtaatggaagagattaaaaaaatcccccgccagccaccaatatttttcgcagcaaaataatgcaaagaacatgactacggtagattaatgttttacggtagatgcgtgcgtacgcatccacatactcacgatattcaatgctccagaaatgcgtacgtccatcaacacatatttattcttgatgcctacgttgtctacatgactatggtagattaaggttttacggtagatgcgtgcgtacgcatcaacttactcacgatattcaacggtccagaaatcgtacatgcgtacgatgcctacggcagatgcatcgtacgcagaatcccattacggtatcatacatgagtacgatgcctacggcagatgcatcctacgcagaatcccattacggtatcatacatgcgtacggcagatgcatcgtacgcagaatcccattacggtatcatacatgcgtacaatgcctacggcagatgaatcttacgcagaatcccattacggtatcatacatgcgtacaatgcctacggcagatgcatcgtacgcagaacgcacgccacccaatggtaccgtatcaccacacgcacaccacctcaagggtaccgtattacatgcgtacgccatcccaatcgacgcgcacgccacccaaatgaccgatgcgtacgccatcttaatgtaatgcggccaggtgagtaccgccctcttcgatggacccctcccgttgagcgaaaaccttcgacgactccctccaaacgcagctgcggactcccaccgccgagcgcgcgggcagctccaccgacggacctcttccctccaaacaaaaaccttcgacggaccccct

SEQ ID NO: 3299 - DNA, 1717 bp, Heterodera glycines
ataatcacaattgtgctgccgacagtcccttgggcctcttcctgggttcattaaatcatcattaaaaccataatttatcgtcaattctactggggattaatggttaatttatggaaattgtacactttcatttacgcatcattagataagcaaaaagctttcttcttcaatgttatttaagcaaatactttttcactcattggcacggcattcctttgaattgaaatttcaaaaatttaataaccgacatttaaaattcataaaaaacgaatggaaaaagtaattagttcgttaattaaaacttttctgacagatgacttcattcggttcccccttatttttcgtcgtccttttttctgccttttttgttgccctctgcaacaatcagccaaatttgtggcaaaatgtccaagtaaattttgaattcgtaaatttatgtaaaaaataaatattttagggttcaaaattcggtgccatgagtgttggccgaagtccgttcagtgcgtacctttcacggggcagcatcaactgcggcacaaaatatctgatcacattgcgaaaactgaacacatttctcgcagtcattttattcaaatataaatataaatattttaatttaaataatatttaattaaattattttaatttttataggaagcccacgaggaaatggaaaagtgcgaaaaattgacggatggaaaaacggatgaggatgaagcacgaaggaaagcagatgccaaaatgaaacaatttgaagcgaaaatggaaatgattggcaaaatgttcgtttaagcagtttcttttttgaatgcccattcaacaaaaaacatttatttgtaatttgtttcaattattttaaatcatttaattgatgacaaatcacttgaaagtagagaccggacaagagggtcggtcgaacggtttcggttaaaaaccgaaaccgaaaaaaaccgaaaaactcaaaaagttctcggtcgaacggtttcggttaaataaccgaaaaaaaccgaaaccgaaaatcgaaaaataccgaaaaaaaccgaccggtccgatctctacttgaaagcattgaaatattccaccaacattttaaaatttacagctttagttccgggttcattgaacactattccattttaaaagctcaaaatttctcctaattaaataaaagcactttaaaaaaattaattaaaataataataaaatttgttaaagtcgcaattttccactctttttttaaatctttatgttgcttgctacgctattttttttggttgttcttcctaaaaaaataataaaatcttcgggttgagcaaacgcgaaaaaaaagcaattacaacggcactaataagggtggcactggacggaagggggagctggcaagtcaaataaaagcaaccataaaattagcttaattagagccttcctgatgacagacaacatcactatgaatttcagtacatttccaattcaataataaaaaaaaagaagacttcctttacattataaatattttggcggtatgggtcaactgcgtctggccaactgcgtctccgtaaaaaatcaattacctaatacccaaaaatctatgtataaaattcgataaataacacttagccttatcctgttcagttttaatgtaccaaatggatattagaatttttcattttcttatagtaccttatttagacttagtgctttcgaatgataccaaaga

SEQ ID NO: 3300 - DNA, 5021 bp, Heterodera glycines
acatccacaaaacactaattaaacgtaattaattttttctatttaaaactttaattatttaatttttaggcattcctccatttttgcacattacaaattcacatatttgcttggacatctgttaatttgtgtaatttacggtgcatttacactgaattatgtgctcgcttatgcattcgaaaatgcgggaaagtatggcgcaattataattaaaaataaattaattataaaattttaaatttattcagtccaaccaccggtgttgtggcccccaacccttgcctacgcccttgctatcggcaccagggctgggaccgcgccgacaatgcgcgatccgcggtcgcggcaaaatggccgcgccaaagtgggtggttcccaatgggagccccccccccatactattcagtcccatcgcaaattttgtatatgcaggattttaactaatttaaacaaaattgagtattgaaatgcttggaggcatttatagcaattaccaaatggatagatgatactttgttgtattgtctatttttattttattttttaattttctgtaaaaaatgttgatatttaatcaactgagacgcagttggccttttactactaagacgcagttggcccgtttcgtattttggcgctagttaaaaagtcaccacttttgaaaattttttcaaacattttttttcatgcaatttttttgtttgtttattttcaatcatcctcagctaattttggataaacatttaactctcaattttagtcaaggttaaaatattaagaaaaaatttaaaaattgaaataaaattaaatgataaaacaattaaatatcttcagctagctatcgatttttttttcaaaatttttggcttttattattacttaaatttgtaattaattatatacaattttgttcagaactgctggacggaatcacttggtcttcaaagacttgactgattccaacaattttaaatatattttcttttttaataaaatcccttcttttttatgatttatttggaatagagaaaatgcttgccgaaaataaggaaatgctttttttttatggacccagtcaccaaaaaggacaaatgggcaacaagcgccatcgtatcggacaaatatagtacggtacagcgtagtccgtcctctgtggtgtgccattttaattcactgaaaaccatccgccgatgccgacgagaatggccacaactctcattagcaattaattatacccaaagacaaattcaaattattgaggcacaaagggcgtagaaagaaagaagatgacatatgttttcaataacaatgctcacgaaaacaccacccttatagggggagatgaattcattaataatttcattattttttttttttgtttgccgcgcactttacgcgaaaccatcgcttttttcggaataaaatagtcaaaaaaatttaggaagtaaatttaattttcaacattttttaaattagaaatgagaatttttaaaatgtgtaggggtgttttggcgcccacgtttcagcgccaaccctagtttttggactataactttttttttgtcaaccaaatctaacaatcttggtatcattcgaaagcttttcatgtttggaagctctttctaagctattgctctgcgattagacaattaacaaagaagttgtaacatgaaagttgcaaaaaagtcgaaattttagaagtttttttcttaataacttttttttacaggctagaaaatttttttcattttttgtaaggctaatagagcatgtgaaggggctttcgtatgatgctaagaatgctcgattggttgacaaagaaaacagttatagtccaaaaatttggcctggcgccgaaacgtgggcgccgaaacgaccctttcccctaatgatatatttttggtatttttatttttatttaatatttcaaatggcttagagagaagcaaaagtcaatagttttgcgttacattacacaaaaatgtcgtcaaatggcatcatcacaattgtggcgctattccttgtgttgtttggcactcacataacaacacaaattggggcaatgaatcgtcatcgccagcagcgctcacttggccatccgtttacggtggataagcagcagcatacggtaggagacaaagtcagtcagtcaattagaaacaattaagcgtaaaactaattgatccatccggattagaaaggaaaattaattttaaatataaatcttttttgattttaattggttttgcgaaagttttcgtttttttttgtcccattttcatataatccgttgaagggattagcaaaagttgcctctgtctgatgtcatcatcaccatgtgactttaaaatttagcggaagtttaattttaagacaatgggaattaattagtgaaataaactgagaatgacgtcaattaagaaagggaaaacaaaaattgattaaaaaaattcaaaactaattaatttatgaatattttaatttgttattcatttaatttgcacttttataggcacagaacgaaaatttggtcggcgcttatttgtctcggggaatgttcagctgtggcgccaaatatgttggcacattgcaaagactgaaaagaatcattgaggtaaaaaggaggcggaaaatgacagaaatttgaaaacaaaatgccaaataaatttaaaatatttaaaatataatttaaaatgttattgaatataaaggaagtgcatgccgactattcggaatgccaaaaatcgatgaagcaaatggacgaggacgagcaaatggcattcggaaaagggcacggcacagagcgatttgcggtgattgacgaactgatcaattgagcccaggggggcaatttgtggcaaaatcacaaaattcgaagcataaccatttgaaaaacattgaaatgatttttcattgtttgtgataaagcgaaacagcaatttgttaataaaatgccaaaatttgtgccaatttattcgctgtccaacaaaaattaattaatttttttcacaattcgtccccataattcgtttttgtttttgttttgttcgtcgtttcgccttttttctccatcattttgccctcatcagaaaatgcatctgcgcacttcgcctgcttcggtttggctttgagaaaatgctcaaacactttttgaaggttggcgtggaaaagcaatcggacctaaaaatgaaaaggaattaaaaataaaataaatatgaattaaattaaggctaattaattaatttttaaaatatctggcaataagcaaaggttctcgaacctgcacaggtatcttgtgtttggatgaatgtgggagaagaatccgtgacaagtttctgaataaaaaataaattaaaataatgcaaattttggatttaaaaacgaaaaaaactgaccgcataattggtccacgaaagctgaataattaagcaaaattattttcaaataatgaatcaatttattttttatttagtccgcttttcatccagtttgatccattgtccatttttgtgacttttaatagtccatattttttagccttctttcatagtcaatttggccttattggacaaatattccatttttttgccattttgtcactcgtttttttccgttgtccaaatgtccctcttttggtcattatgtccccacttttatctcgaatttgtccattttctcaccttgcagagctcttcgtttgacaatcaatttgcactgtttttactcttttgttccgtattttttttcatttagtccttcttttttccattgtctactatcgcttatttaaagctgtttacgctatcagagattgaaaaactgaagtttgaatccgattttggacatagtcgcaaatgtctggggcgcaaatgtacggtaacttccaattgtccacttttgtgtccacttgtccccttcccattttctcaccatgtaactcttcgttggcgtgaaattggcactgtatttgttgtccactttctgctgccccgtcgtcttcctcctctattggcacgtgccgtcctcttccctctcctcctcctcttcctcctgccccattttcgtcatcgtcaacgtcggccggtgccatttcttccgcctcacttttttgttgtttttgtcgctgtaaaaccattgcaattgttggccctcgtctcattattttgctgctggcaaatcgttcattttcatccgccaaagtgcgcacgacggacggcaaaatgaagaggaaaagcgaactgagggaggaaaagcgggggaaatttgaaaaataaaagtttaaaatttaaaaaatgactaacccaaaaaagaatgcattaatgtgagcggaatattggcgcatttcagcagcaggaatgcccaaatttggaaaagcgtaatgctcgtaaaatttggccgcgaatggcaaatgaatggcgcggaaagggacaaatgactgaatgaaaatgagagtgacaaaagcaaaacaatcgctggcggcgttctgaaaagcaattaattaaatagataaatgggtggtggtggtggcaattctcgcgttggcacttaatttattcgccaattgggcaaaaaaagggcaggtgaaatttgatcaaacgggggacaaatgggacggaagtgggcgaaggagtgcgtcaaaaatgacaaattgacaggcgaatgatttgattaatatgccaacggaaagcaaattaaattgggacactaaatttaacaaatcaaaaaagggagtgccaatgaaaatgaaatggaaaaaggaaattaggaaaaagagaaaaagcggaagaaaatggcacttttaaatgggcgatcagcagcagaggattaattgaataaaataagccaatgtgttgctctgtttcttaattgggcaacgaaatgactaaattgctaagtaaaaatcagtttaagtaagtaattactaattacatttaatttttaaatcttttcctgctccgaattttttttttacaaattccggtccctaagataattaattggtcatttatagaattagtagt

SEQ ID NO: 3301 - DNA, 3728 bp, Heterodera glycines
attgtgtagggggctgaaggaaacgaatgtccatagaagtatgaaattgaaacaaggtggctgtttcccggacatagatttatcttttaaataatttataactatttttttatttcgtcttaattcctatttttggcatttaaatgtaattgcctggattaatctcccggtagttggctatgccgtacgcatcgacgatggactggaagccctggttgaatttgtttgtccggttgtaagtgggcggcgactcggcggtgtccattctgttcaaaattgacggcactgtgctgccgctttcatcctgaaaatgcaaaagtacacaccaaaaaccacatgattggattaagttctcaaaagcgtacacttcctgtcttcagcgcccgttggattcggtcaagttccgaaacggggcaccaacactcggcgacaaagcatttctggtccaggttgaacaggttcagcgtgtggtaaatggccttgattttggtgacctttgccaaccacatgcgcacattcttcgccgcagaaacctatgggttttagtgaagtaaaccctggtgtccagttccacccgcccggccgtcgttgggtaaaataccagcactcggtgcctgtggtcctgcgtttgtcccagcaccgtcttcaggtcctcaatccgtgtcatcactccgatggacatctcccgacgttcctgcggcgtttctgggcatggataaatggaggcacgaaagctgaatttgcaaaatttgaccggatggaaaatgttggtgtcgtacccttcgcaaatttttttaatccgacttttcaactgatccccttggaagaaaatgatgaacaccgccttttggacagcaaggccctgaattgatacaatcatggtcaattggccactttcgggacaaaacgttttcgtaatttctaaaacaaattctctgttgtaattgttttttttttgtaaaagggtcattttatgaaagatttaggtagtacaataatcagagtctcgggttcctcatggccaacaattaaataactaatctgaaacggccaggggaaatgaactgctccctaccgtcacagtgtcactgagtgcctcggtgatctccgcctgtctcaagaacacattgccacggcacgcgcgccacagcaaacgttcaaatgttggcagacgttcacggagaatcacgccggcgatgaatctcaaattaaatgttgttctttcaattcaattaaatataaattcggctatttgctaattcaattaaaaattccattttcaaatgacagtgatttgtcctatttctcgtgacagtgcggtgaaaggtgctcaagtgtgcgtgtgttgtttcatttactaactctctatctatcccagtcattcactcacttcaaatggccctttgttgggatgggttcggtggcccggccttcggtcgggattaggctagagccgtcatccgtaaacagttcttcttgggcgagggtatttagggcctgctgttcgccttcattctgtccgtggggaacagacacaatcaaaatttgacacaaattcaaattgcgaaattagaaaacccctctaattcaaaaaatgtgttgttaaaaaggctgattataaagaaattagaagagcataaaaagaaacaaacaactgtactaattaatcaaagacaaaaaaagaaagggaagcaataaaaaaaagaatttcccgaggcaattaattaattaagacaaaattaaacaaaatcgagggggggggtaattaacactccgacactttaacaagaaatggacaattcactttgagcataaatcaccacactgtcacgccacaacgtttaataagtgaaaaataaatcgacaaaaaataattgggaccaaccgaaaacgcaaacgggaaccaccggtgtccacgaattcggcagggccgagcagcggctgttccgcgtcgaagtccacgcgcgtttcctggacggcggtcgaccgtttgtggaccgacgtggaatacaaccaggaacgacgctcggactcgaccttgggcaagcgaatgtgacgagacggaggagaggaggaggtcattgaacagagggagaacagaaaaaggaacaaacgcaacatggtcagcggaggagggacgacaaataaattacacggccgggttttatgacacgaaatttcggcaattttccattaccctcccccgaaaggttcttttttgaatttaattgtaatttttagcgaaaaaaagaaaaacgatttaggggatgggaaaggaaaagcaacgaaatatcggacatcaagaggaggcacaaagcccgacaacaacaaacaccgtgaaagtcagaagcggaacaaagggaataaacaggggaagagtcgaaaatatttaattacataggacgaaagcattgagacagctaattaaagtagaaatataagcaaagaagcattgccaaggggggaaggattagaacagaaacagcgaaccagaaaaaaagacaaccccaaaagccaaaaaatgggaaaaattactgctataaaaccttgaagaagacaaacttttaaagccaaaagcccctcccaatgattagaggccgtttgaacggtacctcgtcgaagaattgctgcgtctttctgagaatgtgtttcagctccgtcaactcggcaaaattcttcttcaacatttcctcgttttggttcacttctctgagttcgttttcgagtttctcaaaaattgcctggaaatttaattttatgaccggtgttttcccggagttatttgaaaaagtgtgcctccaagtcgaacatttctcgcggtgccggcgcttccgggttttcccctgtgtcgagcatcggaataccatcctttttgatctccgtctcaagaaacccttggcaaagtgaaattaggcaaatccaggaacacaactgattcaaaattactcaatttgcgctccatttcatcacaacgacgcacttccgtcacaaattttcgttgaaaaatgttcactttttcattgagctaaattgagattcaaataatttgccaaaagatttgctaaaaatcacatcacgaaattgcacaagtccaagttcgcccaactcggcaacgcatgagtaagcagcctctttttgcagaaaaagttgtgtcaagcacctaaacgaatttaaatgctcaaattgtgtggtgcccaatcggcgaatgtctctcacatttcttcacttcgatggatggaatccatgccttcttcctttgggaggaacaaacaatgggtgaaaatgcaacaagttaatgcacagaaaacagaaaaagcaaatttagttaattcaaatctaaatatatgtaaatgaatattggcaaatggacggccaaacgattaattattaattacaaaaaagaaatgaagcaaatattaatttgtactaatcgaatttttgccgtttaaaaacaaaaacaataagtcaatttgatggccaaacaaacgaaatgtgagtaattgtctcaccttcccatgcattaggtcgtttaggaaaaatccaataataatttataatttatttactcaaacgatttcctgcattttctgcctctctgaccttacatgtctctctctgtctgcgcacattccgcttcaacttttaattgcctttttcaattttggctgtcaattttaccatttgtctgcattttttgtctgtgtctgttcgtttgttcgtcccattcc

SEQ ID NO: 3302 - DNA, 1878 bp, Heterodera glycines
cgagttaatattcccaattaggtaattgtgttcagcgcctgaagctaattatataaaagcattgagcaaaagccgatattagtaaaaataaaattattggacaaagattttaggacaaagatcaatttaaccttaataaactgtttattttgtttacgatattgaaatttccgaatttatcccatgttgtttgttattaaattagagcttttgtttactttgatgtaaaatcacaatttttaaacctttaattaaacattaacctgtttagatttgttacaaacgcttggaacttgcagtgagaacaacaattgcaacaatttttggccttgagccaacacaccatcagttattctgttcaacacttagtacgaccaaagaagacccctttcaattgcatgtgaacatggccgagaaaaggaagcttctgaacgaaattgataaatgttataaaaaggtgttttaattgaaacatcatattaaccaaaagtttatttcgttgttagatcgacgaaggctttgaaattttcgatgacatcatggagaaaatgaacgaagcaaacagcgacaatcaacgagagaaattccaggacgacctgaaaaaggagataaagaagctccaaaggttaagggatcagatcaaaggatggcaaaactcttcggagatcaaggttttcaagtatttctttcacttaaatttgattacccttttctctgttattgaaggacaaggactctctgtcaaagtttcgaaaactgattgaacaaaggatggaaatattcaaggacgtggagcgagaaaataagacgaagccgcacagcaaacagggactgtcagcggaggacaagttggacccgagggagaaggaaaagtgcgagaccattgaatggctgaatgtgaggagagcgaaaacgcgagccataccgacatcatctcccgtcctttatagtgccaaattcggagaatacaggacgaaattgacaggacggagtctaaactggaaacaatgtcatccatggccgactcaaataggaaacggggcaagaaggacgaagcgaaaaagaatgagaaagaggtgtgcggaagagggtgatggccgactgtttttgaatatagtaaagttatatttttcaaaaaatttagaagtcggaagagctgaggaaacatctggagagggtaaaattccatctgcttaacttggaagtgtgcatgagaatgatcaacaatgaaaagctcgagatcaaggttgtgcttggaaagttgaaggagccgttggagatgtacatagatgcgctggacccggagaatgacgacgatcccgagagtttggaccctgaaggttgcttgaatcacggcagcttttgtacacacacactgctggttttcagacatttacgaggaacttaactttggcacatacctctcgcaacttggcggaatcattacgacgacgagtgtggacgaagagaaggggccattgccaaatgacaacggctgttcttccggatctccccaaatttccggcaaggagaagcagccacagttgaacctgtcttcgcctaccatcgctgctgcgccgattgtaacctctccggaatcggctagtgccgacataacaacatcagtgggcaccgcatcggcaacgaccgcgcaggaagacgtgttccttttcaatggaaccgaggcacaaccgcgtaaaagcaaggaaccgcaagaggtgatttatttacaaacggaaaattatataaacctgagtgcaatttaacacccaaaaattgcgattttgagtttttttagggtaagttggagtttaaggaccgaaccggcggcgtcacttaggacgccagtattttggaatttttaatgaattgtaaaaa

SEQ ID NO: 3303 - DNA, 1032 bp, Heterodera glycines
  unsure (1)..(1032): unsure at all n locations
atttacaaacggaaaanttatatanacctgagtgcaatttaacaccccaaaaaaatgcgattttgagtttttttagggtaagttggagtttaaggaccgaanccggngcgcgtccttggtgtcgccagtattttggaatttttaatgaattgttaaaaatttgtttaaatttaaaaattttattctcccaccttcgccggagaccaacccacccccggaattttcgttttgggcctacgttacctcaaaaatgtcaaaaagggcgcgctggctggataattttttttaccattctcatatcataaattagcgtaaaagactttttcagtttttgcgcatgaattattgaagtttaggcccaaaaagtacccccactccatctcttacaccccccccttcggttcagaattttaaaacgtttcaatgatccctaaatttttaggtgcggagtgcttggggaagtacgtacccgcgtaccccctcctgtctccgtccctgtacatcgagtctggacctctcgcaacctggcggaatcatcacgacgacgagtgcggacgaagagaaggggcctctgttaaatgacaacggctgttcttccggatctctccaaatttccggcaaggagaagcagccacagctgaacctgtcgtctcctaagtcgcctaccatcgctgctgcgccggttgcaacctcaccggaatcagccagtgccggctcaactacatcagtgggcactgcaagcggaatcattacgacgacaagtgtggaagaagagaatgggccaccacaaaatgacaacggttgttcttccggatctccccaaatttccggcaatgagaaacagcggcagctgaacctgtcgtcgcctaccatcgctgctgcgccggttgcaacttctccggaaccggccagtgtcgactcaacaacatcagtgggcaccgcatcggcaacgaccgcgcaggaagacgtgttccttttcaatggaaccgagtcacaaccgcataaaagcaaggaaccgcaagaggtgattta

SEQ ID NO: 3304 - DNA, 3759 bp, Heterodera glycines
  unsure (1)..(3759): unsure at all n locations
gaggagctgttttcgggtgcacaaaatgaagagcagcggaggccatggcacaaaaagcagcaaaaagcgaattttcggggccaaaaagacaaagggcggcggcggaaaggaagggggacgagtgggcaaaatggtcgactggtggatgggacgaggagaccaatggccgaacgaagcggaggaggaggagggagaaaagcgggacaagcaacagatggtcacgctggccaagaccaccattcagttgagtccatcgtgggaaagggacggcacaaaaatggcggagaacggcatggacagggacacgacggtgaggggataaagcatgggaggagggggaagagtgagcgaaaagcagcatttaaaggggataaattactgtaaagagggggtacggtaagaggatgaaaagggaaggaggaaaagccgagtaagcaaggcatcatcccttcagcagaagttcaacattagcaacaacaccaacagttgcacaatgccaacacctttcattgttggcaaaagtcggacgattccattgaaaaacggatggaatacgacaaaagcaattgagaagactgatcagtcgaaaagcgaagacagagggaacgaaggtgatcggaattgaccatttgtgggcgggggagagagaaaaaagagatattggtggaggagcggttaaaaatggtcttaaagcccaaacatttgctagttgctgtgaaagctttcacctgagctactgtagcagtactgtaaaagcaaaaacattttgcggtatctttccgacaatataatttctccttttcgactcatccagtgagcgtctctttgcaagttgtccgggaacacaatgtgaccatttcggcatcgtgctgttttggtggtgtcgctgagaaaaaattcccgccactttttgcgacaacgacggcacaccgcggaatgccattgtcattttgtagaaatgaaaaaggcagcaaaagcgtcaacagaacgccaatgggggcggaagtgcgggcgaatggcgccgccggtgacgtggtgagaaaattggaactccgaatggtcgacattgagctggaagagggggaggacgaagaggacggcatggaggaggagaagcgcaaatggcgacggagggaatggcacgacggaatgagtgggaagagagtgagtgctttccgaagttcgaagtttcggactctcgcttatttgaaaatctaatccaaaaatttgttctaattttggcaaatttatttgtcagagtcggcaagaagaagaagacaaaggcggagcagcaccaactgcagcacaacccaaacagacaacgacggggtggacacaattcaaacggaacagagagcagcagcaaagagagaggagggaggacggaggtgaaaaaaaggggcggtggtttgggcatgctttgattagctatgcccgagagtctcgagtcaattaaacctaacctgactttttgcgtctcgactcgagagtgccccccgccgggcagccaataaaaataattccgacaattttgtttttggttttaaatgtttcgaattattaaacggcgaaggattagaagcgcatttgcataattattgaaaaacattttatgtttgcaacattttccccttttgctcatcagtgtttctccccattcgtcgcctttgtccaccccaaaaatattcgtcgccttattcgtccccaacttttgtgccttttcctcccaattgctccaccgcccaaagtgccgtggccacaaacttcgcccgtgccaattccgccctgccacttctgtccccattgtgctcccctcaaacggcaccgctttggttgaacatcagcaacgggtcgagcagcggagttggctcaagcggtgagcacgggaaaaaataatcggcttattacccattttaaaatttaaaatgtgccaatatttctcttttgtcttctcagtttcgtcagtttcgcccaaatcgaccgacggtgagggcgaaagggataacggcaaaaacaacggccacaaaatggagcagttccagcagcagttccgtcgcacaacaaactcctggacgagtcgtcgtccccactgcactccgtgcggcggcactgctgctgcttctgctgactatcgcgtcatttcgttggacatgcgcccggagccgggtcgactggacgactttgtgcccgaggtgaaattaatgatattaaattgaaaacttaggaagtgctaatgatattattaattgtctatccccgcttattaaaaaggtggagagagagagaagcaaaaaagcgatggatagaacaattggagaatttgacaattgcactgacacaatcaaagcaaagaaaacgacgactggggaatacggtaagggtaactgtaagaacggaaccaagaccaaataaattcgagagaaaaccgacaaataaaacattttgaggccaagaaatcacagcgaaccgagtcgaaactctagaatgtatgtacaaaaagattggggaatggtctcttccatggcaccgactgatctttgcccccccccccccatcttcagcagctgcgtcgttcaccaatgccaaaacggtggtccgcgagaatcgcaattacgacttgcaaagcgtcgactgctggcgacggtggtcatcgcttcgccgaatgccaacgacggcaaatgccgcaaaaggaggaggaggagggactttgccagcaaagaaaagggaggcgaagcggacggaggagagtcaaaatgacggagaagaagaagatgaagcattgcgcagagatgagtggggccgactgattgtggttggttggagacggatgaccaaatgtgtgggggggggggggggacgggggagactttcccggcttaaccgaatcgagcctcttactaatttcagatggggtcccgaatgtaaatatttacttggatcttttgtcgctaatagccactttttttgcctaggatcgaagagagtggcgtcaattcttagcggaacagcgaacgcccagcagccgacgcgtggagagccgaattcgtttgctcgacgcatgcaacgacagcaacaacaacagcgagacggacgacggattagagcagtaccggtatagactaatggcgttcgcaaccgaaaatttctcgagactcaagaccaaaaaccgggacttttctcagtcgagatcctgggtcagctctcgttcgaaccgaggaagtccgggttttaccttgggattcagactcaacaaccaagctaattctccatctcgagtcgatcgggtttttaaggtttcagtctcgggctaaattctcggccttaaaaaaggaacccatacacttatcgaaacaccaaattgttggcatttaacagaaaaattggcacacgcaaaaagccaatggtcgtagttcttgacggaggagggaaagaagggcagcagcagcaaaagttggcatacgatgaagacaaaaaactgctgaggagcgcgacgatgaacaacggcaattgtaatggcaacggaaggacgacgacgacggcacttttaatgagaatgaaaaaagaaaacggcgacaaaaagtggagacaacggaaggaggacgaagaaatttgggagggataaaagggatgagagagaagcagaagcggaaataatgatatgataaatgataaggggagaanagcgatgggaaaatttaaaaataataaaggatagntaatgaatagaacccgtgcgacgcgacgaatatgcaaatcata

SEQ ID NO: 3305 - DNA, 1967 bp, Heterodera glycines
ggtttctaccatataaatcgacgagcttttttttttacttttttaaacagcttttttttgcggcacgcttttttcaaaaaaaatttgggaacaggggggtccggcgctgccgataggcgtcgccgggaaaaattttgagaatttcgttcagatttcttagcaggttttcacaaaaaatggccaatttttgcgactttgagcgccgtcgaaaaaatttgtaatttttaaagcgatttattaacaatttttgcgcttttgggttaattctttaagaaaaatggggctttgggtgccggcggttcaatacttttcctctttttccccttcgttacaaacccccccccccctcgtcaacccccttcctttctctcgcccgaccccgattacgaaggcccacttcctcgctcccggtaaattcgacactattgaatataaaaataaataatttaaaataaataaatccatttacacacacaaattatttttcaacctatccaaaattacgacggcgtccaattttctggtgtccaatttacaggtcccactttgttggtggctagaccaccccaaggttaaactatttggcggctgctagaaaatcaacattactccagtatttatgtgtttcggctgcagaatcgccggttccatatacatatgctgatcatctataaaaaataattaccaattaacattaatacagtggtggaaaaaagtctagacgcaaaatgataaaatttgtaaaatttaaaaattttgcttgtttaagtcgacttattatttttattttggtataattaccagggctgccaaaagcaaattcaataaaaaaattttattcatcataaattttatcggttgtttttgcaatagcaaatcaaaaatttctcaagattttcggcactaaagatcatcctattgtctgccaaaatattcttataaattgaaaatgaacgctccacttcggaagattgaattggagcatgtttgtacttgcaatcacttcgggtagcaaatgcatttgaacattttcataatagtttttttctaagggttattcaaatcggaaaatatttgacgaaaaatggcaaaatatgcacgaaatatgcagaaaaagccaaaatatgcaaatatgcaaaaaaaaatctcgaaacatgcaaaaatatgcaaataaaagtcccgatttttattcgcaaacacaaaaaagaaagtgtttttcctactatttagagcatggagaagccaggaaaaaaaatatgcatttacatacttttggcagccctgataattaccctcaatataggactcttttatacacaataagaaaatttattcgacttattcattcccgagattgattcacttgatcagacttgactgaaaaaagggcggaaaaaagtcttgactcaaacatgaaaaaccacgttatagttcattaaaaatctgaaataattcatgcttgcttagcttttgatgctgatcaaaaaagtcttttacaccaacttgatcagatcaccactccttcatggtgacctggaaagacaaagtacaattttcagaccaagtataactttttatgtacaagtcgtaaccctaccattcagaaggcaattcggtagagaattttgtgctctttctggtagccctatccaaaattgcttgtatttgaatttatggctattaagcttttaaaatcttctttatgtcccataaatataaataatctaaaggtaatttttaaatattattggttttaaaattaaagatgtagcgaatattttaactaatttattttttattaaataaaggaaattatcaattaaaataattaaatttagttatttggataatattttgggactgaaacggcccctcccttctaaaccagcccacccatacttttgtcacttcgcccacacttatacttttgtcacttcggcatagcaccgaaggaggggggggggggg

SEQ ID NO: 3306 - DNA, 1833 bp, Heterodera glycines
ggagaaatttacaaaaattttacttagattaaatttaatttaggaaaaatttacaaaaaattatttttaagaaaaaaaattattaataaaaaaattttttactttatttaatttgtaagtcagtgctaatgagtaaataaatgcaccccttttttcttttcaaagaatttggtcaaattacaaaaaaaactcgtatgaaaataagttatgccctaacttgtattatttattatattattttccaaagttgtgggttttacgaaacggcctgggcaaccccatttttctatgcgaatgaattgtcagaaaattgaaaaatgtaaaaaacttttattacatgcactttttgttttaaattttatcaaaattcaaatctttctaagattaaattttagattattttcattcttcaaaacaacgaaacatttacctaaaacggaacaaatttaatataaaaaaattttccataaattatttttccaacaattaaaaatatttaaatgattttaataatttaaatgattaatagatgggttttttgcgaatgtttccattttttaaaatttcatttcacctatgagtcagaaatttatttgaatatgtaaaattatttttgacaattttatttacatatttttgaatttattataatacaaattttccatcaaataattaaaaactttaaataaaataaaaattgattaccttttttaatatctgtgatttaatcactcgcatttaatttgatggggttccgtgtgtttcatcgagcagaaaataataatgacaaatgttgcgtttgggattttggcgcgtgacgggccaatgccacacaaacaaaagcataaataaaagatgtaaaatgtgattgatatatacccaaattggtcaaaagaaataaagtgggcattttagccatttgaccgatggattttcatacaaaatcaaacatccagcatttattcttggcacaatttttttcgcttggattggtcacttattgttgctgccgtacgaagatttatgtggcaaaatgcaccatcaaattcatcgccgacagcgccaaaatggcactaatgaggcggctaatttattaattaacgcagtccaagcaaatgaatgtttacgcctaactgacactaatgaggcggaaacgatactactaattgacgcaatcaaagaaaatggcactgtaccactgaagccaccggcacaacctgccaaagccatgcactttgtggtcatttcagcggtgtacagtacaaaaagcaaactgtaaatgccgtggccaaactgtaaatgctttggctgacgattggtctcgcattccgtcattaaatacttaaaaaaaaatgaaaagcataataatgaatacaaaaaatgcatgcgaaatgcgtcggttgtggaaaaacggattcttatatgaattaggggcttaaaaatgcctgaaaatccagcaattactaatctttccataaatctaattatactaattaaaaaagaaaagctgctaatttgttttaagttactctgacaatcaaatcgttttgttggttgatgcacaatttgatgatgcaattgtgcaacaaatttttgttgctaaaacgtccaatgggacaaatgagcaacaaacaaattttacactgcataaagcttcaagacgtactgacgtatgcttatggagttcttatatgtctgtgtttgattcggttgatcaaccagaaatgcttcaagttggccaagccgaaaatatggcacaaattgaggtattttttattgtatctgcaattagattgggcccgtatcatacattaaataggagggggggggggg

SEQ ID NO: 3307 - DNA, 2248 bp, Heterodera glycines
  unsure (1)..(2248): unsure at all n locations
tagtgtaatatttgtatggtcagcaaacaatgtaaggtaatttaaatgtatgaaaattgttcaaacatcaaattaatttacacccggcaattgatatgaaaagatagcacaaagattctctcccgtaatacctatgggtcattcattcttatcaaaatgcattcctcctcatcttctgaagagggggaaatccacgaaccccagcaaaatattcaggctcaagagcaaaatcacgaccttgacaattatgaaaaacgtttctttcttggtgaacctatccgtcaaaaaacacataggcatgggcggtcgacccccgccntaaaaaatgtacggccaattaagtcgggacacttttagtctgtatagtcagttggcatcaaaatagaatgtattttgaatattttgaatttaaactaactttttgcgaaagaattggcaaaattatggcctttcggtgccattttgagctttttttcgcggttgacggtaaattcataaaaaataaacataattaagccattaattatttcattaagttcaattaaaattgaattttcttacactacttttaaggtgaagcggtcgtacgataagaagcgctttgaagttggcacttgttttagtccacttttctttgccgaacattggcaattggttgtgttgaccatcgaaatttatcgccattttggcagtgctcttcaaatcatttatttaatgagcgcaatcgaaggcattttcgatattttaaaggtggatgggttacgaattaattaacattaattaattcattatttatttgtttaattattattatttaatttattagctgtatcaagcagccgatgttgtccaaattgagcattggtattcaattcaaatcgaaggggaaaagtacaagggccttgcacagaccataaacacgaatcaagactggaggaatcaaatatcggcgcataccgattgtctgataaaatatggggtaaatttaactaattaaaacggacgggagaacaattattggaatttaattttgataaaatgcaaaaagaaaattataaaatttgtgaaattcttaaataatcactaattgcctaaatgtcctaaagaatgcagccgaatttctgattattggagacattgacgatgttttggtgccaaaccatggcttttattatgacgaattcattcgaaatgatttgcaaaatgccgccgctttgttgtacgaccgcttttatgttgatacaacgaccagtgggtgccatgggccaaggccttaaatttgaaaaaatggccaaaaatcagcttaaaatttttcaagcagtaaaaagcggaggattggaaaggatttgtgctgttcgagtccgagatttaccgagactttttttacaaaattttttgttcacttaaaatctttaaaaaacaaatctttgaaggttttcctcacaaatttttgctttccttatttcaccttcgtctatttaatacccatataaaaatgtacgaaaactcgttaaataaaacaaaactactaacataagctaagaaaaatgtaaaacacagagcattagaaattggcaacctatagcaataagtgatagcaaaagttgcaagaaatataaaaatttcttaaacgaattatttttttaagttcattaaaagccaatctttagaggtgcaaaaaatctcggtcttggtctcgagtcccgaaaatttagaccgaaactgaaatttttggagtttctcgatgtacactttatttgaacaaatccttcttttctctaagatacaacaaattaaattagtccgatttcgtttccggcatcttcgtgtcgatatccagtggtcacccaaccggtgcccgcactttaaaattttttaatatttatctttaattaattttttaaatggtaatgaaattggtacgggttgaaaagttccgcgcagctgctgagagtaaattaagacttagctcgttcttttggggcccaccaccaccgatgctcgtattttttaaaaatcttcttttaattatttttggctcccgctttggtcacgaactcactcacaaatcattgcccttaagctagggacccggagcgcttctcgctgttcaacattgtcatgtcggcaaaggtggacttgcacaagtcgcatgtgtccaaatatgtggtgaacacgtcactcacagagtcgctgtgngtccattggccggnncacacaangccaaacacaacgctacggacagtgc
